(19) United States
(12) Patent Application Publication
(10) Pub. No.: US 2025/0154611 A1
(43) Pub. Date: May 15, 2025

(54) SYSTEMS AND METHODS TO DETECT STEM CELL STRESS AND USES THEREOF

(71) Applicant: Wayne State University, Detroit, MI (US)

(72) Inventors: Daniel A. Rappolee, Grosse Pointe Farms, MI (US); Elizabeth Puscheck, Grosse Pointe Farms, MI (US)

(73) Assignee: Wayne State University, Detroit, MI (US)

(21) Appl. No.: 19/026,232

(22) Filed: Jan. 16, 2025

Related U.S. Application Data
(63) Continuation of application No. 16/885,162, filed on May 27, 2020.
Application No. 16/885,162 is a continuation of application No. 15/503,375, filed on Feb. 10, 2017, now abandoned.
(60) Provisional application No. 62/036,549, filed on Aug. 12, 2014.
(60) Provisional application No. 62/159,675, filed on May 11, 2015.

(51) Int. Cl. C12Q 1/6897; C12N 5/073; C12N 5/0735; G01N 33/50

(52) U.S. Cl. CPC C12Q 1/6897; C12N 5/0605; C12N 5/0606; G01N 33/5073; C12N 2500/02; C12N 2500/60; C12N 2501/119; C12N 2501/60; C12N 2503/02; C12N 2510/00

(57) ABSTRACT

Systems and methods (S/M) to detect stress in stem cells are described. The S/M, including modified stem cells, assays and high throughput screens, can be used to identify compounds or other potential stressors that can negatively affect development potential.

### CROSS REFERENCE TO RELATED APPLICATIONS

[0001] This is a continuation of co-pending U.S. application Ser. No. 16/885,162, filed May 27, 2020, which is a continuation of U.S. application Ser. No. 15/503,375, filed Feb. 10, 2017, which is the U.S. National Phase of International Application No. PCT/US2015/044701, filed on Aug. 11, 2015, which claims priority to U.S. Provisional Application No. 62/036,549, filed on Aug. 12, 2014, and U.S. Provisional Application No. 62/159,675, filed on May 11, 2015. The entire contents each of these earlier-filed applications are incorporated by reference herein in their entirety.

### REFERENCE TO SEQUENCE LISTING

[0002] The nucleic acid and/or amino acid sequences described herein are shown using standard letter abbreviations, as defined in 37 C.F.R. § 1.822. A computer readable xml file, entitled “W063-0028USC2_ST262.xml” created on or about Jan. 27, 2025, with a file size of 5,583,578 bytes and uploaded via Patent Center, contains the Sequence Listing for this application and is hereby incorporated by reference in its entirety.

### FIELD OF DISCLOSURE

[0003] The present disclosure provides systems and methods (S/M) to detect stress in stem cells. The S/M, including modified stem cells, assays and high throughput screens, can be used to identify compounds or other potential stressors that can negatively affect development potential.

### BACKGROUND OF DISCLOSURE

[0004] Stem cells are unspecialized cells that are able to renew themselves through cell division for long periods. Stem cells can be subdivided and classified on the basis of their potency. A totipotent stem cell is produced from fusion between an egg and a sperm. Stem cells produced by the 1^{st} few divisions of the fertilized egg cell are also totipotent stem cells. These cells can grow into any type of cell that makes up the developing organism, extra-embryonic tissues (e.g., yolk sac and placenta) and embryo. Pluripotent stem cells are descendants of totipotent cells that can differentiate into any cell type except for placental cells. Multipotent stem cells are descendants of pluripotent stem cells that can produce only cells of a closely related family of cells (e.g. blood cells such as red blood cells, white blood cells and platelets, or all placental lineages). Progenitor (sometimes called unipotent) cells can produce only one cell type, but have the property of self-renewal which distinguishes them from non-stem cells.

[0005] Many compounds are embryotoxic and exposure to them may interfere with stem cell and resulting embryo development and induce abnormal embryogenesis and malformations, if not pregnancy termination. As one example, pharmaceutical compounds administered to pregnant women can be embryotoxic. Further, compounds encountered within the environment, or cosmetics also can be harmful. Thus, there is a need to test compounds and other potential stressors for potentially negative effects on developing stem cells and embryos.

[0006] Currently-available toxicological stress tests typically adopt one of two approaches. The 1^{st} approach is to differentiate stem cells by removing growth factors that support potency to test stress effects during production of differentiated, functional cell lineages. A drawback of this approach is that single lineage tests may find toxicants for only that particular lineage. The second approach is to measure outright lethality and morbidity of stem cells in the presence of potency-maintaining growth factors. This approach, however, does not identify compounds or events that stress, but do not kill stem cells. That is, this approach does not identify lower, sub-morbid stress doses that lead to maladaptive runting and toxic responses to the embryo that do not necessarily kill stem cells.

### SUMMARY OF DISCLOSURE

[0007] The current disclosure provides S/M to detect stress in stem cells where the detected stressor might affect all stem cell lineages and might not kill the stem cells. Testing for stress before differentiation occurs is of great benefit because stress at this stage can affect all later-developing cell lineages. Thus, the S/M provide a unifying test.

[0008] The S/M also can detect stressors that act at sub-morbid runting doses that slow growth and negatively impact and imbalance differentiation of stem cells. Thus, the S/M provide for more sensitive stress detection that does not require cell death to observe stress. Imbalances of differentiation forced on cultured stem cells measure organismal responses not needed for adaptation to culture. Thus stress induced differentiation should reduce or replace the need for slower and more costly gestational animal in vivo reproductive toxicology tests.

[0009] The S/M are based on the finding that stressed stem cells (i) slow their growth and (ii) differentiate under physiological conditions that would normally maintain their toti- or pluri-potency. That is, they differentiate earlier than they normally would. Early differentiation of stem cells depletes the number of stem cells available to differentiate later in the development process, reducing the number of stem cells available to form organ systems that arise later during development. This type of early, stress-induced differentiation is referred to as “prioritized differentiation.” Prioritized differentiation negatively affects development potential.

[0010] The disclosure provides numerous S/M to detect stress in stem cells by measuring potency factors (and markers) and prioritized differentiation factors (and markers). “Potency factors” can be thought of as “brake pedals” for differentiation. That is, their expression and activity is associated with toti- or pluri-potency. “Differentiation factors” can be thought of as “accelerator pedals” for differentiation. That is, their expression and activity is associated with normal differentiation that occurs when potency-maintaining extracellular growth factors are removed. Under stress conditions, however, potency factors can decrease and differentiation factors can increase even in the presence of potency-maintaining extracellular growth factors. This type of differentiation is referred to as “compensatory” or “prioritized” differentiation. That is, under compensatory or prioritized differentiation, stem cells can be induced by stress from a toti- or pluripotent state into a more differentiated/committed cell type despite the presence of growth factors that maintain potency. Stress also slows stem cell growth and induces differentiation in fewer-than-normal stem cells to further deplete stemness to “compensate” for fewer cells. Compensatory or prioritized differentiation of stem cells despite potency-maintaining growth factors also prioritizes differentiation to emphasize creating sufficient 1^{st} lineage differentiation at the sacrifice of later lineages. Decrease in nuclear potency factors and an increase in 1^{st} lineage determining nuclear differentiation factors provide (early lineage>later lineage) “markers” that are evidence that differentiation is enabled, but their activity does not necessarily lead to or cause the potent or differentiated state. The differentiated state requires sufficient loss of nuclear potency factors and/or gain of nuclear differentiation nuclear factors. But, different stressors may more strongly release the brake pedal (decrease potency) or engage the accelerator pedal.

[0011] Potency factors and/or markers include: Oct4; Sox2; Nanog; Rex1; TEAD4 (TEA domain family member 4); Errβ (estrogen receptor-related-β); Cdx2 (caudal homeobox domain); Id2; Klf5 (Krueppel-like factor 5); PDCD2 (programmed cell death 2); CARM1 (coactivator-associated-arginine methyltransferase); Sall4 (Spalt-like transcription factor); SSEA1; SSEA3; SSEA4; TRA-1-60; TRA-1-81; and Elf5 (E74-like factor 5 (ets domain transcription factor).

[0012] Prioritized differentiation factors and/or markers include: Lrp2; Dab2; Fgf5 (fibroblast growth factor 5); Pdgfra (Platelet-derived growth factor receptor A); Sox17 (SRY box containing gene 17); Gata4/6; PAX8 (Paired box 8); NEFL (Neurofilament protein light chain); TSHR (thyroid stimulating hormone receptor); Brachyury; Laminin; AFP (α-feto-protein); Nestin; Goosecoid; MEK1 (mitogen-activated protein kinase kinase 1); MEK2; AKT(RAC-alpha serine/threonine-protein kinase/protein kinase B); PL1 (Placental lactogen-1); Plf (proliferin); PL2 (placental lactogen-2; Hand1; Stra13; Tpbpa; Mash2 (mouse achaete scute 2); Gcm1 (glial cells missing 1); Tfeb; Ctsq (Cathepsin Q); AMPK; SAPK/JNK (stress-activated protein/jun Kinase); Cubulin; TBP (TATA binding protein); Vimentin; Snail; GSK3; and JAK/STAT.

[0013] The S/M can be used to assess compounds and other environmental conditions for stress effects on stem cells. The S/M can be used to screen compounds and other environmental conditions for stress effects on stem cells before the compounds or other environmental conditions are developed, commercialized or released into the workplace or atmosphere. The S/M include modified stem cells, assays and high throughput screens (HTS).

### BRIEF DESCRIPTION OF THE FIGURES

[0014] FIGS. 1A-1C. SAPK mediates decreased Gcm1 and Tpbpa and increased Hand1 at all O₂ levels. There are greater effects as O₂ deviates from the stemness optimum of 2% O₂. Trophoblast stem cells (TSCs) were passaged and cultured at 20, 2, or 0.5% O₂ overnight. FGF4 was replenished the next day at time zero, and SAPK inhibitor SP600125 (10 μm or 50 μM) was co-incubated with TSCs for 2 days at the indicated O₂ levels±SP600125. Markers were quantitated using qPCR. (FIG. 1B) is a graph derived from data in (FIG. 1A), where the highest inhibited group was subtracted from the uninhibited group at each O₂ level (the subtracted difference is shown as a color inset in the histogram bars of highest expression of each marker). The difference at 2% O₂ was set to a baseline of “0” as it was previously shown that 2% O₂ was the optimal level that produces the least stress (activated SAPK) and highest proliferation (Zhou (et als., omitted from citations), 32:475, 2011 (Zhou, 2011)). In (FIG. 1C) Cdx2, Id2, and Errβ decreased at 0.5% O₂ in the presence of FGF4, but SAPK inhibitor had no effect at any O₂ level.

[0015] FIG. 2. SAPK mediates suppression of Gcm1 and TPBPa, and induces Hand1 at all O₂ levels, but there are greater effects for these lineage choices at 0.5% O₂ and 20% O₂ and the least effect is seen at 2% O₂ where it has been reported that SAPK activity is lowest. TSCs were grown at 20% O₂, then passed and switched to 20, 2, or 0.5% O₂ overnight. FGF4 was replenished the next day at time zero, JNKI1 (1 μM) was preincubated with TSC 3 hr prior to time zero, then cells were cultured for 2 days at the indicated O₂ levels with or without the two SAPK inhibitors. RNA was isolated and quantitated using qPCR.

[0016] FIG. 3A and FIG. 3B. Nuclear differentiation factors have complex time- and O₂ level-dependent regulation over 7 days of FGF4 removal and TSC differentiation. TSCs were grown at 20%, then passed and switched to 20, 2, 0.5, or 0% O₂ for one day and RNA was isolated to emulate previous studies. FGF4 was removed after one day, then cells were cultured for 1, 2, 4, or 7 days, and RNA was isolated and quantitated using real time TaqMan qPCR. (FIG. 3A) shows histograms for loss of mRNA for four nuclear differentiation markers, Gcm1, Tfeb, Hand1, and Mash2, and one nonnuclear marker Tpbpa (n=3 biological replicates, error bars show standard error of the mean). (FIG. 3B) shows a three dimensional histogram of time in the x axis, O₂ levels in the y axis, and average levels of the four nuclear differentiation factors and one nonnuclear lineage marker in the z axis.

[0017] FIGS. 4A-4D. Multipotency factors undergo rapid loss on day 1 at 0.5% O₂ with FGF4 present, but the least loss after 7 days of FGF4 absence. Terminal differentiation is lowest at 0.5% O₂ and highest at 20% O₂ after 7 days, and labyrinthine placental lineages are dependent on 20% O₂. (FIG. 4A) shows averages of loss of a mean of three potency factors, (FIG. 4B) the gain of a mean of five differentiation factors during seven days of differentiation caused by removal of FGF4 dependent on four O₂ levels, and (FIG. 4C) shows the five differentiation factors averaged in (B), but only at highest differentiation at day 7. There are three types of O₂-dependence from left to right; (1) PL1 has no difference between 20 and 2, but decreases at hypoxic 0.5% O₂ to 41% O₂. (2) Plf and Ctsq marker loss increased at each O₂ level; 2-0.5-0% O₂. (3) Two markers, PL2 and SynTa have the greatest O₂-dependence, decreasing greatly to 21 and 12% at 2% O₂ and 8 and 9% at 0.5% O₂, respectively. (FIG. 4D) shows the oxygen-dependent accumulation of mRNA of a marker of the 1^{st} lineage (PL1) and a later lineage (synTA). Note that synTA always requires highest O₂ but PL1 is induced by hypoxic stress early but requires highest O₂ levels at day 7.

[0018] FIG. 5. Although greatest multipotency factor loss and differentiation factor gain initiate at 0.5% O₂ with FGF4 for 24 h, terminal differentiation is lowest at 0.5% O₂ and highest at 20% O₂ after 7 days when multipotency is lowest.

[0019] TSCs were grown at 20% O₂, then passed and switched to 20, 2, or 0.5 O₂ overnight. RNA was isolated and five terminal differentiation marker mRNAs were quantitated using real time TaqMan qPCR. The filled in triangles below PL1, Plf and SynTa show tendencies of all three to be dependent on high O₂ at 7 days, but early lineage markers Pl1 and Plf are induced by hypoxia at day 1, but not SynTa

[0020] FIGS. 6A-6D. (FIG. 6A) TSCs that differentiated without FGF4 for 7 days had the highest ATP levels at 0.5% O₂ and the lowest ATP in the rank order 20%<2%<0% compared with baseline stem cells at 20% O₂+FGF4. TSCs were cultured in 0-20% O₂ for 0-7 days±FGF4 as indicated, rapidly frozen, and assayed for free ATP (n=4). (FIG. 6B) At 7 days, FGF4 absence increased terminal differentiation markers 8-20 fold at 20% O₂, but lower differentiation levels at 0.5% O₂ were not increased by a sorbitol dose, which induces high levels of differentiation at 20% O₂. TSCs were cultured for 7 days±FGF4 at 20% or 0.5% O₂±100 mM sorbitol. mRNA was purified and reverse transcribed, then analyzed for relative amounts of 3 terminal differentiation markers that were normalized to housekeeping mRNAs. Triplicate experiments are shown, with mean±s.e.m. (error bars). Sorbitol does not significantly increase differentiation markers at 0.5% O₂ (FIG. 6C) Mitochondrial membrane charge increased between 2-3 after FGF4 removal. (FIG. 6D) Correspondingly, at 7 days, mitochondrial Δψₘ increased only at O₂≥2% with FGF4 removal. TSCs were cultured for 7 days at 20% O₂ (a,d), 2% O₂ (b,e), or 0.5% O₂ (c,f) with FGF4 (a-c) or without FGF4 (d-f) and stained with JC1. Micron bar in micrograph (a) indicates 50 μM. Green fluorescence indicates monomeric stain and low membrane charge and red fluorescence indicates polymeric stain and high charge. For original color fluorescence figures see (Xie, Stem Cell Research, 13:478, 2014 (Xie, 2014)).

[0021] FIGS. 7A-7D. FGF4 maintains inactive mitochondria at 20%, 2%, or 0.5% O₂ (FIG. 7A) and mitochondria display higher mitochondrial membrane potential levels (ΔΨₘ) at 20%>2% but remain depolarized at 0.5% O₂ after FGF4 removal. TSCs were cultured for 2 days at 20% (FIG. 7A, FIG. 7C) or 2% O₂ (FIG. 7B, FIG. 7D) with FGF4 (FIG. 7A, FIG. 7B) or without FGF4 (FIG. 7C, FIG. 7D) and then stained for ΔΨₘ using the MitoTracker dye (A). Micron bars in micrograph A indicate 50 μM.

[0022] FIGS. 8A-8F. To confirm mitochondrial inactivity, TSCs were cultured for 2 days at 2% O₂ (FIG. 8A, FIG. 8C, FIG. 8E) or 20% O₂ (FIG. 8B, FIG. 8D, FIG. 8F) with FGF4 (FIG. 8A, FIG. 8B) or without FGF4 (FIG. 8C-FIG. 8F) and then stained with the probe JC1 or TMRM as indicated, in the presence or the absence of uncoupler FCCP as a control. Micron bars in micrograph A indicate 50 μM.

[0023] FIGS. 9A-9E. FGF4 maintained COX subunit I and PKM2 in the phosphorylated state at all O₂ levels, but total COX and PKM2 levels are regulated by hypoxia and did not change with FGF4 removal. TSCs were cultured for 2 days±FGF4 at 0-20% O₂ and assayed by immunoblot for phosphorylated cytochrome c oxidase (pCOX) using a phospho-specific antibody (FIG. 9A), total COX (FIG. 9B), actin b (ACTB) and, pPKM2 (FIG. 9C), PKM1 (FIG. 9D), or PKM2 (FIG. 9E). Histograms show the pCOX, total COX levels, PKM1, PKM2, and pPKM2 normalized to ACTB, with bars showing the average of 3 experiments±s.e.m.

[0024] FIGS. 10A & 10B. In TSCs cultured for 7 days at 20% O₂, all terminal differentiated lineages were O₂ sensitive, but PL2 and CtsQ were most inhibited by the mitochondrial inhibitors cyanide and antimycin A, and PL2 was most highly induced by the mitochondrial activator DCA at 2% O₂. (FIG. 10A) TSCs were incubated for 7 days±FGF4 at 20%, 2%, or 0.5% O₂ with the mitochondrial activator DCA. TSCs were cultured for 7 days at 20% O₂,±FGF4, and with mitochondrial inhibitors antimycin A or cyanide (FIG. 10B). The cells were then lysed and assayed by qPCR for the relative levels of 5 terminal differentiation markers PL1, PL2, Plf, CtsQ, and synTa. The experiment was repeated 3 times and bars show the average±s.e.m., (a) indicates no significant difference and (b) indicates a significant difference (p<0.05) between TSCs with FGF4 removed without or with mitochondrial agonist or antagonist. Where changes in markers are significant (b), the increase or decrease due to mitochondrial agonist or antagonist is shown above the histogram bar.

[0025] FIG. 11. Diagram showing that hypoxia, mitochondrial agonists, and antagonists affect 3 markers of 2 differentiated lineages at the surface of the labyrinthine placenta. COX and PKM2 total protein levels are regulated by hypoxia and fine-tuned by phosphorylation induced by FGF4.

[0026] FIG. 12. TSCs produce twice as much ROS (H₂O₂) 48 hr after FGF4 removal.

[0027] FIGS. 13A-13F. Hyperosmotic stress effects on cell proliferation in murine embryonic stem cells (mESCs). (FIG. 13A) mESCs were cultured in the presence of 0-400 mM sorbitol for either 4 or 24 hr and transmitted light micrographs were taken. (FIG. 13B) mESCs were cultured±leukemia inhibitory factor (LIF) and ±200 mM sorbitol for 0-72 hr. mESCs were trypsinized and counted with a hemocytometer following trypan blue exclusion. Error flags represent standard error of the mean, n≥3. (FIG. 13C) Doubling rates were calculated and tabulated from cell counts in (FIG. 13B). (FIG. 13D) mESCs were incubated in the presence of LIF±200 mM sorbitol for 24, 48, or 72 hr and transmitted light micrographs were taken. (FIG. 13E) mESCs were cultured in the presence of 200 mM sorbitol for 0-24 hr. In some wells, cells were lysed, and proteins were fractionated using sodium dodecyl sulfate-polyacrylamide gel electrophoresis (SDS-PAGE), blotted, and probed for the presence of the caspase 3 cleavage product (n=3). Time-matched cells were fixed, and stained for the cleavage product of caspase 3 with Hoechst staining of the nuclei. (FIG. 13F) mESCs were cultured for 24 hr±sorbitol (200 mM), ±phosphoinositide 3-kinase (PI3K) inhibitor, and LY294002 (25 μM); transmitted light micrographs were taken. All micrographs were taken at 100× Scale bar=50 mm.

[0028] FIG. 14. Activation of p38, MEK1/2, c-Jun N-terminal kinase (JNK), and AKT by hyperosmolarity. mESCs were incubated in 200 mM sorbitol for 0-60 min to detect kinetics of enzyme activation. Cells were lysed and proteins were fractionated using SDS-PAGE, blotted, and probed for phosphop38 (Thr180/Tyr182), phospho-JNK (Thr183/Tyr185), phospho-MEK1/2 (Ser217/221), or phospho-AKT (Ser473). Blots are representative of triplicate experiments. Phospho-proteins and their loading controls are grouped between black lines.

[0029] FIG. 15. Efficacy of enzyme inhibitors during hyperosmotic stress. mESCs were incubated for 4 hr in the presence of 200 mM sorbitol with or without one of the enzyme inhibitors SB202190 (p38), PD98059 (MEK1), U0126 (MEK1/2), LJNKi-1 (JNK), AKTi (AKT), or LY294002 (PI3K). Cells were lysed and proteins were fractionated using SDS-PAGE, blotted, and probed for phospho-p38 (Thr180/Tyr182), phospho-JNK (Thr183/Tyr185), phospho-ERK1/2 (Thr202/Tyr204), or phospho-AKT (Ser473). Blots are representative of triplicate experiments.

[0030] FIGS. 16A-16E. Hyperosmotic stress in mESCs impacts transcription factor expression at protein and mRNA levels. (FIG. 16A) The inner cell mass (ICM) of the blastocyst coexpresses Oct4/Rex1/Nanog in pluripotent cells at E3.5. After E3.5 a Rex1 subpopulation delaminates from the ICM and expresses primitive endoderm (PrEndo) marker, Lrp2, at E3.5 and extraembryonic endoderm (ExEndo) marker, Dab2, at E4.5. At E4.75, Rex1 decreases in the remaining cells of the ICM and, by E5.5, fibroblast growth factor (FGF)5 is expressed in embryonic ectoderm (EmEcto). Upward arrow indicates that expression is maintained or increasing; downward arrow means that expression is decreasing or absent. (FIG. 16B) mESCs were incubated in 200 mM sorbitol for 0-24 hr and lysed. Proteins were fractionated using SDS-PAGE, blotted, and probed for Oct4, Sox2, Nanog, or Rex1. Histograms show relative expression of each protein when normalized to amido black. (FIG. 16C) Total RNA was isolated and subjected to reverse transcription to form complementary DNA (cDNA). Real-time quantitative PCR (RTqPCR) was performed with Oct4, Nanog, and Rex1 primers. Histograms represent relative fold change in mRNA expression using the ddCt method. (FIG. 16D) mESCs in monolayer were incubated±sorbitol and ±LIF for 24 hr. Dab2, Lrp2, and Fgf5 mRNA transcript levels were examined by RT-qPCR. Histogram shows the relative fold changes when compared with time zero, no stress. Error flags are the standard error of the mean (n=3). “a” indicates significant difference for sorbitol +LIF compared with LIF− at 24 hr. (P<0.05, ANOVA and Student-Newman-Keuls post hoc tests). (FIG. 16E) mESCs were treated with sorbitol for 72 h, fixed, and probed for Nanog. Micrographs taken at 40× Scale bar=50 μm. Error bars represent standard error of the mean (n=3); “*” denotes a significant difference from the 0 hr untreated control; “a” denotes significant difference when compared with 4 hr+sorbitol time point. “b” Indicates that the expression nadir (variable in Nanog) was significantly different from the unstressed mESCs at time zero (4 and 6 hr were chosen to represent the nadir in this histogram). ANOVA+Student-Newman-Keuls post hoc tests, P<0.05. In (FIG. 16A) and (FIG. 16D) diagonal lines indicate primitive endoderm starting at E3.5 through extraembryonic endoderm at E5.5 and vertical lines indicate primitive ectoderm starting at E5.5.

[0031] FIG. 17. MG132 proteasome inhibitor effects on Oct4, Nanog, and Rex1 during sorbitol stimulation of mESCs. mESCs were treated for 4 hr with 0 or 200 mM sorbitol±10 μM MG132 and then lysed. Total cellular protein was fractionated using SDS-PAGE, blotted, and probed for Oct4, Nanog, or Rex1. Error bars represent standard error of the mean (n=3); “*” denotes a significant difference from the untreated control; “a” denotes significant difference when compared with 4 hr+sorbitol time point. ANOVA and Student-Newman-Keuls post hoc tests: Oct4 P<0.002; Nanog P<0.005; and Rex1 P<0.001.

[0032] FIGS. 18A-18D. Lactacystin effects on Oct4, Nanog, Rex1 during sorbitol stimulation of mESCs. mESCs were treated for 4 hr±200 mM sorbitol±25, 50 μM lactacystin, then photographed before lysing. FIG. 18A, FIG. 18B, FIG. 18C) Total cellular protein was fractionated using SDS-PAGE, blotted, and probed for Oct4, Nanog, or Rex1. Error bars represent standard error of the mean (n=3); ‘*’ denotes a significant difference from the untreated control; ‘a’ denotes significant difference when compared to 4 hr+sorbitol timepoint. ANOVA+Student-Newman-Keuls post hoc tests, Oct4 p=0.000; Nanog p=0.035; Rex1 p=0.11. FIG. 18D) mESCs were stressed with or without lactacystin and micrographs were taken at 100×. Scale bar=50 μm.

[0033] FIGS. 19A and 19B. Enzymes activated during 4 hr of hyperosmotic stress initiate the differentiation program in mESCs. mESCs were incubated in 200 mM sorbitol for 0-4 hr with or without the presence of (FIG. 19A) PD98059 (10 μM), or (FIG. 19B) LY294002 (25 μM), L-JNKi-1 (2 μM), or U0126 (40 μM). mESCs were lysed, and proteins were fractionated using SDS-PAGE, blotted, and probed for Oct4, Nanog, or Rex1. Histograms show relative expression of each protein when normalized to amido black expression. Error flags represent standard error of the mean (n≥3). “*” denotes significant difference from unstressed mESCs. “a” indicates significant difference from stress-only time point. ANOVA and Student-Newman-Keuls post hoc tests (P<0.05).

[0034] FIGS. 20A-20C. p38MAPK rescues pluripotency of mESCs during 24 hr of hyperosmotic stress. (FIG. 20A) mESCs were incubated±200 mM sorbitol for 0-24 hr and ±p38 inhibitor SB202190 (10 μM). mESCs were lysed, and proteins were fractionated using SDS-PAGE, blotted, and probed for Oct4 or Nanog. (FIG. 20B) Phase micrographs of mESCs following 24 hr of culture in the presence/absence of stress and p38MAPK inhibitor, SB202190. Scale bars=50 μm. (FIG. 20C) mESCs were incubated±200 mM sorbitol for 0-24 hr±either U0126 or LY294002 (25 μM). mESCs were lysed and proteins were fractionated using SDS-PAGE, blotted, and probed for Oct4 or Nanog. Histograms show relative expression of each protein when normalized to amido black expression. Error flags represent standard error of the mean (n≥3). “*” denotes significant difference from unstressed mESCs. “a” indicates significant difference from stress-only time point. ANOVA and Student-Newman-Keuls post hoc tests (P<0.05).

[0035] FIGS. 21A and 21B. JNK-dependent signaling suppressed Rex1 expression during 24 hr of hyperosmotic stress. (FIG. 21A) mESCs were incubated±200 mM sorbitol for 0-24 hr±(A) p38MAPK inhibitor SB202190 (10 μM) or PI3K inhibitor LY294002 (25 μM); or JNK inhibitor L-JNKi-1 (2 μM). mESCs were lysed, and proteins were fractionated using SDS-PAGE, blotted, and probed for Rex1. Histograms show relative expression of each protein when normalized to amido black expression. Error flags represent standard error of the mean (n≥3). “*” denotes significant difference from unstressed mESCs. “a” indicates significant difference from stress-only time point. ANOVA and Student-Newman-Keuls post hoc tests (P<0.05). (FIG. 21B) To test the reversibility of the Rex1 loss during sorbitol stress, mESCs were incubated−200 mM sorbitol for 0-4 hr and then sorbitol was removed from some dishes for the remaining 20 hr (lane 5). Histogram is representative of two independent experiments.

[0036] FIGS. 22A-22L. Viable pluripotency activity reporters respond to stress treatment as previously reported for endogenous pluripotency reporter protein levels. ESCs were lentivirus-infected (Step 1; FIG. 22A, FIG. 22B, FIG. 22C), FACS-selected (Step 2; FIG. 22D, FIG. 22E, FIG. 22F), and stress-tested (Step 3) without (FIG. 22G, FIG. 22H, FIG. 22I) or with 200 mM sorbitol for three days (FIG. 22J, FIG. 22K, FIG. 22L) using pluripotency reporter Oct4-GFP ESCs (FIG. 22A, FIG. 22D, FIG. 22G, FIG. 22J), Rex1-RFP ESCs (FIG. 22B, FIG. 22E, FIG. 22H, FIG. 22K), or ESCs with both reporters (FIG. 22C, FIG. 22F, FIG. 22I, FIG. 22L). ESCs were imaged by epifluorescence microscopy and transmitted light (phase contrast) with fluorescence superimposed. Micron bars in FIG. 22A, FIG. 22D, and FIG. 22G indicate 100 μm as FIG. 22A-C, FIG. 22G-I and FIG. 22J-L were micrographed at 10× and FIG. 22D-F were micrographed at 20×.

[0037] FIGS. 23A and 23B. Stress induces loss of Rex1-RFP but not Oct4-GFP after days of 200 mM sorbitol. Viable pluripotency reporter Rex1-RFP ESCs (FIG. 23A) or Oct4-GFP ESCs (FIG. 23B) were cultured in 94-well plates to 30% confluence. Cells were then treated with 200 mM of sorbitol as an osmotic stress for 3 days. Fluorescence was determined from live ESCs using a plate reader from 200 mM sorbitol treated cells was normalized with the non-sorbitol treated control cells. Four independent experiments were carried out and plotted here. By t test, Oct4-GFP fluorescence in FIG. 23A was not significantly different (b) with stress P=0.327 and in FIG. 23B Rex1-RFP fluorescence was significantly different with stress (a) P<0.019.

[0038] FIG. 24. Viable Rex1 promoter reporter responds with stress treatment in a dose-dependent manner in flow cytometry assay. mESCs expressing Rex1 promoter reporter were cultured in 12-well plates till 30% confluent. Cells were then treated with 200-300 mM of sorbitol in 25 mM increments for 3 days. After trypsinization cell suspensions were assayed by flow cytometry. Histograms shown here are from three independent experiment and (a) indicates significant decrease in Rex1-RFP fluorescence at all sorbitol doses from 200-300 mM as determined by ANOVA followed by Dunnett two-sided post hoc test, n=3, P<0.01.

[0039] FIGS. 25A and 25B. Rex1 promoter RFP reporter ESCs respond to stress treatment with a dose-dependent 2.8-fold increase in the low Rex1 activity subpopulation and a 20% decrease in high activity Rex1 subpopulation. Rex1-RFP mESCs expressing Rex1 promoter reporter were cultured in 12-well plates until 30% confluent, treated with 0 mM, 200 mM, and 300 mM sorbitol for 3 days, trypsinized, and cell suspensions were assayed by flow cytometry. Arbitrary thresholds (vertical red lines) were drawn at 5×10³ on the X-axis between the middle of the two peaks and at 2 standard deviations above the mean of the parental (before infection) dim population shown in the bottom panel. Areas in parental dim, intermediate dim, and bright were defined by the 2 vertical red lines and were quantified as pixels using Image J from data in (FIG. 25A) to give histograms in (FIG. 25B). The histogram bars (FIG. 25B) are derived from three independent experiments (see also FIGS. 26A and 26B) with errors bars showing s.e.m, One-way ANOVA was performed followed by Dunnett's post hoc test; (a) indicates significantly smaller bright cell subpopulation and greater parental dim cells at 300 mM sorbitol (a) (P<0.05), but no significant decrease in bright cell subpopulation or increase in parental dim cells at 200 mM sorbitol (b) significant.

[0040] FIGS. 26A and 26B. Viable Rex1 promoter reporter responds with stress treatment in a dose-dependent manner in flow cytometry assay. mESCs expressing Rex1 promoter reporter were cultured in 12-well plates till 30% confluence. Cells were then treated with 200-300 mM of sorbitol in 25 mM increments for 3 days. After trypsinization, the cell suspensions were subjected for flow cytometry assay. An arbitrary threshold was drawn at 5×10³ on the x-axis and another near the low point between the bright peak and the dimmer peak to its left (FIG. 26A). This created three areas of non-transgenic Parental ESC dim at the level of ESCs that do not express Rex1-RFP (bottom graph of the four). Intermediate and bright groups were also defined by the two vertical red lines. Area sizes of the two peaks were quantified using Image J. The histogram bars (FIG. 26B) are derived by three independent experiments, one of which is shown in (FIG. 26A), errors bars showing s.e.m., One-way ANOVA was performed followed by Dunnett's post hoc test using 0 mM as reference for parental dim, intermediate dim, and bright separately. (a) indicates significant decrease in bright subpopulations and increase in parental dim subpopulations at 250-300 mM sorbitol (P<0.01) and (b) indicates no significance at 200-225 mM sorbitol for changes in Rex1-RFP bright or parental dim subpopulations.

[0041] FIG. 27. Rex1 promoter RFP have a stress dose-dependent loss of endogenous Rex1 protein corresponding to dose-dependent loss of Rex1 activity shown in FIG. 24. (A) Rex1-RFP mESCs expressing cultured until 30% confluent, treated with 0 mM, 200-300 mM sorbitol in 25 mM increments for 3 days (as in FIG. 24), lysed, size fractionated by SDS-PAGE, blotted, probed for Rex1 and ACTB proteins and analyzed for changes compared to time zero and for stress dose responses. The histogram bars are derived from three independent experiments, one of which is shown in the top panel of FIG. 27, shown are X+/−s.e.m., n=3, (a) is P<0.01 and (b) indicates not significant. FIG. 27, bottom panel. One-way ANOVA was performed followed by Dunnett's post hoc test; (a) indicates significantly lower endogenous Rex1 at 225-300 mM sorbitol (P<0.05) but not at 200 mM sorbitol (b).

[0042] FIG. 28. Partial validation of the Theory of Compensatory Differentiation whereby stress decreases in size the normal levels of stem cell expansion and, in the nonmorbid stress range where doubling rates were near-normal, the diminished potency group that is enabled to differentiate is constant in size. Previous modeling of the Theory of Compensatory Differentiation was based on biochemical averages of mTSCs and mESCs undergoing stress dose-dependent diminished stem cell population expansion and simultaneous potency factor protein decrease and 1^{st} lineage differentiation factor increase. A modified Venn diagram from previous modeling is presented here and analyzed with respect to supporting flow cytometry data for changes in potency subpopulation sizes derived from Table 8 and discussed in the text. For convenience, Table 8 is reproduced here:

TABLE 8
Stress induces % potency loss but total subpopulation to differentiation is constant.

| | 0 | | 200 | | 225 | | 250 | | 275 | | 300 | | |
|---|---|---|---|---|---|---|---|---|---|---|---|---|---|
| Sorbitol (nM) | % | # | % | # | % | # | % | # | % | # | % | # | LIF+ |
| Bright | 83.3 | | 77.1 | | 75.6 | | 72 | | 71.9 | | 61.8 | | |
| Intermediate | 8.1 | | 10.7 | | 10.7 | | 11.4 | | 11 | | 13.8 | | |
| Dim | 8.6 | | 12.2 | | 13.7 | | 16.6 | | 17.1 | 264 | 24.4 | | |
| Intermediate + | 16.7 | | 22.9 | | 24.4 | | 28 | | 28.1 | | 28.1 | | |
| Dim | | | | | | | | | | | | | |
| % Dim + | 16.7 × 460 | | 22.9 × 432 | | 24.4 × 407 | | 28 × 356 | | 28.1 ×. 264 | | 28.2 × 161 | | |
| Intermediate# × | | | | | | | | | | | | | |
| Cell# | 7683 | | 9893 | | 9930 | | 9968 | | 7418 | | 4540 | | |
| Total %/# | 100 | 460 | 100 | 432 | 100 | 407 | 100 | 356 | 100 | 264 | 100 | 161 | |

| | | | | Intermediate and |
|---|---|---|---|---|
| | | Relative | Doubling | very dim (% very low |
| | | Cell# | Rate | potency) × cell number++ |
| Sorbitol | Duration | OUTSIDE BOX++ | | INSIDE BOX cell number++ |
| 0 | 0 | 100 | | |
| 0 | 72 | 460 | 32.7 hr | |
| 200 | 72 | 432 | 34.1 hr | 9893 |
| 225 | 72 | 407 | 35.6 hr | 9930 |
| 250 | 72 | 356 | 39.3 hr | 9968 |
| 275 | 72 | 264++ | 51.4 hr | 7418 |
| 300 | 72 | 162 | 103.4 hr | 4540 |

#Cell counts for FIG. 4A multiplied by total number of intermediate and dim Rex1 activity populations to ascertain.
++/++/++ The Inside box (italics) data and outside box (bold) data refer to the Venn diagram. The data shown in bold/underlined show the non-linear range where adaptation breaks down and the previously defined cellular toxicity becomes dominant.

### DETAILED DESCRIPTION

[0043] The present disclosure provides systems and methods (S/M) to detect stress in stem cells and uses thereof. The described S/M can detect sub-morbid stress in stem cells that can lead to stem cell depletion and predict later organismal toxicity and morbidity.

[0044] “Stem cells” are cells that are totipotent, pluripotent, or multipotent and are capable of differentiating into one or more different cell types. Stem cells may be derived from any organism, e.g. any mammalian species, e.g. human, primate, equine, bovine, porcine, canine, feline, etc. In certain embodiments (CE), they are derived from a human or a mouse.

[0045] As indicated earlier, a totipotent stem cell can give rise to all of the embryonic and extraembryonic tissues of an organism. An example of a totipotent stem cell is a fertilized oocyte.

[0046] A pluripotent stem cell can give rise to progeny that can undergo differentiation, under appropriate conditions, into cell types that collectively demonstrate characteristics associated with cell lineages from all of the three germinal layers (endoderm, mesoderm, and ectoderm). Pluripotent stem cells contribute to all tissues of a prenatal, postnatal or adult animal. Cell pluripotency is a continuum, ranging from the completely pluripotent cell that can form every cell of the embryo proper, e.g., ESCs and induced pluripotent stem cells (iPSCs), to the incompletely or partially pluripotent cell that can form cells of all three germ layers but may not exhibit germline transmission or ability to generate a whole organism. A standard art-accepted test to establish pluripotency of a cell population is ability to form a teratoma in 8-12 week old SCID mice. Expression of certain combinations of molecular markers are also pluripotent stem cell characteristics. For example, human pluripotent stem cells express markers including: SSEA-3, SSEA-4, TRA-1-60, TRA-1-81, TRA-2-49/6E, ALP, Sox2, E-cadherin, UTF-1, Oct4, Rex1, and Nanog.

[0047] A multipotent stem cell is capable of differentiating into at least two differentiated cell types.

[0048] S/M for obtaining totipotent, pluripotent and multipotent stem cells from humans and numerous other animals (e.g., monkeys, mice) are described in, e.g., U.S. Pat. Nos. 5,453,357; 5,523,226; 5,589,376; 5,340,740; and 5,166,065; Evans, Theriogenology, 33(1):125, 1990; Notarianni, J. Reprod. Fertil., 41(Suppl.):51, 1990; Giles, Mol. Reprod. Dev., 36:130, 1993; Sukoyan, Mol. Reprod. Dev., 33:418, 1992; Sukoyan, Mol. Reprod. Dev., 36:148, 1993; Iannaccone, Dev. Biol., 163:288, 1994; Evans & Kaufman, Nature, 292:154, 1981; Martin, Proc. Natl. Acad. Sci. USA, 78:7634, 1981; Doetschman, Dev. Biol., 127:224, 1988; Graves & Moreadith, Mol. Reprod. Dev., 36:424, 1993; and Bradley, Nature, 309:255, 1984.

[0049] Particular examples of stem cells include embryonic stem cells; cord blood stem cells; umbilical cord matrix stem cells; tissue-specific stem cells; and placental TSCs. Progenitor cells are also stem cells.

[0050] Embryonic stem cells (ESCs) are stem cells derived from the inner cell mass (ICM) of an early stage embryo known as a blastocyst. Human embryos reach the blastocyst stage 4-5 days post fertilization, at 50-150 cells. ESCs include those derived from an embryo of up to 7 days after fertilization. ESCs are pluripotent and have the capability of proliferating indefinitely in culture, under conditions that allow their proliferation without differentiation.

[0051] S/M for isolating ESCs are described in, e.g., U.S. Pat. Nos. 6,090,622; 5,843,780; 5,340,740; and 5,656,479; PCT WO00/27995; PCT WO99/27076; Matsui, Cell, 70:841, 1992; Thomson, Science, 282:114, 1998; Shamblott, Proc. Natl. Acad. Sci. USA, 95:13726, 1998; Reubinoff, Nat. Biotech., 18:399, 2000; Pain, Development, 122:2339, 1996; Wheeler, Reprod. Fertil. Dev., 6:563, 1994; and Shim, Biol. Reprod., 57:1089, 1997. Primate ESCs may be obtained by, e.g., the methods in U.S. Pat. Nos. 5,843,780 and 6,200,806. Primate and human stem cells may also be obtained from commercial sources such as WiCell, Madison, WI.

[0052] S/M for isolating cord blood stem cells or umbilical cord matrix stem cells are described in, e.g., Brunstein, Br. J. Haematol., 137(l):20, 2007; Sun, Biochem. Biophys. Res. Commun., 354(4):919, 2007; Riodan, Transl. Med., 30:5, 2007; and Weiss, Stem Cell Rev., 2(2):155, 2006.

[0053] Mouse placental TSCs, like mouse ESCs, are derived from a blastocyst arising at E3.5 (3.5 days after fertilization). The growth factor fibroblast growth factor (FGF)4 is synthesized by the ICM (Rappolee, Development, 120:2259, 1994) and this is necessary to maintain the adjacent polar trophectoderm, source of TSCs, in a stem cell state (Chai, Dev. Biol., 198:105, 1998 (Chai, 1998)). The isolation of mouse TSCs was 1^{st} reported in 1998 (Tanaka, Science, 282:2072, 1998) and used FGF4, the FGF4 cofactor heparin, and conditioned medium from mouse embryonic fibroblasts (MEF-CM) to supply additional necessary cofactors. It has been shown that TGFβ family members activin and TGFβ1 can replace MEF-CM. Erlebacher, Dev. Biol., 275:158, 2004). In culture, removal of FGF4 enables differentiation of TSC to produce several different lineages that are defined by expression of Hand1, Stra13, PL1, Proliferin, Gcm1, SyncytinA, Ctsq, PL2, Tfeb, Tpbpa, Mash2. During FGF4 removal TSCs lose the potency factors TEAD4, Cdx2, Id2, and ErrB (reviewed in Puscheck, Adv Exp Med Biol, 843:77, 2015).

[0054] Many types of stress cause potency loss and differentiation increase despite the presence of FGF4. Thus stress destroys potency in two ways, by diminishing normal stem cell growth and by causing differentiation of the remaining fewer cells to compensate for lower cell numbers.

[0055] Stem cells used within the scope of the present disclosure can be cultured according to any appropriate method known in the art. An appropriate medium for stem cell culture includes 80% Dulbecco's modified Eagle's medium (DMEM; no pyruvate, high glucose formulation, Gibco BRL), with 20% fetal bovine serum (FBS; Hyclone), 0.1 μM β-mercaptoethanol (Sigma), and 1% non-essential amino acid stock (Gibco BRL). DMEM Knockout can also be used. The culture can further be supplemented with Knock-out serum replacement (KSP). Cultures can also include one or more carbon sources. In CE, the cultures include L-analyl-L-glutamine. The cultures can include serum or can be serum-free. In CE, stem cells can be cultured with an ALK5 inhibitor and one of a MEK or Erk inhibitor, optionally with a GSK3 inhibitor and/or LIF. MEK and GSK3 inhibitors in one media are called 2i (two inhibitor media) and have been shown to aid in maintaining the ground state of ESCs (Marks, Cell, 149:590, 2012). In CE, the culture media include basal media components for cell survival (e.g., vitamins and minerals, optionally in an isotonic condition).

[0056] In CE, stem cells can be cultured in contact with feeder cells. Exemplary feeder cells include fibroblast cells, e.g., mouse embryonic fibroblast (MEF) cells, or x-ray inactivated CF1 feeder cells. Methods of culturing stem cells on feeder cells are known in the art.

[0057] In CE, stem cells are cultured in the absence of feeder cells. Stem cells, e.g., can be attached directly to a solid culture surface (e.g., a culture plate), e.g., via a molecular tether. Exemplary molecular tethers include Matrigel®, an extracellular matrix (ECM), ECM analogs, laminin, fibronectin, or collagen.

[0058] The disclosure is based in part on the finding that stress stimuli (e.g., toxicological compounds, drugs under development, environmental pollutants) cause stem cells to differentiate despite the presence of growth factors and an environment that is meant to sustain proliferation and potency of stem cells of the early conceptus (both ESCs and TSCs). The unique exponential growth phase normally occurs for days after fertilization and before implantation into the uterus, and then one to several weeks after implantation (depending on the mammalian species). During the exponential growth phase ESCs and TSCs increase population size under normal conditions, but have diminished population growth under stressed conditions. Paradoxically, the strategy of both ESCs and TSCs during stress is to compensate for stress-diminished population size by further depleting stem cell number by differentiating to the 1^{st} lineage at the expense of later lineages Thus, compensatory differentiation is linked to prioritized differentiation when stress induces the differentiation to 1^{st} lineage and suppresses later lineages. Compensatory and prioritized differentiation can occur at lower levels of stress that do not cause toxicity (cell death) in individual stem cells, but additively depletes stem cells so that later cell lineages (e.g. heart, liver, etc.) have insufficient stem cells for development. Thus, later lineages may be depleted even though toxicants tested may not directly affect these later lineages. Moreover, the described S/M provide assays that are more sensitive and earlier in ontogeny. The S/M can be practiced in vitro, replacing animals needed in toxicological assays.

[0059] In CE, the S/M, including modified stem cells, assays and high throughput screens (HTS), can be used to identify compounds or other potential stressors that can negatively affect development potential. “Developmental potential” refers to the capacity of a stem cell (e.g., pluripotent cell) to divide and differentiate and/or the capacity of an embryo to grow according to expected developmental milestones when compared to an average non-stressed stem cell and/or healthy embryo. The S/M can also provide early indicators of miscarriage or at-risk pregnancy; indicator of infertility and/or the effect of therapeutics on fertility; indicator of ESC stress and placental insufficiency as the issue for the infertility; early detection and prediction of diseases of placental deficiency; an in vitro toxicology screen for compounds that may have teratogenic potential.

[0060] As stated earlier, potency factors can be thought of as “brake pedals” and differentiation factors can be thought of as “accelerator pedals” for differentiation. Normal differentiation occurs when extracellular potency-maintaining growth factors (e.g. FGF4 for mouse TSCs or LIF for mouse ESCs) are removed. Stress-induced compensatory and prioritized differentiation occurs despite the presence of these extracellular growth factors. In the stress response, intracellular stress enzymes (e.g. SAPK/JNK, and AMPK) not necessary for normal development induce differentiation using molecular mechanisms that can be used to measure magnitude and toxicological significance of stress:
[0061] (i) potency factor or potency marker decrease, (ii) 1^{st} lineage prioritized differentiation factor (e.g., intracellular enzymes) or prioritized (1^{st} lineage) differentiation marker increase, and (iii) later lineage factor or marker decrease. As stated previously, “factors” as used herein are intracellular proteins that lead to a potent or prioritized differentiated state. “Markers” need not lead to the state, but are indicative of its presence. Classification as a factor or marker is not mutually exclusive. The distinction is made largely for descriptive purposes.

[0062] Potency factors and/or markers for ESC include Oct4; Sox2; Nanog; Rex1; Klf5; PDCD2; CARM1; Sall4); SSEA1; SSEA3; SSEA4; TRA-1-60; and TRA-1-81. Potency factors and/or markers for TSC include TEAD4; Errβ; Cdx2; Id2; and Elf5.

[0063] Differentiation factors and/or markers for ESC include Lrp2; Dab2; Fgf5; Pdgfra; Sox17; Gata4/6; PAX8; NEFL; TSHR; Brachyury; Laminin; AFP; Nestin; Goosecoid; Cubulin; TBP; Vimentin; and Snail. Differentiation factors and/or markers for TSC include PL1; Plf; PL2; Hand1; Stra13; Tpbpa; Mash2; Gcm1; Tfeb; and Ctsq.

[0064] Factors and markers with enzyme activity include MEK1; MEK2; AKT; PI3K; AMPK; SAPK/JNK; p38MAPK; GSK3; and JAK/STAT. Sometimes these factors and markers can override brake pedals and accelerator pedals, during runting stress. In CE, MEK1; MEK2; AKT; AMPK; SAPK/JNK; GSK3; and JAK/STAT can be classified as differentiation factors or markers.

[0065] Particular factors and markers are described in more detail herein, with additional description regarding its identity as a factor and/or a marker. As examples discussed more fully below for ESCs, Oct4, Nanog, and Rex1 are potency factors that decrease with stress and prioritized differentiation. Pdgfra, Sox17, Dab2, Lrp2, and GATA4/6 are prioritized differentiation markers that increase with 1^{st} lineage. These markers increase with stress-induced differentiation. Brachyury and FGF5 are later lineage prioritized differentiation markers that decrease with stress and prioritized differentiation. AMPK, SAPK and JNK are intracellular stress enzymes that increase with stress and mediate compensatory and prioritized differentiation.

[0066] The Oct4 gene, also known as Oct3 or POU5F1, belongs to the POU (Pit-Oct-Unc) transcription factor family. The Oct4 protein (octamer-binding transcription factor 4) can activate the expression of target genes through binding the octameric motif (5′-ATTTGCAT-3). There are two human Oct4 isoforms proteins produced by alternative splicing.

[0067] Oct4 functions in protein binding, miRNA binding, DNA binding, sequence-specific DNA binding, ubiquitin protein ligase binding, transcription factor activity, and transcription factor binding. Oct4 is important for early embryogenesis, for embryonic stem cell pluripotency, and is required for maintaining pluripotency. Oct4 is primarily expressed in ESCs, where it is essential in maintaining potency. In later mammalian development, Oct4 expression is confined to the developing germ cells. Oct4 is conserved in human (SEQ ID NO: 8), chimpanzee (SEQ ID NO: 9), mouse (SEQ ID NO: 10), and many other animals.

[0068] The SOX2 gene, also known as SRY (sex determining region Y)-box2, encodes a protein that is a member of the SRY-related HMG-box (SOX) family of transcription factors. SOX2 is an intronless gene that lies within an intron of another gene called the SOX2 overlapping transcript (SOX2OT). The transcription factor encoded by SOX2 forms a trimeric complex with OCT4 on DNA and controls the expression of a number of genes involved in embryonic development such as YES1, FGF4, UTF1, and ZFP206. SOX2 is involved in the regulation of embryonic development, stem-cell maintenance in the central nervous system, and the determination of cell fate. The SOX2 gene is conserved in human (SEQ ID NO: 1), chimpanzee (SEQ ID NO: 2), mouse (SEQ ID NO: 3), and many other animals.

[0069] The Nanog gene encodes the homeobox protein Nanog. Nanog is thought to function in concert with other factors such as Oct 4 and SOX2. The homeobox protein Nanog binds to the DNA consensus sequence 5′-TAAT[GT][GT]-3′ (SEQ ID NO: 136) or 5′-[CG][GA][CG]C[GC]ATTAN[GC]-3′ (SEQ ID NO: 4).

[0070] Nanog functions as a transcription regulator involved in inner cell mass and ESC proliferation and self-renewal. Nanog imposes pluripotency on ESC and prevents their differentiation towards extraembryonic endoderm and trophectoderm lineages. When overexpressed, Nanog promotes cells to enter into S phase and proliferate. Nanog is also associated with ovarian germ cell tumors and sacrococcygeal teratoma. The Nanog gene is conserved in human (SEQ ID NO: 5), chimpanzee (SEQ ID NO: 6), mouse (SEQ ID NO: 7), and many other animals.

[0071] The Rex1 gene, also called ZFP42 is expressed primarily in undifferentiated stem cells, both in the embryo and the testicles of adults. The Rex1 protein is 310 amino acids long, and has four closely spaced zinc fingers at 188-212, 217-239, 245-269, and 275-299.

[0072] Rex1 functions in sequence-specific DNA binding transcription factor activity and is involved in ESC self-renewal. The Rex1 gene is conserved in human (SEQ ID NO: 11), chimpanzee (SEQ ID NO: 12), mouse (SEQ ID NO: 13), and many other animals.

[0073] The Errβ gene is also known as estrogen-related receptor beta (ESRRB) and NR3B2. This gene encodes the Steroid hormone receptor ERR2 protein which is similarity to the estrogen receptor. A similar gene in mouse plays an essential role in placental development. The Errβ gene is conserved in human (SEQ ID NO: 50), chimpanzee (SEQ ID NO: 51), mouse (SEQ ID NO: 52), and many other animals.

[0074] TEAD4 (TEA domain family member 4) is a member of the transcriptional enhancer factor (TEF) family of transcription factors and is essential for initiating the TSC lineage. It is preferentially expressed in the skeletal muscle, and binds to the M-CAT regulatory element found in promoters of muscle-specific genes to direct gene expression. Alternatively spliced transcripts encode different isoforms. TEAD4 (TEA domain family member 4) plays a key role in the control of organ size and tumor suppression. The TEAD4 gene is conserved in human (SEQ ID NO: 70), chimpanzee (SEQ ID NO: 72), mouse (SEQ ID NO: 71), and many other animals.

[0075] The Caudal Type Homeobox 2, or Cdx2, gene is also known as Cdx3 and CDX2/AS. This gene is a member of the caudal-related homeobox transcription factor gene family.

[0076] The encoded protein is a major regulator of intestine-specific genes involved in cell growth and differentiation. This protein also plays a role in early embryonic development of the intestinal tract and is essential in establishing TSCs. The Cdx2 gene is conserved in human (SEQ ID NO: 44), Rhesus monkey (SEQ ID NO: 45), mouse (SEQ ID NO: 46), and many other animals.

[0077] The Id2 gene is also known as the cell growth-inhibiting gene 8 (GIG8), Id2A, Id2H, and bHLHb26. The Id2 gene encodes for a protein called DNA-binding protein inhibitor ID-2. That protein belongs to the inhibitor of DNA binding family, members of which are transcriptional regulators that contain a helix-loop-helix (HLH) domain but not a basic domain.

[0078] Members of this protein family inhibit the functions of basic helix-loop-helix transcription factors in a dominant-negative manner by suppressing their heterodimerization partners through the HLH domains. This protein plays a role in negatively regulating cell differentiation and specifically inhibits TSC differentiation in humans and mouse. The Id2 gene is conserved in human (SEQ ID NO: 47), chimpanzee (SEQ ID NO: 48), mouse (SEQ ID NO: 49), and many other animals.

[0079] The SAPK gene is also known as JNK2, MAPK9, p54a, JNK2A, JNK2B, SAPK1a, JNK2BETA, p54aSAPK, and JNK2α. SAPK encodes the protein mitogen-activated protein (MAP) kinase 9 (MAPK9) which is a member of the MAP kinase family. Several alternatively spliced transcript variants encoding distinct isoforms have been reported. The different isoforms vary in the use of an alternate internal coding exon of the same length.

[0080] MAP kinases act as an integration point for multiple biochemical signals, and are involved in a wide variety of cellular processes such as proliferation, differentiation, transcription regulation, and development. MAPK9 targets specific transcription factors, and thus mediates immediate-early gene expression in response to various cell stimuli. MAPK9 is closely related to MAPK8, both of which are involved in UV radiation-induced apoptosis. This gene and MAPK8 are also known as c-Jun N-terminal kinases. Studies of this gene's mouse counterpart suggest a key role in T-cell differentiation. The SAPK gene is conserved in human (SEQ ID NO: 38), chimpanzee (SEQ ID NO: 39), mouse (SEQ ID NO: 40), and many other animals.

[0081] The JNK gene, also known as MAPK8, encodes the C-jun-amino-terminal kinase-interacting protein 3 enzyme. This enzyme is a member of the MAP kinase family which includes MAPK9. Five alternatively spliced transcript variants encoding distinct isoforms have been reported.

[0082] JNK mediates immediate-early gene expression in response to cell stress stimuli by phosphorylating specific transcription factors. The activation of this kinase by tumor-necrosis factor alpha (TNF-α) is found to be required for TNF-α induced apoptosis. This kinase is also involved in UV radiation induced apoptosis. The MAPK8 gene is conserved in human (SEQ ID NO: 41), chimpanzee (SEQ ID NO: 42), mouse (SEQ ID NO: 43), and many other animals.

[0083] The MEK1 gene is also known as mitogen-activated protein kinase kinase 1 (MAPKK1), CFC3, and PRKMK1. MAPKK1 has been shown to interact with C-Raf, Phosphatidylethanolamine binding protein 1, MAP2K1IP1, GRB10, MAPK3, MAPK8IP3, MAPK1, MP1, and MAP3K1.

[0084] The protein encoded by MEK1 is a member of the dual specificity protein kinase family, which acts as a mitogen-activated protein (MAP) kinase. This protein kinase lies upstream of MAP kinases and stimulates the enzymatic activity of MAP kinases upon wide variety of extra- and intracellular signals. As an essential component of the MAP kinase signal transduction pathway, this kinase regulates many processes such as proliferation, differentiation, transcription regulation, and development. The MEK1 gene is conserved in human (SEQ ID NO: 53), chimpanzee (SEQ ID NO: 54), mouse (SEQ ID NO: 55), and many other animals.

[0085] The MEK2 gene is also known as mitogen-activated protein kinase kinase 2 (MAPKK2), MAP2K2, CFC4, MKK2, and PRKMK2. The protein encoded by this gene is a dual specificity protein kinase that belongs to the MAP kinase family.

[0086] This kinase plays a critical role in mitogen growth factor signal transduction. It phosphorylates and activates MAPK1/ERK2 and MAPK2/ERK3. The activation of this kinase is dependent phosphorylation by MAP kinase kinases. The MEK2 gene is conserved in human (SEQ ID NO: 56), chimpanzee (SEQ ID NO: 57), mouse (SEQ ID NO: 58), and many other animals.

[0087] The AKT gene is also known as v-akt murine thymoma viral oncogene homolog 1, AKT1, PKB, PRKBA, PKB α, and RAC α. There are three isoforms of Akt; Akt 1, 2 and 3 (also known as PKB-α, -β, and -γ). The protein encoded by this gene is called RAC-alpha serine/threonine-protein kinase.

[0088] AKT is involved in regulating many processes including metabolism, proliferation, cell survival, and growth. The regulation is mediated through serine and/or threonine phosphorylation of many downstream, substrates. Over 100 substrate candidates have been reported. The AKT gene is conserved in human (SEQ ID NO: 59), chimpanzee (SEQ ID NO: 60), mouse (SEQ ID NO: 61), and many other animals.

[0089] The placental Lactogen gene (PL1) is also known as PL, CSH1, CSA, CS-1, CSMT, hCS-1, and hCS-A. The protein encoded by this gene is a member of the somatotropin/prolactin family of hormones. The PL1 gene is expressed mainly in the placenta and is produced by the 1^{st} lineage differentiating from mouse TSC utilizes multiple transcription initiation sites.

[0090] PL1 plays an important role in growth control. The encoded protein is produced only during pregnancy and is involved in stimulating lactation, fetal growth, and metabolism. The human PL1 gene (SEQ ID NO: 62) has orthologs in chimpanzee (SEQ ID NO: 63), and many other animals.

[0091] The Plf gene is also known as, Prl2c2 (prolactin family 2, subfamily c, member 2), Plf1, MRP-1, and PLF-1. This gene encodes the anterior pituitary hormone prolactin which is also known as luteotropic hormone or luteotropin.

[0092] Prolactin (Prl), is a growth regulator for many tissues. It is essential for promoting lactation in the mammary glands. The Prl gene is conserved in human (SEQ ID NO: 64), chimpanzee (SEQ ID NO: 65), mouse (SEQ ID NO: 66), and many other animals.

[0093] The protein encoded by the Lrp2 gene is called low density lipoprotein-related protein 2. The Lrp2 protein is also known as. Lrp2 is a multi-ligand endocytic receptor glycoprotein with a large amino-terminal extracellular domain, a single transmembrane domain, and a short carboxy-terminal cytoplasmic tail that is found in the plasma membrane of many absorptive epithelial cells.

[0094] Lrp2 is expressed in many different tissues but primarily in absorptive epithelial tissues such as the kidney. The extracellular ligand-binding-domains of the protein bind diverse macromolecules including albumin, apolipoproteins B/E, and lipoprotein lipase. Lrp2 is important for the reuptake of numerous ligands, including lipoproteins, sterols, vitamin-binding proteins, and hormones. The Lrp2 gene is conserved in human (SEQ ID NO: 23), chimpanzee (SEQ ID NO: 24), mouse (SEQ ID NO: 25), and many and other animals.

[0095] The DAB2 gene was initially named DOC2 (Differentially expressed in Ovarian Cancer) and is distinct from the DOC2A and DOC2B genes. Dab2 is expressed in normal ovarian epithelial cells, but is decreased in ovarian carcinomas, suggesting a role as a tumor suppressor. The Dab2 gene is conserved in human (SEQ ID NO: 20), chimpanzee (SEQ ID NO: 21), mouse (SEQ ID NO: 22), and many other animals.

[0096] The Fgf5 gene is a member of the fibroblast growth factor (FGF) family that encodes the Fibroblast Growth Factor 5 protein.

[0097] FGF family members possess broad mitogenic and cell survival activities, and are involved in a variety of biological processes, including embryonic development, cell growth, cell proliferation, morphogenesis, cell differentiation, tissue repair, tumor growth, and invasion. This gene is as an oncogene, transforming transfected mammalian cells. The Fgf5 gene is conserved in human (SEQ ID NO: 32), chimpanzee (SEQ ID NO: 33), mouse (SEQ ID NO: 34), and many other animals.

[0098] The Pdgfra (platelet-derived growth factor receptor, alpha polypeptide) gene codes for the alpha-type platelet-derived growth factor receptor protein. In addition to Pdgfra, there is another isoform Pdgfrb. The two isoforms can form homo- or heterodimers. Pdgfra functions as a tyrosine-protein kinase that acts as a cell-surface receptor for Pdgfa, Pdgfb, and Pdgfc. The α-type platelet-derived growth factor receptor protein plays an important role in the regulation of embryonic development, cell proliferation, survival, and chemotaxis. The Pdgfra gene is conserved in human (SEQ ID NO: 14), chimpanzee (SEQ ID NO: 15), and many other animals. The homologous gene in mice (SEQ ID NO: 16) includes a protein tyrosine kinase conserved domain rather than the protein kinase domain found in the human gene.

[0099] The cubulin gene is also known as CUBN, IFCR, MGA1, and gp280. Cubulin is located within the epithelium of intestine and kidney. Cubulin acts as a receptor for intrinsic factor-vitamin B12 complexes. Cubulin plays a role in lipoprotein, vitamin and iron metabolism, by facilitating their uptake. This gene plays an important role in the development of the peri-implantation embryo through internalization of APOA1 and cholesterol. It also binds to LGALS3 at the maternal-fetal interface. The cubulin gene is conserved in human (SEQ ID NO: 67), mouse (SEQ ID NO: 68), and many other animals.

[0100] The Sox17 (SRY (sex determining region Y)-box 17) gene encodes a member of the SOX (SRY-related HMG-box) family of transcription factors. The encoded protein acts as a transcriptional regulator after forming a complex with other proteins. Sox17 binds target promoter DNA and bends the DNA by binding to the sequences 5′-AACAAT-′3 or 5′-AACAAAG-3′.

[0101] SOX17 is involved in the regulation of embryonic development and in the determination of cell fate. The SOX17 gene is conserved in human (SEQ ID NO: 17), chimpanzee (SEQ ID NO: 18), mouse (SEQ ID NO: 19), and many other animals.

[0102] The GATA6 (GATA binding protein 6 or transcription factor GATA-6) gene encodes a protein that is a member of a small family of zinc finger transcription factors. The GATA6 protein preferentially binds (A/T/C)GAT(A/T)(A) of the consensus binding sequence.

[0103] GATA6 is expressed during early embryogenesis and localizes to endo- and meso-dermally derived cells during later embryogenesis and plays an important role in the regulation of cellular differentiation and organogenesis during vertebrate development such as gut, lung, and heart development. The GATA6 gene is conserved in human (SEQ ID NO: 26), chimpanzee (SEQ ID NO: 27), mouse (SEQ ID NO: 28), and many other animals.

[0104] GATA4 is involved in embryogenesis and in myocardial differentiation and function and testicular development. It is a transcriptional activator that binds to the consensus sequence 5′-AGATAG-3′. The GATA4 gene is conserved in human (SEQ ID NO: 73), mouse (SEQ ID NO: 74), and many other animals.

[0105] The T gene encodes the Brachyury protein which is an embryonic nuclear transcription factor that binds to a specific DNA element, the palindromic T-site. Brachyury binds through a region in its N-terminus called the T-box. Two transcript variants encoding different isoforms have been found for this gene. The gene brachyury appears to have a conserved role in defining the midline of a bilateral organism, and thus the establishment of the anterior-posterior axis; this function is apparent in chordates and mollusks. Brachyury effects transcription of genes required for mesoderm formation and differentiation and is localized to notochord-derived cells. The T gene is conserved in human (SEQ ID NO: 29), chimpanzee (SEQ ID NO: 30), mouse (SEQ ID NO: 31), and many other animals.

[0106] The AMPK genes are also known as PRKAA1/2 and AMPKa1/2. The protein encoded by this gene belongs to the ser/thr protein kinase family. The functional enzyme is composed of α-(catalytic) and β/γ-(regulatory) subunits. The AMPK genes encode proteins called 5′-prime-AMP-activated protein kinase which is the catalytic subunit. The 5′-AMP-activated protein kinase catalytic subunit α1 has a magnesium cofactor and is 559 amino acids long with a molecular weight of 64,009 Da. Alternatively spliced transcript variants encoding distinct isoforms have been observed.

[0107] AMPK is a cellular energy sensor. AMPK regulates key metabolic enzymes through phosphorylation. This kinase activity is activated by stimuli that increase the AMP/ATP ratio. The AMPK gene is conserved in human (SEQ ID NO: 35), chimpanzee (SEQ ID NO: 36), mouse (SEQ ID NO: 37), and many other animals.

[0108] PAX8 encodes a member of the paired box (PAX) family of transcription factors involved in functional differentiation and maintenance of thyroid-related cells. The PAX8 gene is conserved in human (SEQ ID NO: 75), chimpanzee (SEQ ID NO: 77), mouse (SEQ ID NO: 76), and many other animals.

[0109] The NEFL gene encodes neurofilaments in the axoskeleton. They maintain neuronal caliber and also play a role in intracellular transport to axons and dendrites. The NEFL gene is conserved in human (SEQ ID NO: 78), chimpanzee (SEQ ID NO: 80), mouse (SEQ ID NO: 79), and many other animals.

[0110] The TSHR gene encodes membrane proteins that serve as receptors for thyrothropin and thyrostimulin. These proteins are involved in thyroid cell metabolism. Different transcript variants have been identified. The TSHR gene is conserved in human (SEQ ID NO: 81), chimpanzee (SEQ ID NO: 83), mouse (SEQ ID NO: 82), and many other animals.

[0111] The laminin gene encodes proteins that mediate attachment, migration and organization of cells into embryonic tissues. The proteins function by interacting with the extracellular matrix. The laminin gene is conserved in human (SEQ ID NO: 84),), chimpanzee (SEQ ID NO: 86), mouse (SEQ ID NO: 85) and many other animals.

[0112] The AFP gene encodes alpha-fetoprotein, a plasma and intracellular protein produced by the yolk sac and liver during fetal development. AFP, the fetal counterpart of serum albumin and binds copper, nickel, fatty acids and bilirubin. The AFP gene is conserved in human (SEQ ID NO: 87), chimpanzee (SEQ ID NO: 89), mouse (SEQ ID NO: 88), and many other animals.

[0113] The NES gene encodes a member of the intermediate filament protein family and is expressed primarily in nerve cells. It is required for survival, renewal and mitogen-stimulated proliferation of neural progenitor cells. The NES gene is conserved in human (SEQ ID NO: 90), chimpanzee (SEQ ID NO: 92), mouse (SEQ ID NO: 91), and many other animals.

[0114] The Goosecoid (GSC) gene: encodes a member of the bicoid subfamily of the paired (PRD) homeobox family of proteins. The encoded protein acts as a transcription factor and plays a role in spatial programming within discrete lineage compartments during organogenesis. The GSC gene is conserved in human (SEQ ID NO: 93), chimpanzee (SEQ ID NO: 95), mouse (SEQ ID NO: 94), and many other animals.

[0115] Oct4 and Rex1 are markers of the 1^{st} ESC progenitors that arise in the embryo within 3.5 days (E3.5) after fertilization. Upon differentiation to any lineage, Rex1 is decreased (e.g., lost) and Oct4 is decreased after commitment to the 1^{st} differentiated lineage of extraembryonic ectoderm (ExEndo). Thus, the presence of Oct4 and Rex1 indicates stem cell potency. In contrast, Pdgfra is a growth factor receptor and Dab2 a lipid nutrient-acquiring protein that are both activated immediately upon 1^{st} differentiation of ESC to ExEndo. However, Pdgfra is expressed in all ExEndo lineages and Dab2 only in 1^{st} lineage and its maturing descendants. Thus, the presence of Pdgfra and Dab2 indicate loss of stem cell potency under conditions wherein potency would normally be maintained (e.g., that a stress has occurred).

[0116] Three embryonic genes decrease and then rapidly increase when ESCs are stressed. These 3 genes are Sox2, Oct4 and Nanog. There is a 4^{th} gene, Rex1, whose expression after stress decreases but does not increase thereafter as Sox2, Oct4 and Nanog do. Once expression for Rex1 decreases, this decrease indicates that stress has occurred. In CE, the stress leads to reduced stem cell potency and development potential. Within these embodiments, stress can be detected by time course evaluation of Sox2, Oct4 and Nanog expression and/or time course or single time point evaluation of Rex1.

[0117] In CE, the terminal differentiation of stem cells leads to production of gene products of parenchymal differentiation that distinguishes the 1^{st} lineage available to ESCs and TSCs, and from lineages that normally arise later from these two stem cell types. Thus the careful measure of the ratio of 1^{st}/later lineage intracellular and secreted products predicts stressed stem cells and pregnancies. Specifically for stressed TSCs, compensatory and prioritized differentiation predicts that earliest pregnancy tests will have higher or similar 1^{st} lineage hormone (e.g., PL1), and decreased later lineage hormones from maternal blood at the earliest times.

[0118] The occurrence of a stress can be detected by measuring the expression or activity of potency and/or differentiation factors that cause the up- or down-regulation of a marker. The expression or activity of these factors can identify the occurrence of stress-induced compensatory and prioritized differentiation. For example, increased expression of PL1 or Plf is associated with an up-regulation of SAPK's expression or activity. As a further example, the continued down-regulation of Rex1 following stress is mediated by an up-regulation of JNK's expression or activity. Further relationships between the factors and markers are described in detail in accompanying Examples 1, 2 and 3.

[0119] As is understood by one of ordinary skill in the art, “up-regulation” and “down-regulation” of gene or protein expression, and protein activity can be measured against a relevant control condition including relative to the expression or activity of an unstressed stem cell or relative to differentiation mediated by removal of growth factors that maintain stemness in culture (e.g., normal differentiation control). In CE, up-regulation or down-regulation will be a statistically-significant difference (e.g., p<0.05) from a relevant control condition.

[0120] In CE, stem cells are assessed by measuring gene expression. In such embodiments, the stem cell parameter is a gene expression level or profile. Determining the expression of one or more genes, e.g., obtaining an expression profile) may be made by measuring nucleic acid transcripts, e.g. mRNAs, of genes of interest, e.g. a nucleic acid expression profile; or by measuring levels of one or more different proteins/polypeptides that are expression products of one or more genes of interest, (e.g. a proteomic expression profile). Thus, the terms “expression profile” and “expression evaluation” can be used broadly to include a gene expression profile at the nucleic acid level or a gene expression profile at the protein level.

[0121] In CE, expression of genes may be evaluated by obtaining a nucleic acid expression profile, where the amount or level of one or more nucleic acids in a sample is determined. The nucleic acid sample includes a plurality or population of distinct nucleic acids that includes the expression information of the genes of interest of the stem cell being assessed. The nucleic acid may include RNA or DNA nucleic acids, e.g., mRNA, cRNA, cDNA etc., so long as the sample retains the expression information of the stem cell from which it is obtained. The sample may be prepared in a number of different ways, e.g., by mRNA isolation from a cell, where the isolated mRNA is used as is, amplified, employed to prepare cDNA, cRNA, etc., as performed in the differential expression art. The sample may be prepared from a single cell, e.g. a stem cell or a population of stem cells of interest.

[0122] The expression profile may be generated from the initial nucleic acid sample using many appropriate protocols. One representative protocol is array-based gene expression profile generation protocols. Such protocols can be hybridization assays in which a nucleic acid that displays “probe” characteristics for each of the genes to be assayed/profiled in the profile to be generated is employed.

[0123] Specific hybridization technologies which may be used to generate expression profiles are described in, e.g., U.S. Pat. Nos. 5,143,854; 5,288,644; 5,324,633; 5,432,049; 5,470,710; 5,492,806; 5,503,980; 5,510,270; 5,525,464; 5,547,839; 5,580,732; 5,661,028; and 5,800,992; as well as WO 95/21265; WO 96/31622; WO 97/10365; WO 97/27317; EP 373 203; and EP 785 280. In these S/M, an array of “probe” nucleic acids that includes a probe for each of the phenotype determinative genes whose expression is being assayed is contacted with target nucleic acids. Contact is carried out under hybridization conditions, e.g., stringent hybridization conditions, and unbound nucleic acid is then removed.

[0124] In CE, stringent hybridization conditions include e.g., 2 hr to 4 days incubation at 42° C. using a DIG-labeled DNA probe (prepared by, e.g., using a DIG labeling system; Roche Diagnostics GmbH, 68298 Mannheim, Germany) in a solution such as DigEasyHyb solution (Roche Diagnostics GmbH) or a solution including 50% formamide, 5×SSC (150 mM NaCl, 15 mM trisodium citrate), 0.02% sodium dodecyl sulfate, 0.1% N-lauroylsarcosine, and 2% blocking reagent (Roche Diagnostics GmbH), followed by washing the filters twice for 5 to 15 minutes in 2×SSC and 0.1% SDS at room temperature and then washing twice for 15-30 minutes in 0.5×SSC and 0.1% SDS or 0.1×SSC and 0.1% SDS at 65-68° C.

[0125] Probes can also be designed to have a % sequence identity that is complementary to wild-type gene sequences that lead to conditions that are compatible to produce binding pairs of nucleic acids, e.g., surface bound and solution phase nucleic acids, of sufficient complementarity to provide for the desired level of specificity in the assay while being less compatible to the formation of binding pairs between binding members of insufficient complementarity to provide for the desired specificity. In CE, the probes will have 90% to 100% sequence identity in 1% stepwise increments (e.g., 90%, 91%, 92% up to 100%) that identity a sequence that is complementary to the wild-type sequence being assessed.

[0126] “% sequence identity” refers to a relationship between two or more sequences, as determined by comparing the sequences. In the art, “identity” also means the degree of sequence relatedness between sequences as determined by the match between strings of such sequences. “Identity” (often referred to as “similarity”) can be readily calculated by appropriate methods, including those described in: Computational Molecular Biology (Lesk, ed.) Oxford University Press, NY 1988; Biocomputing: Informatics and Genome Projects (Smith, ed.) Academic Press, NY 1994; Computer Analysis of Sequence Data, Part I (Griffin and Griffin, eds.) Humana Press, NJ 1994; Sequence Analysis in Molecular Biology (Von Heijne, ed. Academic Press 1987); and Sequence Analysis Primer (Gribskov & Devereux, eds. Oxford University Press, NY 1992. Preferred methods to determine sequence identity are designed to give the best binding between the sequences tested. Methods to determine sequence identity and similarity are codified in publicly available computer programs. Sequence alignments and percent identity calculations may be performed using the Megalign program of the LASERGENE bioinformatics computing suite (DNASTAR, Inc., Madison, Wisconsin). Multiple alignment of the sequences can also be performed using the Clustal method of alignment (Higgins and Sharp CABIOS, 5, 151-153 (1989) with default parameters (GAP PENALTY=10, GAP LENGTH PENALTY=10). Relevant programs also include the GCG suite of programs (Wisconsin Package Version 9.0, Genetics Computer Group (GCG), Madison, Wisconsin); BLASTP, BLASTN, BLASTX (Altschul, J. Mol. Biol., 215:403 199); DNASTAR (DNASTAR, Inc., Madison, Wisconsin); and the FASTA program incorporating the Smith-Waterman algorithm (Pearson, Comput. Methods Genome Res., [Proc. Int. Symp.] 1994, Meeting Date 1992, 111. Editor(s): Suhai, Sandor. Publisher: Plenum, New York, N.Y. Within the context of this disclosure it will be understood that where sequence analysis software is used for analysis, the results of the analysis are based on the “default values” of the program referenced. As used herein “default values” will mean any set of values or parameters which originally load with the software when 1^{st} initialized.

[0127] Resultant patterns of hybridized nucleic acid provides information regarding expression for each of the genes that have been probed, where the expression information is whether or not the gene is expressed and, typically, at what level, where the expression data or expression profile (e.g., in the form of a transcriptome), may be both qualitative and quantitative.

[0128] Alternatively, non-array based S/M for quantitating the level of one or more nucleic acids in a sample may be employed, including those based on amplification protocols, e.g., Polymerase Chain Reaction (PCR)-based assays, including quantitative PCR, reverse-transcription PCR (RT-PCR), real-time PCR, etc.

[0129] In CE, expression of genes may be evaluated by obtaining a proteomic expression profile, where the amount or level of one or more proteins/polypeptides in the sample is determined. Where the expression profile is proteomic expression profile, i.e. a profile of one or more protein levels in a sample, any convenient protocol for evaluating protein levels may be employed wherein the level of one or more proteins in the assayed sample is determined. While a variety of different manners of assaying for protein levels can be used, one representative protocol is enzyme-linked immunosorbent assays (ELISA). Alternatively, non-ELISA based-S/M for measuring proteins levels in a sample, such as mass spectrometry, proteomic arrays, xMAP™ microsphere technology, flow cytometry, western blotting, and immunohistochemistry can be used.

[0130] The disclosure includes modified stem cells with reporter transgene systems that are used to identify compounds or other potential environmental stem cell stressors that cause forced, compensatory or prioritized differentiation and reduced development potential.

[0131] In CE, reporter genes include a nucleic acid sequence encoding a reporter. The reporter transgene is inserted via homologous recombination into the stem cell genome so that the reporter gene is in operable combination with the promoter of a factor or marker (e.g., potency or differentiation) of interest. “In operable combination” refers to the linkage of nucleic acid sequences in a manner such that one or more proteins can be produced. A promoter is a regulatory element that facilitates the initiation of transcription of a coding region of a nucleic acid sequence in operable combination (used interchangeably with operably linked) with it. A promoter is typically, though not necessarily, located 5′ (i.e., upstream) of a nucleotide sequence of interest whose transcription into mRNA it controls, and provides a site for specific binding by RNA polymerase and other transcription factors for initiation of transcription. With this approach, when a factor or marker gene can be expressed, it is expressed as a reporter.

[0132] A “gene” refers to a nucleotide sequence that encodes a protein (e.g., a reporter protein or other proteins described herein). This definition includes various sequence polymorphisms, mutations, and/or sequence variants. In particular embodiments, the sequence polymorphisms, mutations, and/or sequence variants do not affect the function of the encoded protein. The term “gene”, depending on the context, refer only to coding sequences or to coding sequences in combination with regulatory regions such as promoters, enhancers, and termination regions. The term further can include all introns and other DNA sequences spliced from the mRNA transcript, along with variants resulting from alternative splice sites. Nucleic acid sequences encoding proteins can be DNA or RNA that directs the expression of the protein or RNA. These nucleic acid sequences may be a DNA sequence that is transcribed into RNA or an RNA sequence that is translated into protein. The nucleic acid sequences include both the full-length nucleic acid sequences as well as non-full-length sequences derived from the full-length protein or RNA. The sequences can also include degenerate codons of the native sequence or sequences that may be introduced to provide codon preference. In addition to particular sequences provided, gene sequences to encode reporter proteins and other proteins are available in publicly available databases and publications.

[0133] In CE, a gene of interest encodes any of the potency factors, potency markers, compensatory or prioritized differentiation factors or markers disclosed herein. In CE, a reporter gene encodes any reporter disclosed herein.

[0134] The disclosure is not limited to the use of any particular reporter gene. Indeed, the use of a variety of reporters can be used. In CE, the disclosure provides S/M for transfecting stem cells with reporter genes encoding fluorescent proteins, wherein the expression of the fluorescent proteins provides an expression assay in stem cells without having to sacrifice the cells. Fluorescent reporters are known and can be obtained commercially at, e.g., Promega Corporation, Invitrogen, Clontech, Stratagene, BD Biosciences Pharmingen, or Evrogen JSC. Additional examples of fluorescent proteins can be found at, e.g., U.S. Pat. Nos. 6,884,620 and 6,645,761. The disclosure is not limited by the fluorescent protein-encoding gene, and any fluorescent encoding gene can be used.

[0135] In CE, the gene encoding the fluorescent protein can be optimized for mammalian expression by codon optimization for mammalian translational machinery. In CE, the disclosure provides S/M for transfecting stem cells with reporter genes encoding enzymatic proteins, wherein the expression of the enzymatic proteins provides a viable expression assay without sacrificing the stem cells. For example, the expression of reporter enzymatic proteins provide light output upon substrate utilization. Examples of such enzymatic proteins that produce light as a byproduct of substrate utilization include, luciferase and β-lactamase. Luciferase encoding reporter genes (e.g. Photinus sp. (GenBank Accession No. AY738222), Renilla sp. (GenBank Accession No. AF025844), Pyrophorus sp. (GenBank Accession No. AY258591 and AY258593), etc.) are commercially available from Promega Corporation, Stratagene and Clontech, e.g., and β-lactamase encoding reporter genes are available from Invitrogen, for example.

[0136] In CE, modified stem cells may be transfected with a vector including a wild-type promoter or a synthetic promoter made up of repeated response elements to a given single transcription factor (as done with Rex1 and Oct4 in Li (2015). Submitted to Stem Cells and Development. Rapid development and validation of a Rex1 promoter-RFP (red fluorescent reporter) viable potency activity reporter quantifies stress-induced ESC potency loss and supports the theory of compensatory differentiation. In these embodiments, the vector will integrate into the stem cell genome and on-going cellular events will interact with the inserted promoter. When conditions occur that would cause transcription of the genes associated with the wild-type promoter, expression of the inserted reporter will also occur.

[0137] The ability of certain viruses to infect stem cells or enter stem cells via receptor-mediated endocytosis, and to integrate into the stem cell genome and express genes stably and efficiently have made them attractive candidates for the transfer of foreign nucleic acids into stem cells. Non-limiting examples of viral vectors that can be used include adenoviral vectors and retroviral vectors. Adenoviral vectors include those constructs containing adenovirus sequences sufficient to (a) support packaging of a construct and (b) express a cell-specific construct that has been cloned therein. Retroviral vectors integrate their genes into stem cell genomes and are capable of transferring a large amount of foreign genetic material, infecting a broad spectrum of species and cell types (Miller, Am. J. Clin. Oncol., 15(3):216, 1992). Lentiviruses are complex retroviruses, which, in addition to the common retroviral genes gag, pol, and env, contain other genes with regulatory or structural function. See, e.g., Naldini, Science, 272(5259):263, 1996; Zufferey, Nat. Biotechnol., 15(9):871, 1997; U.S. Pat. Nos. 6,013,516 and 5,994,136). Some examples of lentivirus include the Human Immunodeficiency Viruses: HIV-1ad nHIV-. Lentiviral vectors have been generated by multiply attenuating the HIV virulence genes, e.g., the genes env, vif, vpr, vpu and nef are deleted making the vector biologically safe. Recombinant lentiviral vectors are capable of infecting stem cells and can be used for ex vivo gene transfer and expression of nucleic acid sequences. For example, recombinant lentivirus capable of infecting cells wherein a suitable host cell is transfected with ≥2 vectors carrying the packaging functions, namely gag, pol and env, as well as rev and tat is described in U.S. Pat. No. 5,994,136.

[0138] Promoters used in embodiments described herein may be “endogenous” (e.g., wild-type), “exogenous” or “heterologous.” An “endogenous” promoter is one that is naturally operably linked with a given gene in the genome. An “exogenous” promoter is one that is not native to the wild-type genome. A “heterologous” promoter is a type of exogenous promoter that shares at least 90% sequence identity with an endogenous promoter.

[0139] In CE, reporter gene constructs include a selectable marker. The disclosure is not limited to the use of any particular selectable marker. An exemplary selectable marker includes dominant selectable markers such as the bacterial aminoglycoside 3′ phosphotransferase gene (also referred to as the neo gene) that confers resistance to the drug G418 in mammalian cells. Other selectable markers are used in stem cell lines that lack the relevant enzyme activity. Examples of non-dominant selectable markers include the thymidine kinase (tk) gene that is used in conjunction with tk-deficient cell lines and the mammalian hypoxanthine-guanine phosphoribosyl transferase (hprt) gene, which is used in conjunction with hprt-deficient cell lines. A review of the use of selectable markers in mammalian cell lines is provided in Sambrook, J. Molecular Cloning: A Laboratory Manual, 2nd ed., Cold Spring Harbor Laboratory Press, New York (1989) pp. 16.9-16.15.

[0140] Gene constructs including vectors and reporter genes described herein can be inserted or “knocked-in” at a desired locus in a stem cell. Methods for generating gene constructs for use in generating knock-in cell lines and techniques for generating such cell lines are described in, e.g., Sambrook 1989, Molecular Cloning, A Laboratory Manual, 3^{rd} ed., Cold Spring Harbor Laboratory; Yoo, Neuron, 37:383, 2003; and Lin, Human Molecular Genetics, 10:137, 2001. Exemplary knock-in methods include ex vivo transfection (see, e.g., Wilson, Science, 244:1344, 1989; and Nabel & Baltimore, Nature, 326:711, 1987), optionally with Fugene6 (Roche) or Lipofectamine (Invitrogen); injection (see, e.g., U.S. Pat. Nos. 5,994,624; 5,981,274; 5,945,100; 5,780,448; 5,736,524; 5,702,932; 5,656,610; 5,589,466; and 5,580,859); microinjection (see, e.g., Harland and Weintraub, J. Cell. Biol., 101:1094, 1985; U.S. Pat. No. 5,789,215); electroporation (e.g., U.S. Pat. No. 5,384,253; Tur-Kaspa, Mol. Cell. Biol., 6:716, 1986; Potter, Proc. Nat'l. Acad. Sci. USA, 81:716, 1984); calcium phosphate precipitation (Graham & Van Der Eb, Virology, 52:456, 1973; Rippe, Mol. Cell. Biol., 10:689, 1990); DEAE-dextran followed by polyethylene glycol (Gopal, Mol. Cell. Biol., 5:1188, 1985); direct sonic loading (Fechheimer, Proc. Nat'l Acad. Sci. USA, 84:8463, 1987); liposome mediated transfection (Nicolau & Sene, Biochim. Biophys. Acta, 721:185, 1982; Fraley, Proc. Nat'l. Acad. Sci. USA, 76:3348, 1979; Nicolau Methods Enzymol., 149:157, 1987; Kaneda, Science, 243:375, 1989) and receptor-mediated transfection (Wu & Wu, Biochemistry, 27:887, 1988; Wu & Wu, J. Biol. Chem., 262:4429, 1987) and any combination of such methods.

[0141] In CE, brake pedal/potency and accelerator pedal/differentiation constructs and modified viable reporter ESCs can be described as follows: multimerized Oct4 promoters and multimerized Rex1 promoters that drive green fluorescent protein (GFP) and red fluorescent protein (RFP) respectively can be expressed in living ESCs. Following exposure to stress, the Rex1 potency loss should be greater and more permanent than Oct4 loss. These results can be determined by immunoblots for biochemical measures and FACS and microplate reader for visual assays. Microplate readers also provide for HTS for various stresses.

[0142] Modified ESCs with a GFP knocked into one of the endogenous Pdgfra loci differentiation reporters have been tested. In these embodiments, GFP expression is driven by the endogenous promoter as it is activated by normal or stressed mechanisms. The specificity of Pdgfra-GFP induction can be validated using other co-markers of 1^{st} lineage induced during stressed differentiation and later lineages that are induced during growth factor removal but suppressed during stressed differentiation. Thus DAB2, LRP2, and GATA6 are appropriate co-markers of 1^{st} lineage ExEndo, FGF5, and SPARC are appropriate markers of other later lineages suppressed by stress-induced differentiation but activated during normal differentiation by removing potency-maintaining growth factors.

[0143] CE of ESC reporter cell lines include: (1) Potency measuring viable reporters (decreased with stress): (a) Oct4 multimerized promoter-GFP (“Oct4-GFP”); (b) Rex1 multimerized promoter-RFP (“Rexl-FRP”); (c) Oct4-GFP/Rex1-RFP co-expressing ESCs (“Oct4-GFP/Rex1-RFP”); (2) Differentiated 1^{st} lineage measuring viable reports (increased with stress): (a) Pdgfra promoter-GFP knockin (“Pdgfra-GFP”); (b) Sox17 Endo promoter-GFP knockin (“Sox17-GFP”); (c) DAB2, LRP2 Endo promoter-GFP; (d) GATA6 Endo promoter-GFP; (3) Later lineage measuring promoters (decreased with stress): (a) Brachyury Endo promoter-GFP knockin (“Brachy-GFP”); (b) FGF5 promoter-GFP knockin (“FGF5-GFP”); (4) Stress enzymes that regulate potency loss (AMPK) and 1^{st} lineage gain (SAPK/JNK): (a) Constitutive promoter AMPKAR (AMPK viable activity reporter); and (b) Constitutive promoter JNKAR (SAPK/JNK viable activity reporter).

[0144] In CE, modified viable reporters such as PL1 promoter-RFP can be used to measure transcription factors marking the differentiation to 1^{st} lineage available to TSCs.

[0145] CE utilizing Rex1-RFP for brake pedal, potency-loss testing and Pdgfra-GFP for accelerator pedal, 1^{st} lineage differentiation-increase testing represent preferred viable ESC-HTS reporters. Because sub-morbid, runting doses that cause differentiation are used, it is important, and technically feasible to add a nuclear stain to the color plate reader excitation and band pass acquisition and assay the level of diminished stem cell population expansion. At any stress dose, taken together or individually (i) decreased potency, (ii) increased 1^{st} lineage, and (iii) diminished cell population expansion should give an accurate analysis of stress impacts on embryonic and fetal development in response to toxicological stress and is completely unique amongst stem cell assays for toxicology.

[0146] In generating an expression profile, in CE a sample is assayed to generate an expression profile that includes expression data for at least 1 gene/protein, sometimes a plurality of genes/proteins, where by plurality is meant at least 2 different genes/proteins, and often at least 3, at least 4, at least 5, or at least 10 different genes/proteins, etc. The Luminex Xmap system (Luminex Corp, Austin, TX) allows for, e.g., 500 simultaneous fluorescent frequency multiplexing.

[0147] In the broadest sense, the expression evaluation may be qualitative or quantitative. As such, where detection is qualitative, the S/M provide an assessment, of whether or not the target analyte is present in the sample being assayed. In other embodiments, the S/M provide a quantitative detection of whether the target analyte is present in the sample, e.g., an assessment of the actual amount or relative abundance of the target analyte.

[0148] S/M can include comparisons to reference levels. Reference levels can be obtained from a dataset. A reference level from a dataset can be derived from previous measures derived from a population. A “population” is any grouping of stem cells of like specified characteristics. The grouping could be according to, e.g., previous exposure to a stress condition or lack thereof.

[0149] A “dataset” as used herein is a set of numerical values resulting from evaluation of a sample (or population of samples) under a desired condition. The values of the dataset can be obtained, e.g., by experimentally obtaining measures from a sample and constructing a dataset from these measurements. As is understood by one of ordinary skill in the art, the reference level can be based on e.g., any mathematical or statistical formula useful in the art for arriving at a meaningful aggregate reference level from a collection of individual datapoints; e.g., mean, median, median of the mean, etc. Alternatively, a reference level or dataset to create a reference level can be obtained from a service provider such as a laboratory, or from a database or a server on which the dataset has been stored.

[0150] In CE, conclusions are drawn based on whether a measure is statistically significantly different or not statistically significantly different from a reference level. A measure is not statistically significantly different if the difference is within a level that would be expected to occur based on chance alone. In contrast, a statistically significant difference or increase is one that is greater than what would be expected to occur by chance alone. Statistical significance or lack thereof can be determined by any of various S/M used in the art. An example of a commonly used measure of statistical significance is the p-value. The p-value represents the probability of obtaining a given result equivalent to a particular datapoint, where the datapoint is the result of random chance alone. A result is often considered significant (not random chance) at a p-value less than or equal to 0.05.

[0151] Embodiments can be used with high throughput screening (HTS). In HTS, numerous different compounds can be tested for potential stress effects quickly. For example, stem cells (e.g., modified stem cells) can be provided to wells of a microtiter plate, including, e.g., a 96- or 384-well plate that can be read in a fluorescent microplate reader. The stem cell lines in the wells can then be exposed to different compounds and/or different concentrations of compounds. In additional embodiments, stem cells can be contacted with a single test agent, or, to facilitate HTS, to at least 2, at least 5, at least 10, at least 100, at least 1,000, at least 10,000, at least 100,000 or at least at least 1,000,000 test compounds at a time. Environmental conditions can similarly be screened, and test compounds and environmental conditions can be screened in various combinations. If the stem cells score positive for stress, a different set of stem cells can be subsequently tested with a subset of the test compounds or environmental conditions until the compounds or conditions creating the stress effect are identified.

[0152] High-throughput screening systems are commercially available from, e.g., Zymark Corp., Hopkinton, Mass.; Air Technical Industries, Mentor, Ohio; Beckman Instruments, Inc. Fullerton, Calif.; Precision Systems, Inc., Natick, Mass., Luminex Corp., etc. . . . These systems typically automate entire procedures including all sample and reagent pipetting, liquid dispensing, timed incubations, and final readings of the microplate in detector(s) appropriate for the assay. These configurable systems provide high throughput and rapid start up as well as a high degree of flexibility and customization. The manufacturers of such systems provide detailed protocols for the various S/M of high throughput.

[0153] Kits to practice the S/M are also provided. Kits can include one or more containers including modified stem cells, primer pairs, probe sequences, binding proteins (e.g., antibodies) and/or reagents or supplies to assess expression of a gene of interest described herein. Components of the kit can be prepared for storage and later use. Associated with such container(s) can be a notice in the form prescribed by a governmental agency regulating the manufacture, use, or sale of the kit, which notice reflects approval by the agency of manufacture, use, or sale, when required.

[0154] Optionally, the kits further include instructions for using the kit in the methods. In various embodiments, the instructions can include appropriate reference levels to interpret results associated with using the kit; proper disposal of the related waste; and the like. The instructions can be in the form of printed instructions provided within the kit or the instructions can be printed on a portion of the kit itself. Instructions may be in the form of a sheet, pamphlet, brochure, CD-ROM, or computer-readable device, or can provide directions to instructions at a remote location, such as a website.

[0155] The Examples below describe the optimization of the methods. These Examples are included to demonstrate CE of the disclosure. Those of ordinary skill in the art should recognize in light of the present disclosure that many changes can be made to the specific embodiments disclosed herein and still obtain a like or similar result without departing from the spirit and scope of the disclosure.

### EXAMPLES

### Example 1

[0156] As an embryo implants into the uterus, stress can diminish placental TSCs proliferation inducing differentiation to create more essential differentiated product/cells. Xie, 2014, Xie, Int. Rev. Cell. Mol. Biol., 287:43, 2011 (Xie, 2011); Awonuga Mol. Reprod. Dev., 78:519, 2011 (Awonuga, 2011); Zhong, Reproduction, 140:921, 2010 (Zhong, 2010). This “compensatory” differentiation thus further depletes the size of the population of multipotent TSC. Most human embryos are lost before birth and the greatest loss occurs soon after implantation. Cross, Science, 266:1508, 1994. Understanding the cellular and molecular mechanisms of TSC stress responses informs strategies to ameliorate their consequences during implantation.

[0157] Implantation site O₂ is normally 2%, when O₂ levels are optimized, highest growth and least stress (activation of stress-activated protein kinase/SAPK) is at 2% O₂. Zhou, 2011. Also, dose responses of SAPK activation in response to TNFalpha, dioxin suggest that these stressors could activate compensatory and prioritized differentiation in TSC (Xie, 2008, Zhong, Reprod. Sci., 14:534, 2007 (Zhong, 2007)). Cigarette smoke condensate and IFNgamma also may activate compensatory differentiation through Rex1 loss in mouse ESCs.

[0158] Although stress at 20% is greater than at 2% O₂, only O₂<2% activates high levels of SAPK that are comparable to other stresses at 20% O₂, describing a U-shaped curve for stress that is proportional to levels of SAPK and inversely proportional to growth. Hypoxic stress for stem cells at 0.5% O₂ combined with FGF4 is maximal for priming TSC for differentiation by producing the lowest levels of three potency factors (Inhibitor of differentiation (Id)2 Caudal related homeobox Cdx(2), Estrogen receptor related, (Err)beta) and highest levels of three nuclear factors (heart and neural differentiation Hand(1), glial cells missing Gcm(1), and trophoblast specific binding protein Tpbp(a) that mediate TSC differentiation.

[0159] Fibroblast growth factor (FGF)4 is synthesized in the implanting embryo (Xie 2011) and is necessary for maintaining TSC proliferation and potency in culture (Tanaka, 1998) and in the embryo (Chai, 1998). To better emulate preimplantation stress effects, TSC culture was performed in this Example for 24 hr in the presence of FGF4. Furthermore, to study the longer period of post implantation development, culture was extended to 7 days with FGF4 removed to stimulate normal differentiation.

[0160] During normal post implantation placental development, the 1^{st} lineage differentiating from TSC is parietal trophoblast giant cells (pTGC) at E4.5 (4.5 days after fertilization), followed by spongiotrophoblasts at E7.0 and labyrinthine, chorionic syncytiotrophoblasts (synT) and sinusoidal TGC (sTGC) at E7.5. Simmons, BMC Genomics, 9:352, 2008; Simmons, Dev. Biol., 304:567, 2007. SAPK is needed to mediate stress-induced suppression of placental cell cycle and TSC differentiation to the earliest lineage, pTGC, in placental cells. Xie, Mol. Hum Reprod., 13:473, 2007 (Xie, 2007); Awonuga, 2011. Without being bound by theory, it is believed that stress “prioritizes” differentiation as hyperosmolar stress induces TSCs to differentiate into the earliest post implantation lineage/marker (e.g., pTGC/Hand1) but not later lineages/markers (e.g., synTA/Gcm1; Xie, 2011, supra). Because SAPK mediates hyperosmolar stress-induced Hand1 and Hand1-dependent PL1 (Awonuga, 2011), whether stress-induced lineage choice during hypoxia was SAPK-dependent was tested. Because hyperosmolar stress induces the 1^{st} lineage but not later lineages from TSC (Liu, Placenta, 30:66, 2009), and SAPK mediates the induction of 1^{st} lineage markers (Awonuga, 2011), it was hypothesized that SAPK will mediate induction of the 1^{st} lineage/marker (pTGC/Hand1) and suppression of later lineage/marker (synTA/Gcm1) induced by hypoxic stress.

[0161] Here the effects on potency and lineage differentiation in cultured TSC of FGF4 removal during TSC culture with O₂ levels at 20, 2, 0.5, and 0% was tested. It was found that FGF4 maintains Warburg metabolism (suppression of mitochondrial electron transport chain and activation of aerobic glycolysis) at all O₂ levels, but during hypoxic stress at 0.5% O₂ differentiation was induced by O₂ levels that were insufficient to support increased mitochondrial activity or suppress aerobic glycolysis. This led to a rapid but incomplete differentiation and lineage imbalance as two lineages at the maternal interface of the later-developing chorionic placenta are largely suppressed at all O₂ levels<20%. Failure of these lineages is associated with spontaneous miscarriage, preeclampsia, intrauterine growth retardation, and preterm labor.

[0162] Materials and Methods. Materials. Reagents for maintaining TSC, delivering (O₂)s and for SAPK and actin antibodies and SAPK inhibitors were described previously (Awonuga, 2011; Zhou, 2011). The primary antibodies for pyruvate kinase embryonic form (PKM)2 (CS3198), PKM2 Tyr105 (CS3827) were from Cell signaling (Danvers MA), and pyruvate kinase adult form (PKM)1 antibody (AP7476b) was purchased from Abgent (San Diego, CA). Cyto-oxygenase (COX) subunit I antibody (MS404) was purchased from MitoSciences (Eugene, OR). The mitochondrial membrane potential (ΔΨₘ) stains tetramethylrhodamine methyl ester (TMRM), MitoTracker red, and 5,5′,6,6′-tetrachloro-1,1′,3,3′-Tetra-ethylbenzimidazolylcarbo-cyanine iodide (JC1) were purchased from Molecular Probes (Grand Island, NY). Mitochondrial inhibitors antimycin A and cyanide, the mitochondrial activator dichloroacetate (DCA), and the OxPhos uncoupler Carbonyl cyanide 4-(trifluoromethoxy)phenylhydrazone (FCCP) were purchased from Sigma (St. Louis, MO). FGF4 and heparin were from Sigma Chemical Co. (St. Louis, MO). Fetal bovine serum and RPMI1640 were from Gibco (Grand Island, NY). SAPK inhibitor SP600125 and LJNKI1 SAPK inhibitor were purchased from Calbiochem-EMD (Emanuel Merck, Darmstadt) (San Diego, CA). Anaerobic bags to create 0% O₂ were purchased from Hardy Diagnostics (AN010C, Santa Maria, Ca).

[0163] Cell lines and culture conditions. The mouse TSC sources and culture conditions were described previously. Awonuga, 2011; Zhou, 2011. Briefly, mouse TSC isolated from E3.5 and E6.5 conceptuses were from Dr. Rossant (Lunenfeld Research Institute, Ontario, Canada) and cultured. Cells were cultured with premixed gas at 0.5%, 2% (O₂/CO₂/N₂ levels of 0.5/4.5/95, and 2/5/93, respectively, Praxair, Warren, MI), and 20% O₂ levels were obtained by mixing 5% CO₂ from a 100% CO₂ gas tank with ambient N₂ and O₂ levels. Media were pre-equilibrated under O₂ levels for TSC culture overnight prior to culture. Quantitative removal of gas phase O₂ requires 30 min in anaerobic bags, i.e., there was only a minimal period when 20% O₂ was ambient to media that was pre-equilibrated under 0, 0.5, or 2% O₂. Since 12-24 hr is required to equilibrate gas phase to complex media/liquid phase, there was no appreciable exposure of TS cells to 20% O₂ again after the switch to 0, 0.5, or 2% O₂.

[0164] RNA isolation and quantitative reverse transcription-PCR (qRT-PCR). All steps in RNA isolation, cDNA synthesis and qPCR performance and analysis were described previously (Zhou, 2011). Briefly, DNase-treated total RNA was isolated following cDNA preparation using QuantiTect Reverse Transcription Kit iScript (Qiagen). Assays were performed using Fast SYBR Green on a System 7500 instrument (Applied Biosystems), and a one-step program for 40 cycles. Each experiment was carried out in triplicate, and all three genes for TSC multipotency were normalized against 18S rRNA.

[0165] Primers used are shown in the following Table 1:

TABLE 1
List of primers used in qPCR assays

| | | |
|---|---|---|
| Gene | | |
| abbreviation | Gene Name | Primer sequence |

TSC Multipotency Markers

| | | |
|---|---|---|
| Errβ | Estrogen-related | F 5′ GGGAGCTTGTGTTCCTCATC 3′(SEQ ID NO: 96) |
| | receptor-β | R 5′ CTACCAGGCGAGAGTGTTCC 3′(SEQ ID NO: 97) |
| Cdx2 | Caudal type | F 5′ CCAGCTCTTTGCCTCTCTGT 3′(SEQ ID NO: 98) |
| | homeobox-2 | R 5′ TGCCTCTGGCTCCTGTAGTT 3′(SEQ ID NO: 99) |
| Id2 | DNA-binding | F 5′ TCAGCCTGCATCACCAGAGA 3′(SEQ ID NO: 100) |
| | protein inhibitor2 | R 5′ CTGCAAGGACAGGATGCTGAT 3′(SEQ ID NO: 101) |

Transcription Factors (Hand1, Tfeb, Gcm1) and other marker (Tpbpa)

| | | |
|---|---|---|
| HAND1 | Heart-and | F 5′ GGATGCACAAGCAGGTGAC3′ (SEQ ID NO: 102) |
| | neural crest | R 5′ CACTGGTTTAGCTCCAGCG3′ (SEQ ID NO: 103) |
| | derivatives | |
| | expressed | |
| | protein1 | |
| Tpbpa | Trophoblast | F 5′ CGGAAGGCTCCAACATAGAA 3′(SEQ ID NO: 104) |
| (4311) | specific protein | R 5′ TCAAATTCAGGGTCATCAACAA 3′ |
| | alpha | (SEQ ID NO: 105) |
| Tfeb | Transcription | F 5′ AACAAAGGCACCATCCTCAA 3′(SEQ ID NO: 106) |
| | factor EB | R 5′ CAGCTCGGCCATATTCACAC 3′(SEQ ID NO: 107) |
| Gcm1 | Glial cells | F 5′ AACACCAACAACCACAACTCC 3′(SEQ ID NO: 108) |
| | missing-1 | R 5′ CAGCTTTTCCTCTGCTGCTT 3′(SEQ ID NO: 109) |

Terminal Differentiation Markers for Giant Cell

| | | |
|---|---|---|
| PI-I | Placental | F 5′ TGGTGTCAAGCCTACTCCTTT 3′(SEQ ID NO: 110) |
| | lactogen-1 | R 5′ CAGGGGAAGTGTTCTGTCTGT 3′(SEQ ID NO: 111) |
| PI-II | Placental | F 5′ CCAACGTGTGATTGTGGTGT 3′(SEQ ID NO: 112) |
| | lactogen-2 | R 5′ TCTTCCGATGTTGTCTGGTG 3′(SEQ ID NO: 113) |
| Plf | Proliferin | F 5′ TGAGGAATGGTCGTTGCTTT 3′(SEQ ID NO: 114) |
| | | R 5′ TCTCATGGGGCTTTTGTCTC 3′(SEQ ID NO: 115) |
| Ctsq | Cathepsin Q | F 5′ AACTAAAGGCCCCATTGCTAC 3′(SEQ ID NO: 116) |
| | | R 5′ CAATCCCCATCGTCTACCC 3′(SEQ ID NO: 117) |

Terminal Differentiation Markers for Syncytiotrophoblast

| | | |
|---|---|---|
| synA | Syncytin-A | F 5′ CCCTTGTTCCTCTGCCTACTC 3′(SEQ ID NO: 118) |
| | | R 5′ TCATGGGTGTCTCTGTCCAA 3′(SEQ ID NO: 119) |

Loading Control

| | | |
|---|---|---|
| 18S | 18S ribosomal | F 5′ CGCGGTTCTATTTTGTTGGT 3′(SEQ ID NO: 120) |
| | subunit | R 5′ AACCTCCGACTTTCGTTCTTG 3′(SEQ ID NO: 121) |

[0166] Mitochondrial staining by MitoTracker dye. TSC were cultured at different O₂ levels at least 24 hr stained with DAPI (D21490, Invitrogen) alone or with either MitoTracker Red FM (Invitrogen), TMRM (T668), or JC-1 (T3168, Invitrogen) alone or with the uncoupler FCCP (Sigma), and analyzed under a DM-IRE2 fluorescence microscope (Leica, Germany) using Simple PCI image acquisition software (Hamamatsu, Sewickley, PA).

[0167] In more detail, TSC were cultured on coverslips in 12-well plates at different O₂ levels either with or without FGF4, for 48 hr. Before experiments were conducted at low O₂ tension, TSC were adapted in a hypoxia chamber (Billups-Rothenberg, CA) at the given O₂ level described above for at least 24 hr. Nuclear dye 2.5 μg/ml DAPI (D21490, Invitrogen) was applied as a counterstain 1 hr before TSC were incubated alone with either 50 nM MitoTracker Red FM (M22425m, Invitrogen) for 30 min, 20 nM TMRM (T668) for 30 min, or 3.25 nM JC-1 (T3168, Invitrogen) for 45 min, or in combination with the uncoupler FCCP (1 nM, Sigma, C2920). After staining, the TSC were washed with PBS 2 times and immediately analyzed under a DM-IRE2 fluorescence microscope (Leica, Germany) using Simple PCI image acquisition software (Hamamatsu, Sewickley, PA).

[0168] Western analysis. TSC were lysed, protein assayed, separated by PAGE-SDS, immunoblotted and films exposed and analyzed as done previously. Zhou, 2011. In more detail, cytochrome c oxidase (COX) levels were determined by Western analysis. Proteins were extracted with lysis buffer (Cell signaling, #9803). Forty μg protein was loaded per well of pre-cast gels (Bio-rad, 161-1101). Proteins were transferred onto nitro-cellulose membranes and then incubated with anti-mouse monoclonal COX subunit I antibody (1:500; MitoSciences, MS404) overnight. After incubation with secondary antibody, signal was detected by chemiluminescence using ECL Advance (RPN2135, GE Healthcare Biosciences, Pittsburgh PA).

[0169] ATP measurements. TSC were washed, collected, centrifuged, frozen on dry ice, and stored. Cell pellets were boiled, lysed, iced, and solubilized by ultrasonication. (ATP)s were determined using the ATP bioluminescence assay kit HS II (Roche Applied Science) by the manufacturer's protocol. Data were standardized to the protein concentration. In more detail, TSC were washed with PBS once, collected by scraping, centrifuged at 10,000 rpm for 30 sec and then PBS was quickly removed. Cells were immediately frozen on dry ice and stored at −80° C. Cell pellets were supplemented with 300 μl boiling buffer (100 mM Tris, pH 7.75, 4 mM EDTA) and immediately transferred to a boiling water bath, lysed for 2 min, put on ice, and solubilized by ultrasonication. ATP concentrations were determined using the ATP bioluminescence assay kit HS II (Roche Applied Science) according to the manufacturer's protocol. Data were standardized to the protein concentration.

[0170] ROS measurements at 20% O₂. TSC were trypsinized, centrifuged, washed, and incubated with the ROS-sensitive probe 2′,7′-dichlorodihydrofluorescein diacetate (Molecular Probes), and analyzed on an Ascent Fluoroskan plate reader. Experiments were performed in triplicate and data standardized to cell number. As a control, cells were incubated in the presence of 100 μM H₂O₂.

[0171] In more detail, after differentiation at 20% O₂, TSC were trypsinized, collected by centrifugation, washed, and incubated with the ROS-sensitive probe 2′,7′-dichlorodihydrofluorescein diacetate (H₂DCFDA; D-399, Molecular Probes) at a final concentration of 7.5 μM for 20 min at 37° C. in the dark. Cells were collected by centrifugation, supplemented with media, and incubated in the dark for 20 min at 37° C. As a control, cells were incubated in the presence of 100 μM H₂O₂. Cells were collected by centrifugation, resuspended in PBS, transferred to a 96-well plate (Costar 3603; 200 μL per well), and analyzed on an Ascent Fluoroskan plate reader (488 nm excitation; 527 nm emission). Experiments were performed in triplicate and data standardized to cell number counted with a hemocytometer.

TABLE 2
Estimation of changes in PKM2 and COX subunit 1 activity
caused by removal of FGF4 at 20% or 0.5% O₂.
Dual regulation of rate-limiting steps in ETC and glycolysis
shown by removing FGF4 at 20% and 0.5% O₂:

| day 2 | 20% | | 0.5% | | | |
|---|---|---|---|---|---|---|
| | 20% | | ETC | 0.5% | | carbon |
| | anabolic | | activity | | | |
| usage | FGF4+ | FGF4− | delta | FGF4+ | FGF4− | delta |
| Total COX | 1 | 2.3 | +2.3x | 0.4 | 0.4 | 1 |
| pCOX | 1 | 0.4 | +2.5x | 0.85 | 0.25 | +3.4 |
| total activity delta | +3.4 × 0.4 = +1.36 | | +5.8 | x2.3 = +13.34 | | |
| Total PKM2 | 1 | 1 | 1 | 3.3 | 4.7 | +1.4 |
| pPKM2 | 1 | 0.35 | −3x | 0.9 | 0.3 | −3x |

| | |
|---|---|
| total activity delta | −3x × 1 = −3x |
| | −4.2 × 4.7 = −19.74 |

Values from FIG. 7
ETC activity is a product of changes with FGF4 removal of total protein (dependent on O₂ levels) multiplied by the change in posttranslational regulation (dependent on FGF4) and this product is multiplied by the total protein levels after FGF4 removal that is acted upon.

[0172] Statistical analysis. The data in this Example are representative of three independent experiments and indicated as mean±s.e.m. Data were analyzed with SPSS v. 19.0 using the Kruskal-Wallis non-parametric ANOVA for not normally distributed values, and if significant, the pairs of treatments were tested using the Mann-Whitney U-test with a Bonferroni correction for multiple comparisons. Groups were considered to be significantly different if p<0.05.

[0173] Results. SAPK increases the 1^{st} lineage and decreases later lineages proportional to the deviation from the optimal O₂ at 2%. Two SAPK inhibitors with different mechanisms, SP600125 and LJNKI1, were used to limit possible off-target effects. Both SAPK inhibitors prompted a 3-7-fold increase in the later chorionic lineage (Gcm1), with the highest inhibition occurring at 0.5% and 20% O₂ (FIGS. 1A and 2). Both SAPK inhibitors also increased later spongiotrophoblast lineage (Tpbpa) at all O₂ levels. In contrast, both inhibitors suppressed early lineage pTGC (Hand1) mRNA (FIGS. 1A and 2) with suppression being highest at 0.5% and 20% O₂. Furthermore, both SAPK inhibitors suppressed later lineages (Tpbpa and Gcm1) and increased the earliest lineage (Hand1, FIG. 1B and FIGS. 2, 3A and 3B). The smallest effects on Hand1, Tpbpa, and Gcm1 occurred at 2% O₂, but as O₂ levels deviated from 2% the mRNA levels are influenced by SAPK level upward for Hand1 and downward for Gcm1 (FIG. 1B).

[0174] The mRNA levels for 3 multipotency factors (Cdx2, Id2, and Errβ) were unaffected by 24 hr of O₂ at 2-20% but were greatly reduced at 0.5% O₂, despite FGF4. Neither SAPK inhibitor affected multipotency factors maintenance at 2-20% O₂, or the loss of the 3 multipotency factors at 0.5% O₂ (FIG. 1C). Hence during hypoxic stress, SAPK mediated prioritized differentiation (FIGS. 4A-4D), but not multipotency loss.

[0175] Loss of potency and gain of differentiation are O₂-dependent, and hypoxia suppresses labyrinthine placenta. It was 1^{st} tested whether the most stressful 0.5% O₂ level induces most loss of potency factor transcripts and increased differentiation after FGF4 removal. It was found that following FGF4 removal, the caudal homeobox related (Cdx2), Inhibitor of Differentiation (Id)2, and estrogen receptor related (Err)β—potency-mediating mRNA—were the most rapidly lost by 24 hr at 0-0.5% O₂ (FIG. 4A, 2). In contrast by day 7 0.5% O₂ sustained the highest potency factor mRNA levels while the lowest average level of the potency factors were observed at 20% O₂.

[0176] At 24 hr, 2 markers for the 1^{st} lineage pTGC showed stress-induced differentiation (PL1, Plf, FIGS. 4B and 4C, FIGS. 3A and 3B). First lineage markers PL1 and Plf were 2-3-fold higher at 0-0.5% than at 20% O₂ after 24 hr, Two later lineages found at the placental surface, sTGC (PL2+CtsQ) and syncytiotrophoblast A cells (synTA) were not increased (FIG. 4C). Transcription factors supporting 1^{st} and secondary pTGC, Hand1 and Tpbpa were upregulated in the first 24 hr at O₂<2% (FIGS. 3A and 3B). Thus the early response to hypoxic stress<2% O₂ is to differentiate to the 1^{st}, but not later lineages. A marker of 1^{st} lineage (PL1) was induced by O₂<2%, but differentiation did not increase greatly at low O₂ and by day 7 PL1 was most highly expressed at 20% O₂ (FIG. 4D, FIG. 5). In contrast a marker of a later lineage (synTa) was not disproportionally upregulated by O₂<2% and was always most highly expressed at 20% O₂.

[0177] Through day 4, the average differentiation increased threefold at all O₂ levels over day 0. However, by day 7, while 0-0.5% O₂ maintained this threefold increase, increases of 10-fold and 25-fold were observed for 2% and 20% O₂, respectively. First lineage markers PL1 and Plf were much more highly induced at 2-20% than at <2% O₂ but by day 7 all five differentiation markers were highest at 20% O₂ (FIG. 5). Thus, after a fast, early increase in differentiation of especially the 1^{st} lineage, differentiation stalled at hypoxic 0-0.5% O₂ but increased greatly at 2-20% O₂.

[0178] Proliferin (Plf), placental lactogen (PL)1, CtsQ, and synTa had a maximal increase of 7-10 fold, and 1 marker (placental lactogen, (PL)2) had a 70-fold increase by day 7 at 20% O₂ (FIG. 4B,C). The two placental surface lineages, sTGC and synTA cells appear least supported by O₂ at <20%. Markers of these two lineages were suppressed by hypoxic stress at 0.5% O₂ to 10% of levels at 20% O₂ (FIG. 4C).

[0179] Hyperosmolar stress that induces differentiation at 20% O₂ cannot induce differentiation at hypoxic 0.5% O₂. O₂ at 0.5% does not support differentiation but also does not activate as much SAPK as 100 mM sorbitol at >20% O₂⁶. Thus, 100 mM sorbitol, which increases SAPK 5 fold and induces differentiation at 20% O₂ despite FGF4 was added. Awonuga, 2011; Zhong, 2010; Liu, supra; Zhong, 2007. However, the added stress did not increase mRNA expression of any of the 3 terminal differentiation markers (PL1, Plf, and synTa) during hypoxia (FIG. 6A). Thus, 0.5% O₂ cannot support differentiation after FGF4 removal or sorbitol addition.

[0180] Multipotent TSCs that differentiated for 2 days after FGF4 removed showed increased mitochondrial membrane potentials (Δψₘ). The roles of FGF4 and O₂ on Δψₘ associated with ATP production was determined. TSCs were incubated for 2 days with or without FGF4 and stained with the Δψₘ-sensitive probes MitoTracker (FIG. 7A-7D), JC1, or TMRM in the presence or absence of the Δψₘ uncoupler FCCP (FIG. 8A-8F). At 2 or 20% O₂, FGF4 maintained mitochondria with low Δψₘ. Some cells had high Δψₘ at epithelial edges despite FGF4. Similar to the MitoTracker stain findings (FIG. 7A-7D), both JC1 and TMRM stains showed increased Δψₘ levels only after FGF4 removal (FIG. 8A-8F). FCCP completely depolarizes the Δψₘ, showing the specificity of the Δψₘ effects. Thus, FGF4 maintains mitochondrial inactivity in TSCs at all O₂ levels and O₂ does not play a role in mitochondrial initiation to full activity.

[0181] FGF4 and hypoxia co-regulate low Δψₘ, but Δψₘ does not increase with FGF4 removal during hypoxia after 7 days. The JC1 stain was used to assay Δψₘ and to test whether hypoxia limited Δψₘ generation when differentiation was maximal after FGF4 removal for 7 days (as in FIG. 4A-4D). There were 4 levels of JC1 stain color and intensity. FCCP produced no fluorescence, indicating complete Δψₘ depolarization (FIG. 6B). TSCs cultured with FGF4 at 0.5% O₂ showed a low level of green fluorescence, indicating low Δψₘ, but TSCs cultured at 2% or 20% O₂ with FGF4 removed showed two levels of increasing red fluorescence, indicating higher Δψₘ. FGF4 and hypoxia play additive, regulatory roles for Δψₘ but even with FGF4 removed, 0.5% O₂ could not sustain high Δψₘ levels.

[0182] Hypoxia induced morphological changes. At 0.5% O₂, stress significantly increases nuclear size despite FGF4 and nearly all TSCs with small nuclei were lost and all differentiated cells were TGC (FIGS. 6B, 6C). Hypoxic stress-induced giant cells in (FIG. 6C) with FGF4 were the same size as those induced by FGF4 removal at 2% or 0.5% O₂ (FIGS. 6E, 6F), but 20% O₂ sustained the largest giant cells (D). This finding is similar to hyperosmolar stress at 20% O₂, where all cells lost Id2 and expressed the TGC marker PL1. Awonuga, 2011; Zhong, 140:921-930, 2010. Multinuclear synTA cells and giant cells were visible at 20% O₂ with FGF4 removed, but synTA cells were not observed or extremely rare at 0.5% O₂. Although hypoxic stress initiates differentiation to TGC morphologically while suppressing syncytiotrophoblasts, terminal differentiation does not complete at 7 days (FIG. 4B) and size of TGC is lower at 0.5%<20% O₂. Thus, FGF4 is most important in suppressing Δψₘ when O₂ is ≥2%, but O₂≤0.5% limits Δψₘ generation, and morphological differentiation of TSCs is limited at 0-0.5% O₂.

[0183] Cytochrome c oxidase (COX) and pyruvate kinase embryonic form M2 (PKM2) are co-regulated by FGF4 and hypoxia, and their total protein levels do not change during hypoxia despite FGF4 removal. Without being bound by theory, a likely mechanism for decreased differentiation at 0.5% O₂ is insufficient mitochondrial OxPhos, which normally consumes>90% of cellular O₂. COX is the terminal, proposed rate-limiting enzyme of the electron transport chain (ETC). Villani, J. Biol. Chem., 273:31829, 1998; Pacelli, Mitochondrion, 11:334, 2011. COX, with other ETC complexes, generates the Δψₘ which is required for increased ATP synthesis, but also increased mitochondrial ROS. To biochemically corroborate the findings regarding Δψₘ inactivity, the amount of COX protein and its inactive Tyr304-phosphorylated form was assayed. Lee, J. Biol. Chem., 280:6094, 2005; Samavati, J. Biol. Chem., 283:21134, 2008.

[0184] At all O₂ levels COX is maintained at highest, phosphorylated (inactivated) state by FGF4 (FIG. 9A), corresponding to low Δψₘ in FIG. 6B, Total COX is low at O₂≤2% levels, and highest at 20% O₂ when FGF4 is removed (FIG. 9B). Significantly, total COX levels do not increase with FGF4 removal at 0.5% O₂.

[0185] Highly proliferative stem cells require high anabolic rates that require aerobic glycolysis. Aerobic glycolysis, as is probable when FGF4 is present in (FIG. 6B), is mediated by pyruvate kinase embryonic form PKM2. Christofk, Nature, 452:181, 2008; Hitosugi, Sci. Signal, 2:ra73, 2009. PKM2 mediates the irreversible terminal step of glycolysis. In its Tyr105 form, however, PKM2 does not homotetramerize, which is necessary to bind phospho-enol pyruvate and catalyze pyruvate production. PKM2 is also a nuclear cofactor for genes involved in glycolysis and glucose uptake. Similar to COX phosphorylation, FGF4 maintained phosphorylation of PKM2 on Tyr105 at all O₂ concentrations (compare FIGS. 9A and 9C). However, for PKM2, O₂≤2% without FGF4 resulted in the highest protein levels, with less PKM2 protein at O₂>2% (FIG. 9E). At 20% O₂, PKM2 protein decreased after FGF4 removal. The adult splice variant, PKM1, was higher with 2-20% O₂, but there was no coherent pattern of regulation by FGF4 or O₂ (FIG. 9D). Despite FGF4 removal, hypoxic O₂ at 0.5% O₂ maintains high glycolysis by maintaining high PKM2 protein levels.

[0186] Mitochondrial antagonists and an agonist show that mitochondrial function is necessary and sufficient to mediate the differentiation of two labyrinthine placental lineages. To test the necessity and sufficiency of mitochondrial function for TSC differentiation, 2 mitochondrial inhibitors and an agonist were used. The mitochondrial activator dichloroacetate (DCA) was tested at 0.5%-20% O₂ (FIG. 10A). There were no effects at 0.5% or 20% O₂. But at 2% O₂, of 5 markers only 2 markers increased 2-fold with DCA treatment; PL2 and synTa. These are markers of sTGC and synTA cells of the labyrinthine placenta, although PL2 is detected in other cell types. The other 3 markers were equally highly expressed at 20% and 2% O₂, suggesting maximal differentiation at 2% O₂ that could not be increased. Thus, DCA increased the 2 lineages that could be increased at 2% O₂. In contrast 0.5% O₂ is likely to be insufficient to support increases in differentiation induced by DCA.

[0187] Cyanide and antimycin A inhibit COX (part of mitochondrial complex IV) and complex III, respectively, and were used to inhibit the ETC and thus the generation of Δψₘ for 7 days of culture at optimal differentiation conditions (FIG. 10B). Sublethal concentrations of inhibitors were used that had significant effects on mitochondria. For all 5 differentiation markers tested, both mitochondrial inhibitors decreased mRNA levels. Markers emphasized (PL2; inhibited 98% and 56%) or specific (Ctsq; inhibited 81% and 71%) for labyrinthine sTGCs were decreased greatly by antimycin and cyanide respectively (FIG. 10B). A marker specific for labyrinthine synTA cells (synTa; inhibited 42% and 34%) was inhibited by antimycin and cyanide respectively (FIG. 10B). Thus, mitochondrial antagonists block differentiation of 2 lineages of the labyrinthine placenta under conditions mediating maximal differentiation, whereas a mitochondrial agonist increased those lineages at 2% O₂.

[0188] ATP decreases in an O₂-dependent manner as TSCs differentiate, but highest ATP accumulation occurs where hypoxic differentiation is lowest. To understand energy use during O₂-dependent differentiation, TSCs were cultured for 1-7 days without FGF4, and ATP levels were determined on days 1, 2, 4, and 7, the same as those used to test differentiation (FIG. 4B,4C). At 0%, 2%, and 20% O₂, ATP continuously decreased from days 1-7, with the lowest ATP in TSCs cultured at 2% or 20% O₂ at day 7 (FIG. 11). Thus, energy levels were lowest when differentiation was highest.

[0189] In contrast, in TSCs cultured at 0.5% O₂ ATP increased from days 1-7. The greatest decrease in ATP at 2-20% O₂ occurred between days 4 and 7, when differentiation increased most (FIG. 4B,4C) but cells were already confluent (data not shown) and proliferation does not consume ATP. Highest ATP consumption correlates with highest differentiation at 20% O₂, but surprisingly during hypoxic stress when differentiation is lowest ATP accumulates. Thus ATP is not the only factor that limits differentiation during hypoxia.

[0190] FGF4 suppresses ROS generation by TSCs. FGF4 regulates mitochondrial function through COX1 and PKM2 phosphorylation, which reduces ETC by preventing carbon entry into mitochondria. Mitochondria produce ROS, which can endanger DNA and are suppressed in stem cells. Simon and Keith, Nat. Rev. Mol. Cell Biol., 9:285, 2008. TSCs produce twice as much ROS (H₂O₂) 48 hr after FGF4 removal (FIG. 12). Thus FGF4 maintains low ROS.

[0191] Discussion. Since the seminal work from the Fisher lab, O₂ effects during imbalanced or blocked placental stem cell differentiation have focused on the insufficient “hypoxia” at 2% O₂ (Genbacev, Science, 277:1669, 1997) which does not support differentiation. Those findings are corroborated and extended here; 2% O₂ provides for insufficient placental differentiation for almost all lineages. Specifically 2% O₂ is insufficient for the full development of two lineages at the surface of the labyrinthine placenta; gas exchange-mediating synTA cells and secretory sTGCs. But hypoxia also does not support continuing increase in PL1 from days 4-7 after an early disproportionate peak at day 1.

[0192] However, it is emphasized that “hypoxic” stress for stem cells is at 0-0.5% O₂ where these lower levels fail to support differentiation but also cause differentiation, particularly of the 1^{st} lineage. Hypoxic stress creates an approximation of the higher stress levels (SAPK activation) for TSC caused by sorbitol or benzopyrene at 20% O₂. Awonuga, 2011; Zhong, 2010; Xie, Mol. Reprod. Dev., 77:533, 2010 (Xie, 2010). Like other stresses at 20% O₂, hypoxic stress at 0.5% O₂ induces potency factor loss and gain of differentiation factors. Specifically, hypoxia-induced Hand1 mediates differentiation of the 1^{st} lineage, pTGC. Rapid loss of potency factors and gain of differentiation factors are induced dominantly by stress with or without FGF4. However, 20% O₂ provides for an exit from aerobic glycolysis and an increase in mitochondrial membrane charge (Δψₘ) that supports the most energy-requiring lineages from 4-7 days after FGF4 removal. The average differentiation at all O₂ levels is equivalent at 4 days after FGF4 removal. But, differentiation increases to much higher levels only at 2-20% O₂ where free ATP levels approach zero as highest differentiation is reached at day 7. The highest level of Δψₘ, highest level of differentiation, and lowest ATP suggests that the final increase in differentiation requires the levels of energy supplied by efficient mitochondrial OxPhos, not aerobic glycolysis. It has been suggested that proliferation requires aerobic glycolysis to preserve carbon for proliferation, but cells are confluent at 2-20% O₂ by day 4. Lack of cell death or proliferation at day 7 suggests nearly all ATP would support differentiation and that ATP production limits differentiation.

[0193] It is only at 20% O₂ that total COX protein increases and total PKM2 protein decreases. It is only after FGF4 removal that tyrosine phosphorylation of COX and PKM2 proteins decreases. This loss of phosphorylation of COX and PKM2 leads to increased Δψₘ and ATP production, and decreased aerobic glycolysis, respectively. Thus 0.5% O₂ cannot support the differentiation initiated by hypoxic stress or added hyperosmolar stress that induces robust differentiation of TSC at 20% O₂. A key problem during the hypoxic stress at 0-0.5% O₂ is that it induces TSC differentiation in the 1^{st} 24-48 hr increase, marked by increases in cell size and PL1 and Plf levels (early lineage markers), but these markers are less than at 20% O₂ between days 4-7 due to mitochondrial insufficiency. The tendency is that 1^{st} lineage markers, which are favored early with hypoxic stress here and by all stresses at 20% O₂ as reported here and previously (Awonuga, 2011; Rappolee, Syst. Biol. Reprod. Med., 58:33, 2012), have a low “ceiling” of differentiation at 0.5% O₂ after 7 days with or without sorbitol. This suggests that energy or another mitochondrial function is rate-limiting.

[0194] Several lines of evidence suggest that mitochondrial insufficiency and failure to leave glycolysis (Warburg metabolism) are the fundamental limits to normal differentiation after FGF4 removal. These lines of evidence also pinpoint the two lineages at the labyrinthine surface as the highest energy- and mitochondrial function-requiring lineages. First although FGF4 is dominant over oxygen at all oxygen levels in maintaining phosphorylation of COX subunit 1 and PKM2, oxygen is dominant over FGF4 at low oxygen levels where total COX cannot increase and PKM2 cannot decrease with FGF4 removal. This suggests that mitochondrial ETC cannot increase at low O₂ and the inefficiency of glycolytic production of ATP cannot change at low O₂, even after FGF4 is removed and differentiation can begin. Also, both mitochondrial inhibitors decrease all differentiated lineages but the largest effects are on the labyrinthine surface lineages. But the highest inhibition occurs in the order 20>2>>0.5% O₂ after FGF4 removal, suggesting that mitochondrial function is required only at levels of O₂ that support full development of Δψₘ and OxPhos. In addition the mitochondrial agonist has no effects at 20% or 0.5% O₂. At 20% O₂, this suggests that differentiation is already maximized 7 days after FGF4 removal to the point that ATP is depleted and rate-limiting. At 0.5% O₂, this suggests there are no agonist's effects because mitochondria are inactive due to high PKM2 diverting carbon from the mitochondria, and insufficient COX and O₂ to enable OxPhos. Taken together, these lines of evidence suggest that full mitochondrial activity is needed to enable full differentiation after the mitochondria are fully active three days after FGF4 removal.

[0195] It should be noted that the highest accumulation of ATP after 7 days of FGF4 removal occurs at 0.5% O₂ suggesting that other factors besides ATP insufficiency truncate differentiation. Two candidates are residual high potency factors or induced hypoxia inducible factors (HIFs) that attenuate TSC differentiation. Caniggia, Placenta, 2000; 21 Suppl A:S25-30. HIFs are a prime candidate because they maintain glucose uptake and aerobic glycolysis (Semenza, Cold Spring Harbor Symp. Quant. Biol., 76:347, 2011; Qing, Cancer Res., 70:10351, 2010) and may contribute to the mechanism that prevents PKM2 loss with FGF4 removal at 0.5% O₂. Another candidate is reactive oxygen species (ROS) generation by mitochondria which is attenuated during hypoxia and supports differentiation of some stem cells. Testing of these candidates is underway, but underlying mitochondrial ATP insufficiency due to hypoxia remains a fundamental problem aside from the other candidates. Despite FGF4, at 20% O₂ hyperosmolar stress induces TSCs to differentiate to the 1^{st} lineage, producing Hand1 positive pTGC and Hand1-dependent PL1. Awonuga 2011. During induction of pTGC hyperosmolar stress does not induce later lineages such as sTGCs or synTA cells at 20% O₂, suggesting that stress prioritizes TSC differentiation. Liu, supra. Hyperosmolar stress induced-differentiation of Hand1 and PL1 proteins require SAPK enzyme function. Awonuga, 2011.

[0196] Similarly departure from the optimum at 2% O₂ increased stress, SAPK activity, and SAPK-dependent increase in Hand1 mRNA transcripts. But, here it is shown for the 1^{st} time that SAPK also mediates a decrease in Gcm1 mRNA transcripts proportional to the departure from the optimum O₂ for stemness at 2%. Although the SAPK effects are not the dominant effects, possibly because of mitochondrial insufficiency limiting some lineages, this is the 1^{st} evidence for an enzyme that mediates prioritized (aka “default”) differentiation. SAPK knockouts do not affect placentation in a normal vivarium (Xie, 2011; Rappolee, Reproduction, 145:R139, 2013 (Rappolee, 2013) so it will be important to study the effects of gestational hypoxic stress in SAPK knockouts.

[0197] Gestational hypoxia has revealed that placental and uterine hormones that are unnecessary during normal development become essential during hypoxic stress in vivo. Xie, 2011; Rappolee, 2013. In addition, gestational hypoxia produces a phenotype in vivo that has similarities with the phenotype observed here during hypoxia in culture. In both cases there was an increase in pTGC and a suppression of labyrinthine placenta.

[0198] A key interpretation is that stress leads to decreased stem cell growth and the further depletion of stem cell potency to enable differentiation of early essential function. A similar outcome is seen in preeclamptic human placenta where proliferative cytotrophoblasts are depleted while differentiated villous surface function is maintained. Longtine, Placenta, 33:352, 2012.

[0199] Stress induces differentiation but hypoxia for stemness, 0.5% O₂, truncates this and leads to rapid but incomplete differentiation that suppresses all lineages but two at the labyrinthine surface are suppressed the most. The mechanisms mediating the suppression are important to understand because diseases such as intrauterine growth retardation and preeclampsia feature labyrinthine dysfunction. It is important to test for these hypoxic effects in human 1^{st} trimester villous explants or human TSCs.

### Example 2

[0200] Introduction. Transcription factor (TF) expression and therefore lineage identity in the peri-implantation embryo and its stem cells may be influenced by extracellular stresses. Fauque, PLoS One, 5:e9218, 2010; Zhong, 2010. Perturbations of the embryo during the critical period of implantation frequently lead to loss of the pregnancy. Smart, Clin. Reprod. Fertil., 1:177, 1982; Wilcox, N. Engl. J. Med., 319:189, 1988. Understanding the integration of stress enzyme signaling of the developing embryo may help to improve early pregnancy success rates, and avoid or mitigate long-term negative effects on the health of offspring.

[0201] In vivo, the earliest placental lineage to differentiate after embryo implantation is trophoblast giant cells (TGCs). TGCs maintain early pregnancy by producing the hormones that stimulate uterine changes necessary to support an embryo. When placental trophoblast stem cells (TSCs), precursors to TGCs, were confronted with hyperosmotic stress in vitro, the stress enzymes that were activated modulated lineage TF expression. Zhong, 2010; Xie, 2014; Xie, Stem Cells Dev., 22:1564, 2013 (Xie, 2013)); Awonuga, 2011. Nearly all surviving TSCs terminally differentiated to 1^{st}-lineage TGCs (Xie, 2014; Awonuga, 2011; Liu, supra) and later lineages were suppressed. Xie, 2014; Liu, supra. This would hypothetically provide for the nutritional needs of the implanting embryo but leave insufficient stem cells to populate the other necessary placental lineages, jeopardizing long-term survival of the embryo.

[0202] Murine embryonic stem cells (mESCs) derived from the inner cell mass (ICM) of an E3.5 blastocyst are also highly sensitive to extrinsic signaling. Lander, J. Biol., 8:70, 2009. Extracellular signal regulated kinase (ERK) signaling can induce differentiation of mESCs; its suppression allows pluripotent stem cells to be derived from refractory mouse strains, and also allows the self-renewal of mESCs in culture. Burdon, Cells Tissues Organs, 165:131, 1999. Phosphoinositide 3-kinase (PI3K) regulates both the proliferation and pluripotency of mESCs, in part by its ability to maintain Nanog expression. Storm, J. Biol. Chem., 282:6265, 2007. p38MAPK signaling is necessary for mesoderm development (Duval, Cell Death Differ., 11:331, 2004; Barruet, Stem Cells Dev., 20:1233, 2011), and mESCs lacking c-Jun N-terminal kinase (JNK)1 fail to undergo neuronal differentiation. Amura, Mol. Cell. Biol., 25:10791, 2005. All of these enzymes may be activated by external stressors, such as hyperosmotic stress. Sheikh-Hamad and Gustin, Am. J. Physiol. Renal Physiol., 287:F1102, 2004. Therefore extrinsic stress signaling through stress enzymes may influence the kinetics and/or lineage allocation of differentiating mESCs.

[0203] Pluripotency in both murine embryonic stem cells (mESCs) and human embryonic stem cells (hESCs) is maintained by a network of TFs—Oct4, Sox2, and Nanog—which suppress the differentiated state. Boyer, Cell, 122:947, 2005; Lee, Cell, 125:301, 2006. The TF Rex1 is another common marker of the pluripotent state. Sharova, Dev. Biol., 307:446, 2007. Toxicological stressors can decrease potency in hESCs via a decrease in Oct4, Sox2, and Rex1 that potentially leads to abnormal differentiation. Pal, J. Cell. Physiol., 226:1583, 2011).

[0204] Oct4 maintains pluripotency in part by suppressing trophectoderm in both the ICM of the embryo and in the derivative mESCs in culture. Nichols, Cell, 95:379, 1998; Niwa, Nat. Genet., 24:372, 2000 (Niwa, 2000). A loss of 50% of Oct4 levels results in differentiation to trophectoderm, while a 50% increase above normal expression triggers differentiation to the early appearing primitive endoderm (PrEndo). Niwa, 2000. This is a reflection of the transient higher levels of Oct4 in the delaminating primitive endoderm derived from ICM of the E3.5 blastocyst. Palmieri, Dev. Biol., 166:259, 1994. Recent evidence suggests that Oct4 is required for differentiation of extraembryonic endoderm (ExEndo) by non-cell autonomous fibroblast growth factor (FGF)4 function and by cell autonomous upregulation of ExEndo TFs. Frum, Dev. Cell., 25:610, 2013; Frankenberg, Dev. Cell., 21:1005, 2011. Thus, small, transient changes in Oct4 levels change the potency of mESCs and stress may contribute to transient Oct4 regulation.

[0205] Nanog suppresses PrEndo and its derivative ExEndo expression in the blastocyst. High Nanog expression is found only in pluripotent cells; low expression sensitizes mESCs to differentiation signals, committing them to PrEndo and later ExEndo lineages. Chambers, Nature, 450:1230, 2007; Singh, Stem Cells, 25:2534, 2007. Rex1 expression correlates strongly with pluripotency in mESCs (Sharova, supra); its expression is lost as mESCs differentiate to either PrEndo/ExEndo or the later-appearing embryonic ectoderm (EmEcto). Rathjen, J. Cell. Sci., 112 (Pt 5):601, 1999; Lake, J. Cell. Sci., 113 (Pt 3):555, 2000; Toyooka, Development, 135:909, 2008. In contrast to Oct4, Rex1-homozygous-null-mutant mESCs can be isolated, but have a higher spontaneous differentiation rate to all lineages. Scotland, Dev. Dyn., 238:1863, 2009. In vivo, Rex1-null embryos express some visceral endoderm markers at lower levels (Masui, BMC Dev. Biol., 8:45, 2008 (Masui, 2008)), suggesting a role for Rex1 in ExEndo differentiation.

[0206] Therefore, cells of the ICM and its immediate successor lineages, PrEndo and EmEcto, may be identified by measuring the relative quantitative expression of potency TFs. The current Example used hyperosmotic stress to concurrently activate multiple stress enzyme signaling pathways in mESCs. The stress-enzyme-dependent changes in TFs Oct4, Nanog, Sox2, and Rex1 were subsequently measured to reveal the impact of stress on pluripotency. After screening 21 signaling kinases in 11 subfamilies using 14 inhibitors, 5 protein kinases (PKs) were revealed to affect the kinetics and/or the allocation of lineages from differentiating mESCs. While hyperosmotic stress did not trigger morphological differentiation of mESCs cultured in monolayer, it primed mESCs to initiate 1^{st}-lineage PrEndo/ExEndo differentiation, altering the response of mESCs to differentiation cues.

[0207] Materials and Methods. Reagents. MG132, lactacystin, and sorbitol were from Sigma (St. Louis, MO). Enzyme inhibitors LY294002, U0126, PD98059, SB202190, AKTi, and L-JNKi-1 were from Calbiochem (La Jolla, CA). Amido black was from MP Biomedicals (Solon, OH). Rabbit polyclonal to mouse Oct4 (sc-5279), goat anti-human Sox2 (sc-17320), anti-rabbit MEK1 (sc-219), and anti-mouse MEK2 (sc-13159) antibodies were from Santa Cruz Biotechnology (Santa Cruz, CA). Antirabbit Nanog was from Chemicon/Millipore (AB5731; Billerica, MA) and Rex1 antibodies were from Abcam (AB28141; Cambridge, MA). Anti-rabbit p38 (CS9212), phospho-p38 (Thr180/Tyr182 CS9211), JNK (CS9252), phospho-SAPK (Thr183/Tyr185 CS9251), phospho-MEK1/2 (Ser217/221 CS9121), ERK1/2 (CS9102), phospho-ERK1/2 (Thr202/Tyr204, CS9106), phospho-AKT (Ser473 CS2965), b-actin (CS4967), and cleaved-caspase 3 (CS9664) antibodies were from Cell Signaling (Beverly, MA). For real-time quantitative PCR (RT-qPCR) the RNeasy Mini Kit was used for RNA isolation and QuantiTect Reverse Transcription Kit, both from Qiagen (Germantown, MD), and Fast SYBR Green Master Mix from Applied Biosystems (Foster City, CA). RNA primers (Oct4, Nanog, Rex1, Dab2, Lrp2, and Fgf5) were from Integrated DNA Technologies (Coralville, IA).

[0208] Cell culture and stimulation. mESC-D3 cells (ATCC, Manassas, VA) were cultured in the absence of feeder cells in Dulbecco's modified Eagle's medium (Gibco, Grand Island, NY) supplemented with 15% mESC-screened fetal bovine serum (HyClone, Logan, UT), 2 mM L-glutamine, 1 mM sodium pyruvate, 1 mM nonessential amino acids, 0.1 mM 2-mercaptoethanol (Sigma), and 1,000 U/mL murine leukemia inhibitory factor (LIF; Millipore, Temecula, CA) on 0.1% gelatin-coated dishes at 37° C. in humidified air with 5% CO₂. Masui, 2008. mESCs were cultured overnight after passaging before stimulation with sorbitol. Osmolality was determined by freezing point depression using Advanced Instruments Wide Range Osmometer 3W2 (Advanced Instruments, Norwood, MA). One liter of a very dilute aqueous solution at room temperature very nearly has a mass of 1 kg, so at low solute concentrations(<0.50 M), osmolarity and osmolality are considered equivalent.

[0209] Enzyme inhibition. Enzyme inhibitors were chosen according to the specificity reported in the kinase inhibitor literature. Alessi, J. Biol. Chem., 270:27489, 1995; Davies, Biochem. J., 351:95, 2000. Inhibitor concentrations were determined following dose response experiments for each inhibitor based on the range of concentrations determined from the mESC and kinase inhibitor literature. Alessi, supra; Davies, supra; Gross, Mol. Reprod. Dev., 70:324, 2005); Hamazaki, Mol. Cell. Biol., 26:7539, 2006; Bain, Biochem. J., 408:297, 2007; Lee, Cell Prolif., 41:230, 2008. The single doses selected for use in ongoing experiments and shown herein were the lowest doses impacting Oct4 protein expression following 4 hr of sorbitol exposure (as determined by western blot) with minimal toxicity (as determined by phase microscopy). Inhibitors were suspended in dimethyl sulfoxide (DMSO), diluted to the proper concentrations, and preloaded for 1 hr prior to sorbitol stimulation. Vehicle-only control experiments were performed and expression of Oct4, Nanog, and Rex1 was determined by western blot to be not significantly different from nonvehicle control (data not shown). Inhibitor-only experiments were performed for 24 hr to determine the impact of enzyme inhibition on Oct4, Nanog, and Rex1 expression.

TABLE 3
Inhibitor only effects on Oct4, Nanog, and Rex1 expression.

| Inhibitor | Oct4 | Nanog | Rex1 |
|---|---|---|---|
| AKTi (10 μM) | 0.88 ± 0.03 | 0.97 ± 0.04 | 1.1 ± 0.12 |
| LY294002 (10 μM) | 1.34 ± 0.06 | 1.02 ± 0.08 | 1.11 ± .12 |
| L-JNKi-1 (2 μM) | 0.90 ± 0.06 | 0.63 ± 0.16 | 0.96 ± 0.10 |
| SB202190 (10 μM) | 0.91 ± 0.28 | 0.71 ± 0.20 | 0.78 ± 0.18 |
| U0126 (40 μM) | 1.16 ± 0.31 | 0.94 ± 0.15 | 0.72 ± 0.06 |
| PD98059 (20 μM) | 1.24 ± 0.21 | *1.54 ± 0.10 | 0.93 ± 0.06 |

mESC were cultured for 24 hr in the presence of inhibitor only.
Values shown represent percentage of protein expression compared to 24 hr, no inhibitor (set to 100%).
ANOVA with Student-Newman-Keul's post hoc test, n >= 3, p < 0.05. *There was a significant effect on Nanog expression during 24 hr of PD98059 inhibitor-only treatment (p = 0.0007).

[0210] In 14/18 conditions, inhibitors had no effect on potency TF levels; in 2 conditions, the inhibitors decreased expression by 20% and, in the remaining 2 conditions, TF expression was increased above baseline. Inhibitor-only experiments were performed for 4 and 24 hr to determine the impact of enzyme inhibition on Oct4, Nanog, and Rex1 expression. There were no significant differences in expression after 4 hr of inhibitor-only treatment (Oct4 P=0.78, Nanog P=0.81, and Rex1 P=0.55; data not shown). There were no significant differences in expression of Oct4 (P=0.23), Rex1 (P=0.053), or 5/6 of the Nanog inhibitors (P=0.19) after 24 hr of inhibitor-only inhibition (Table 3). There was a significant effect on Nanog expression during 24 hr of PD98059-inhibitor-only treatment (P<0.001). However in Table 4, PD98059 targets had no significant effect on the recovery of Nanog during 24 hr of stress, the biological significance of PD98059 inhibitor only is nil. DMSO-only controls were also done. DMSO at 0.6% did not impact Oct4, Nanog, and Rex1 expression at 4 or 25 hr. This (0.6%) was higher than the highest diluent concentration in any of the described experiments (0.4% in the U0126 experiments).

TABLE 4
TF expression levels during 24 hr of hyperosmotic stress +/−
enzyme inhibition in mESC monolayer culture.

| 24 hr inhibition | Oct4 | Nanog | Rex1 |
|---|---|---|---|
| Unstressed | 1.00 ± 0.00 | 1.00 ± 0.00 | 1.00 ± 0.00 |
| Stress only (S) | 1.03 ± 0.16 | 1.15 ± 0.20 | 0.35 ± 0.08 * |
| PD98059 (MEK1) + S | 0.78 ± 0.06 | 0.80 ± 0.09 | 0.51 ± 0.01 * |
| U0126 (MEK1/2) + S | 0.27 ± 0.03 *, a | 0.67 ± 0.32 | 0.31 ± 0.12 * |
| SB202190 (p38) + S | 0.51 ± 0.07 *, a | 0.10 ± 0.01 *, a | 0.19 ± 0.07 * |
| L-JNKi-1 (JNK) + S | 0.91 ± 0.15 | 0.71 ± 0.15 | 0.89 ± 0.08 a |
| LYZ94002 (PI3K) + S | 0.65 ± 0.08 | 0.44 ± 0.07 *, a | 0.00 *, a |
| AKTI + S | 0.84 + 0.19 | 0.97 + 0.03 | 0.44 ± 0.04 * |

Values represent percent of unstressed expression.
* means statistically different from unstressed.
a means statistically different from ‘stress only’, n >/= 3, ANOVA and Student-Newman-Keul's post hoc tests, p < 0.05.

[0211] Cell accumulation and apoptosis. Cell accumulation was assayed by counting cells using a hemocytometer following trypan blue exclusion. MESCs were trypsinized, plated, and cultured overnight to allow for adaptation after passage. Time-zero counts were taken at least 1 day after passage and all subsequent counts were normalized to this. Apoptosis was measured by immunoblot for cleaved caspase 3. Mullen and Critser, Methods Mol. Biol., 254:393, 2004.

[0212] Microscopy. Indirect immunocytochemistry was performed as described previously. Wang, Dev. Dyn., 231:72, 2004; Xie, Mol. Reprod. Dev., 71:1, 2005. Photomicrography was performed using a Leica DM IRE2 automated epifluorescence microscope (Wetzlar, Germany) controlled electronically by Simple PCI AI software (Hamamatsu Corporation, Sewickley, PA). All micrographs were taken at a magnification of 100×, except where indicated.

[0213] Western blot analysis. Sodium dodecyl sulfate-polyacrylamide gel electrophoresis and western immunoblot analysis of mESC lysates were performed as previously described. Xie, Mol. Hum. Reprod. 13:473-81 (2007). Cells were harvested with cold lysis buffer (Cell Signaling) and protein was quantified by BCA assay (Pierce, Rockford, IL). Ten to twenty micrograms of aliquots were fractionated on 10% polyacrylamide precast gels (Bio-Rad, Hercules, CA), transferred to nitrocellulose membranes (Amersham Biosciences, Aylesbury, UK), probed overnight with primary antibodies, and developed as previously described. Xie, supra, 2005. Protein bands were visualized using the ECL Advance Western Blotting Detection Kit (GE Healthcare, Waukesha, WI), blot was scanned to obtain an electronic image, and intensity of protein bands was quantified using Image J analysis software (rsbweb.nih.gov) and normalized to amido black staining. Aldridge, J. Neurosci. Methods, 172:250, 2008. Data are expressed as the change in expression relative to no treatment at time zero.

[0214] RT-qPCR analysis. mESCs were trypsinized and harvested for RT-Qpcr analysis using a 7500 Fast Real Time PCR System (Applied Biosystems). Total RNA was isolated from cell lysates using RNeasy Mini Kit (Qiagen). RNA content was measured using ND-1000 Spectrophotometer (NanoDrop and ThermoScientific, Wilmington, DE). Complementary DNA (cDNA) was synthesized from 50 to 100 ng of total RNA using QuantiTect Reverse Transcription Kit (Qiagen) according to the manufacturer's instructions, and diluted 1:5. One microliter of cDNA template was added to 1 mL of both the forward and reverse primers for each specific transcript and 10 mL of Fast SYBR Green Master Mix (Applied Biosystems) for the RT-qPCR. Primer sequences are shown in Table 5.

TABLE 5
RT-qPCR primer sequences.

| Gene | Forward primer sequence | Reverse primer sequence |
|---|---|---|
| Oct4 | AGTTGGCGTGGAGACTTTGC | CAGGGCTTCATGTCCTGG |
| | (SEQ ID NO: 122) | (SEQ ID NO: 123) |
| Nanog | TCTTCCTGGTCCCCACAGTTT | GCAAGAATAGTTCTCTCGGGATGAA |
| | (SEQ ID NO: 124) | (SEQ ID NO: 125) |
| Rex1 | CCCTCGACAGACTGACCCTAA | TCGGGGCTAATCTCACTTTCAT |
| | (SEQ ID NO: 126) | (SEQ ID NO: 127) |
| Dab2 | CCCCTGAACGGTGATACTGAT | AAGTCCTGCTTTACGCCATTC |
| | (SEQ ID NO: 128) | (SEQ ID NO: 129) |
| Lrp2 | AAAATGGAAACGGGGTGACTT | GGCTGCATACATTGGGTTTTCA |
| | (SEQ ID NO: 130) | (SEQ ID NO: 131) |
| Fgf5 | TGTGTCTCAGGGGATTGTAGG | AGCTGTTTTCTTGGAATCTCTCC |
| | (SEQ ID NO: 132) | (SEQ ID NO: 133) |
| Gapdh | CATGTTCCAGTATGACTCCACTC | GGCCTCACCCCATTTGATGT |
| | (SEQ ID NO: 134) | (SEQ ID NO: 135) |
| 18s | SEQ ID NO: 120 | SEQ ID NO: 121 |
| ribosomal | | |
| subunit | | |

[0215] Primer pairs were checked for specificity using BLAST analysis and were checked by both agarose gel electrophoresis and thermal dissociation curves to ensure amplification of a single product, and to rule out formation of primer dimers during the RT-qPCR. The RT qPCR cycling parameters were as follows: enzyme activation, 95° C. for 20 s; denature, 95° C. for 3 s; and anneal/extend, 60° C. for 30 s for a total of 40 cycles. The expression of the target genes was quantified against that of two internal reference genes, glyceraldehyde-3-phosphate dehydrogenase (GAPDH) and 18s ribosomal RNA subunit (18s rRNA). GAPDH was determined to be the most stable of 10 reference genes tested during mESC differentiation (Murphy and Polak, Tissue Eng., 8:551, 2002; Willems, Int. J. Dev. Biol., 50:627, 2006), and 18s rRNA was selected due to its stability during hyperosmolar conditions in TSCs. Liu, supra. Fold change was determined using the ddCt method. Livak and Schmittgen, Methods, 25:402, 2001. Data are expressed as the fold change in expression relative to no treatment at time zero.

[0216] Statistical analysis. Results of these investigations were described as the mean-standard error of at least three independent experiments. Data were analyzed using SPSS v. 19.0. In some cases, hypotheses were restated and additional replicates with increased numbers of controls were performed to obtain higher statistical confidence. Thus, the sample size for each data point in some figures may vary. Statistical analysis included ANOVA with Student-Newman-Keuls post hoc tests, or Kruskal-Wallis nonparametric ANOVA tests (due to non-normal distribution of data), followed by Mann-Whitney tests on each pair of groups with Bonferroni correction of the P-value. Groups were considered to be significantly different if P<0.05.

[0217] Results. mESC growth and colony morphology during hyperosmotic stress. 400 mM sorbitol is the dose that induces the highest levels of stress enzyme activity and function in mouse TSCs and embryos. Xie, 2007; Zhong, 2007; Xie, Mol. Reprod. Dev., 75:689, 2008. The described mESC studies therefore began with this dose, but it proved to be lethal in mESCs (FIG. 13A). 200 mM sorbitol was then established as the nonlethal experimental dose, and the effects of this dose were tested on mESC proliferation and apoptosis. Osmolality was measured at 330±4 mOsm/kg H₂O before sorbitol addition (described in “Materials and Methods” section; Zhong, 2007), and 531±7 mOsm/kg H₂O after addition of 200 mM sorbitol. At low solute concentrations, osmolality and osmolarity can be considered equivalent because the mass of 1 L of a dilute aqueous solution is very close to 1 kg. The osmolarity of mouse uterine fluid has been reported as 330 mOsm. Harris, Theriogenology, 64:992, 2005. Thus the described baseline media were isotonic with uterine fluid.

[0218] To establish the optimal, nonmorbid hyperosmotic dose, mESCs were cultured for 72 hr in three experimental conditions: isosmotic media +LIF, isosmotic media −LIF, and hyperosmotic media +LIF. Cell counts were done (FIG. 13B) and micrographs were taken at 24, 48, and 72 hr of culture (FIG. 13D). Stress slowed growth rates from an overall doubling rate of 17.4 hr in untreated cells +LIF to 30.8 hr in treated mESCs (FIG. 13C).

[0219] To test whether the reduced accumulation of cells during stress was the result of slowing of the cell cycle or apoptosis, apoptosis was assayed for by probing for the small cleavage product generated when caspase 3 is activated. It has been reported that mESCs do not express a functional death ligand (Fas/FasL) system. Brunlid, Stem Cells, 25:2551, 2007. Nevertheless, caspase 3 is activated in both the extrinsic (i.e., extracellular induction) and intrinsic (mitochondrial) apoptotic pathways. This cleavage product was detected following 1-2 hr of stress (14% of cells; FIG. 13E), and occasionally at 4 h, but by 6-24 hr the remaining cells had adapted to the stress with cleaved-caspase 3 detected in fewer than 5% of cells by immunofluorescence, and no protein detected by immunoblot. mESC survival in hyperosmotic conditions was dependent on PI3K signaling (FIG. 13F); inhibition of PI3K with LY294002 led to massive cell death of up to 90% of mESCs during 24 hr of hyperosmotic stress. Thus this level of hyperosmotic stress produced transient apoptosis followed by diminished but positive cell growth and survival that was PI3K dependent.

[0220] Hyperosmotic activation of signaling enzymes. A small subset of the 500 PKs in the kinome typically respond to stress stimuli, suggesting these as candidates for mediating cellular responses to hyperosmotic stress. Zhong, 2010; Xie, 2011. After screening 21 signaling kinases in 11 subfamilies using 14 inhibitors, 5 kinases in the mitogen activated protein kinase (MAPK) and PI3K families were identified as producing differentiation-priming effects in hyperosmotic conditions. To determine the kinetics of activation of these five kinases in the described system, mESCs were treated with 200 mM sorbitol for 1 hr. Expression levels of the activated (i.e., phosphorylated) enzymes were assayed by western blot analysis (FIG. 14), including phospho-p38MAPK, phospho-JNK, phospho-MEK1/2, and phospho-AKT (the downstream effector of PI3K signaling). Activated p38MAPK was 1^{st} detected at 10 min of stimulation; activation persisted throughout 1 hr of stimulation. Similarly, activated JNK was 1^{st} detected at 20 min of stimulation, and persisted throughout 1 hr of stimulation. Activated MEK1/2 and activated AKT were present endogenously at low levels at time zero; sorbitol stimulated higher activation levels of each. Increased MEK1/2 activation was stimulated within the 1^{st} 10 min of stress exposure, but returned to baseline levels by 20 min. In contrast, increased AKT activation occurred by 20-30 min of stimulation, and persisted through 1 hr of sustained stress exposure.

[0221] Efficacy of enzyme inhibitors. Efficacy of the pharmacological inhibitors for these enzymes was tested under stress conditions (FIG. 15). LY294002 and AKTi inhibited AKT activation by an average of 88% and 95%, respectively. PD98059 directly inhibits new MEK1 activation; its efficacy was determined by measuring the activation of MEK1's downstream targets, ERK1/2. PD98059 inhibited ERK1/2 activation by an average of 30%. This is consistent with the literature that describes the mechanism of action of PD98059; it binds to inactive MEK1 thus preventing new activation, but does not shut off endogenously active MEK1. Dudley, Proc. Natl. Acad. Sci. USA, 92:7686, 1995; Goueli, Promega Notes, 69:6, 1998. U0126 inhibited ERK1/2 activation by an average of 87%. SB202190 inhibited p38MAPK activation by an average of 60%. L-JNKi-1 inhibited JNK activation by an average of 50%. Thus highest inhibition and specificity was identified and attained in line with the encyclopedic testing by Bain, Biochem. J., 371:199, 2003.

[0222] Hyperosmotic stress modulated expression of TF markers of pluripotency. mESCs were treated with 200 mM sorbitol for 24 hr to test for stress-induced differentiation through loss of potency TFs and/or gain of TFs that mark differentiated lineages PrEndo/ExEndo or EmEcto. FIG. 16A illustrates the relative expression of these TFs in the undifferentiated ICM, modeled by mESCs, and each of the potential downstream lineages of mESCs, PrEndo that gives rise to other ExEndo lineages, and EmEcto. Expression levels of Oct4, Sox2, Nanog, and Rex1 were determined at multiple time points up to 24 hr by western blot analysis and RT-qPCR. Hyperosmotic stress rapidly activated the differentiation program, with expression of Oct4, Nanog, Rex1, and Sox2 TF proteins decreasing within the 1^{st} hour and reaching a nadir between 2 and 4 hr of continued stress (FIG. 16B). The nadir of Nanog expression was more variable than the other three TFs, occurring as early as 2 hr in some experiments or as late as 6 hr of stress. By 6 h, the overt differentiation program was aborted, and the decline in Oct4, Sox2, and Nanog expression halted. Over the next 2-20 h, expression of these three TF proteins rebounded toward the unstressed baseline with both Sox2 and Nanog achieving complete, robust recovery to their prestressed protein levels (FIG. 16B). Because Nanog, Oct4, and Rex1 expression was adequate to identify mESC or subsequent lineages, Sox2 expression was not continued. Nanog and Oct4 recovery was maintained through 72 hr of ongoing stress (FIG. 16E, Oct4, data not shown). Recovery at the mRNA level also occurred, with both Oct4 and Nanog moving toward their unstressed baseline, although this recovery had not reached significance at 24 hr (FIG. 16C).

[0223] In contrast, Rex1 protein levels did not rebound, remaining at <40% of its unstressed levels throughout the 24-h time course (FIG. 16B). Rex1 mRNA levels, however, recovered to 70% of their unstressed levels by 24 hr (FIG. 16C). Overall, stress induced a rapid, transient loss of protein and mRNA in potency TFs, but this loss was reversed in some TFs as mESCs adapted to the stress. Rex1 protein was exceptional in its persistent stress-induced suppression through 24 hr.

[0224] Hyperosmotic effects on lineage markers during monolayer cell culture. The persistent suppression of Rex1 during hyperosmotic stress suggested that some mESCs were differentiating to PrEndo/ExEndo or EmEcto. RT-qPCR was therefore used to look at markers of these lineages after 24 hr of hyperosmotic stress in a monolayer culture system (FIG. 16D). Lrp2, which arises in the E3.5 PrEndo (Frankenberg, supra; Gerbe, Dev. Biol., 313:594, 2008), and Dab2, which arises in the E4.5 ExEndo (Frankenberg, supra; Yang, Dev. Biol., 251:27, 2002) were selected as PrEndo/ExEndo markers, and Fgf5, which arises in the E5.5 EmEcto (Haub & Goldfarb, Development, 112:397, 1991; Hebert, Development, 112:407, 1991), was selected as the EmEcto marker (FIG. 16A). mRNA expression was compared in stressed mESCs with LIF with that of both unstressed mESCs cultured in the presence of LIF (a pluripotent control) and unstressed mESCs cultured following LIF removal (a differentiation control).

[0225] Sorbitol induced significantly higher levels of Lrp2 and Dab2 expression compared with either of the time-matched controls (FIG. 16D). In contrast, although 24 hr of LIF removal was sufficient for unstressed cells to upregulate the EmEcto marker Fgf5, the presence of sorbitol suppressed this upregulation in stressed cells. Thus, the stress-induced loss of Rex1 correlated with upregulation of markers of the early appearing PrEndo/ExEndo lineages, but suppression of the later EmEcto lineage marker.

[0226] Hyperosmotic-stress-induced loss of potency TFs due to proteasomal degradation. To determine the mechanism of TF protein loss during stress, mESCs were treated with one of two proteasome inhibitors, MG132 (FIG. 17) and lactacystin (FIGS. 18A-18D). Both inhibitors prevented the stress-induced loss of Oct4, Nanog, and Rex1. Oct4 loss was reversed by 75%, Nanog by 93%, and Rex1 by 310% in 4 hr of proteasome inhibition by MG132.

[0227] MEK1 and other enzymes trigger mESC initial stress response: initiation of differentiation program. mESCs were cultured in the presence of pharmacological inhibitors and hyperosmotic stress for 4 hr to identify the enzymes that mediated the stress-induced loss of potency TF proteins, reported in FIG. 16B. The complete results of p38, JNK, MEK1/2, and PI3K inhibition during 4 hr of hyperosmotic stress in mESCs are summarized in Table 6.

TABLE 6
TF expression levels during 4 hr of hyperosmotic stress +/−
enzyme inhibition in mESC monolayer culture.

| 4 hr inhibition | Oct4 | Nanog | Rex1 |
|---|---|---|---|
| Unstressed | 1.00 ± 0.00 | 1.00 ± 0.00 | 1.00 ± 0.00 |
| Stress only (S) | 0.52 ± 0.03 * | 0.65 ± 0.07 * | 0.63 ± 0.06 * |
| PD98059 (MEK1) + S | 0.93 ± 0.09 a | 2.57 ± 0.50 *, a | 1.20 ± 0.05 a |
| U0126 (MEK1/2) + S | 0.44 ± 0.13 * | 0.24 ± 0.02 *, a | 0.98 ± 0.04 a |
| SB202190 (p38) + S | 0.81 ± 0.21 | 0.52 ± 0.12 * | 0.59 ± 0.23 * |
| L-JNKi-1 (JNK) + S | 0.21 ± 0.04 *, a | 1.08 ± 0.11 a | 0.47 ± 0.04 * |
| LY294002 (PI3K) + S | 0.92 ± 0.12 a | 0.55 ± 0.10 * | 0.36 ± 0.14 * |
| AKTi + S | 0.57 ± 0.05 * | 0.47 ± 0.06 * | 0.43 ± 0.14 * |

Values represent percent of unstressed expression.
* means statistically different from unstressed.
a means statistically different from ‘stress only’, n >/= 3, ANOVA and Student-Newman-Keul's post hoc tests, p < 0.05.

[0228] MEK1 activation triggered a loss of expression of all three TFs; when its stress-induced activation was prevented by PD98059, expression of both Oct4 and Rex1 remained at the unstressed baseline, while Nanog expression increased to 2.5 times its unstressed level (FIG. 19A). This effect was repeated for Rex1 during inhibition with the MEK1/2 inhibitor U0126 (FIG. 19B); due to inhibition of both MEK1 and MEK2 during stress exposure, Rex1 expression remained at unstressed levels. This suggests that MEK1 was the regulator of Rex1 protein destruction during stress.

[0229] In contrast, MEK1/2 inhibition with U0126 did not prevent Oct4 or Nanog loss during stress for 4 hr (Table 6). Instead, inhibition of MEK1/2 kinase activity allowed even greater loss of these two TFs. Therefore a U0126 target that is not targeted by PD98059, putatively MEK2, protected Oct4 and Nanog from being completely lost during stress. This indicates that the targets of U0126 and PD98059 produce opposite effects on pluripotency, and perhaps interact negatively with each other.

[0230] Several other enzymes were also implicated in the stress-induced loss of potency TFs. PI3K signaling led to loss of Oct4 expression during the 1^{st} 4 hr of stress; its inhibition with LY294002 prevented the stress-induced loss of Oct4 (FIG. 19B). This effect was not mediated through the AKT pathway, as specific inhibition of AKT did not prevent Oct4 loss (Table 6). When both PI3K and MEK1 signaling was inhibited simultaneously, Oct4 levels did not rise significantly above baseline (data not shown). This suggests that both PI3K and MEK1 use a common pathway to destroy Oct4 protein under stress conditions. A third stress enzyme, JNK, was involved in the loss of Nanog expression during stress; its inhibition allowed Nanog expression to be preserved during stress (FIG. 19B).

[0231] p38MAPK and other signaling kinases produced mESC adaptive response to hyperosmotic stress: differentiation program aborted, and pluripotency restored at 24 hr. The enzymatic mechanisms that mediated the recovery of potency TF proteins during stress that persisted for 24 hr was next tested. mESCs were cultured in the presence of hyperosmotic stress for 24 hr with or without pharmacological inhibitors of PKs; the complete results of p38MAPK, JNK, MEK1/2, and PI3K inhibition during 24 hr of hyperosmotic stress are summarized in Table 4. p38MAPK signaling mediated the recovery of Oct4 and Nanog proteins to their unstressed baselines during 24 hr of stress (FIG. 20A). When stress-induced activation of p38MAPK was prevented by SB202190, Oct4 expression did not recover from its 4-h nadir of 50% of unstressed levels. Similarly, Nanog expression during ongoing stress decreased to 10% during p38MAPK inhibition. Micrographs of p38MAPK-inhibited mESCs are shown in FIG. 8B; although 24 hr is not adequate to see outright differentiation, the colonies do appear to show the initial signs of differentiation, with some migration of cells away from the colonies, larger cobblestone cells characteristic of ExEndo (Brown, PLoS One, 5:e12016, 2010), and more projections of the cells along the colony borders. Thus, p38MAPK inhibition affected the stress-induced changes in morphology and appeared to enable stress-induced differentiation.

[0232] Inhibition of both MEK1 and MEK2 with U0126 also prevented Oct4 recovery (FIG. 20C), whereas inhibition of only MEK1 with PD98059 did not prevent Oct4 recovery (Table 4). When taken together with the U0126 results at 4 hr of hyperosmotic stress, this suggests that the unique U0126 target(s), putatively MEK2, plays a role in reserving pluripotency during adaptation to stress conditions after 4 hr. Similarly, PI3K signaling played a role in Nanog recovery during ongoing stress; its inhibition prevented Nanog recovery.

[0233] JNK-dependent signaling produced persistent suppression of Rex1 during 24 hr of hyperosmotic stress. In contrast to the p38MAPK-dependent effects on Oct4 and Nanog during 24 hr of hyperosmotic stress, p38MAPK signaling was not able to reverse Rex1 suppression, neither was PI3K signaling (FIG. 21A). Instead, JNK signaling suppressed Rex1 expression during 24 hr of hyperosmotic stress (FIG. 21A). To test whether the stress-induced suppression of Rex1 was reversible, mESCs were subjected to only 4 hr of hyperosmotic stress and then returned to iso-osmotic media. Rex1 expression at 24 hr recovered to baseline; this indicates that continued stress was required for persistent Rex1 suppression (FIG. 20B). The persistent suppression of Rex1 throughout the duration of stress stimulation suggests that at least a subpopulation of mESCs may be primed by stress for differentiation by maintaining chronic Rex1 loss as well as transient loss of Oct4, Nanog, and Sox2.

[0234] Discussion. In this Example, the level of hyperosmotic stress analyzed slowed mESC accumulation due to slowing of the cell cycle, not ongoing apoptosis. PI3K signaling was responsible for cell survival under these stress conditions. Stress initially triggered mESC differentiation through MEK1, JNK, and PI3K signaling, leading to proteasomal degradation of Oct4, Nanog, Sox2, and Rex1 proteins. Concurrent with this posttranscriptional effect were the stress-induced decreased levels of their mRNA transcripts. In addition to the increase in degradation of potency TF proteins and decrease in mRNA transcript levels reported here, suppression of new translation is also caused by the levels of hyperosmotic stress used here. Patel, Eur. J. Biochem., 269:3076, 2002. Simultaneous increases in protein degradation rates and decreases in synthesis rates enable rapid changes in the cellular “stemness” program. However, as stress at levels studied here continued beyond 4 h, cells adapted, cell cycle resumed, and Oct4 and Nanog mRNA and protein expression returned to near normal levels by 24 hr. The recovery of potency TF proteins was mediated by p38MAPK and PI3K signaling, as well as by that of an unknown MEK1/2 inhibitor target. Rex1 protein levels, however, did not recover; its persistent suppression was due to stress-induced JNK signaling. Table 7 summarizes the enzyme effects reported in this Example.

TABLE 7
Summary of enzyme effects on Oct4, Nanog, and Rex1 following
hyperosmotic stress in mESC monolayer culture.

| | Enzymes regulating initial | Enzymes regulating long-term |
|---|---|---|
| Transcription | stress responses; loss | adaptive stress |
| Factor | of TF expression at 4 hr. | responses at 24 hr. |
| Oct4 | Mek1 > Mek2 | p38MAPK (rescue of |
| | PI3K | expression) Mek2 (putatively) |
| Nanog | Mek1 > Mek2 | p38MAPK (rescue of |
| | JNK | expression) PI3K |
| Rex1 | Mek1 | JNK (ongoing suppression) |
| | | (no rescue enzyme identified) |

[0235] Stress-induced loss and regain of four potency TFs in mESCs by enzymes was characterized for the 1^{st} time in these studies. MEK1 mediated potency loss at the 4-h nadir of Oct4 and played a role in regain of Oct4, Nanog, and Rex1 from 4 to 24 hr. The mediator of regain of Oct4 by MEK1/2 is not clear. However, MEK1 is a weaker enzyme that blocks the stronger enzyme MEK2 in a heterodimer (Catalanotti, Nat. Struct. Mol. Biol., 16:294, 2009), and both MEK1 and MEK2 are expressed in TSCs/ESCs/blastocysts (Wang, supra) and should heterodimerize. One possible interpretation is that PD98059 suppresses MEK1 and reactivates MEK2 that reverses stress-induced Oct4 loss from 0 to 4 hr. U0126 inhibits both but importantly MEK2, blocking Oct4 recovery from 4 to 24 hr. It was hypothesized that MEK2 protects Oct4 from 0 to 4 hr unless MEK1 activity is dominant and reverses Oct4 loss from 4 to 24 hr if MEK2 activity becomes dominant (Table 7). Activity and chemical inhibitor data for MEK1 and MEK2 support this but further attempts to test this hypothesis using siRNA to MEK1 and MEK2 failed due to insufficient specificity of the knockdowns (data not shown).

[0236] JNK mediates both Nanog loss from 0 to 4 hr and continuing Rex1 loss between 4 and 24 hr. Both JNK-dependent effects would mediate predisposition toward endoderm, which is suppressed by Nanog (Frankenberg, supra; Hamazaki, J. Cell. Sci., 117:5681, 2004; Mitsui, Cell, 113:631, 2003), although Rex1 may mediate later ectoderm and specific subtypes of extraembryonic endoderm. Scotland supra; Masui, 2008. Interestingly, JNK prioritizes differentiation of TSCs stressed by hyperosmotic sorbitol, benzopyrene, or hypoxic O₂ below 2%, by inducing 1^{st} lineage (Xie, 2014; Awonuga, 2011; Abdallah, Fertil. Steril., 92(3):S136, 2009) and suppressing later lineages. Xie, 2014. JNK appears to mediate stress-induced endoderm, the 1^{st} lineage arising from ESCs.

[0237] In stressed ESCs, 1^{st}-lineage markers show that nutrient acquisition is a function associated with the increased expression of Lrp2 and Dab2 in the primitive endoderm. Lrp2 marks the earliest allocation of primitive endoderm in the E3.5 blastocyst and is accompanied by a suite of other proteins, such as cubilin and megalin (e.g., SEQ ID NO: 69), that are also expressed in the earliest ExEndo in the blastocyst and are part of lipid uptake mechanisms shared by many absorptive epithelia. Frum, supra; Maurer & Cooper, J. Cell. Sci., 118:5345, 2005; Assemat, Biol. Reprod., 72:1079, 2005; Smith, BMC Dev. Biol., 6:30, 2006; Drake, Anat. Rec. A Discov. Mol. Cell. Evol. Biol., 277:163, 2004. Dab2 arises during primitive endoderm lineage fixation at E4.5 and anchors the absorptive complex in the apical surface where it may function to feed the endoderm and adjacent ICM in the blastocyst or inner stem cells subjacent to the outer visceral endoderm of embryoid bodies. Frum, supra; Yang, J. Biol. Chem. 282:13114, 2007. Biochemical evidence and evidence from the 1^{st} peri-implantation-null lethals that were endoderm specific resulted in death of the overlying primitive ectoderm by E6.0 suggesting that the early endoderm feeds the embryonic ectoderm (reviewed in Rappolee, Mol. Reprod. Dev., 52:234, 1999). Thus, induction of both Lrp2 and Dab2 by stress suggests that a primary function of stress-induced differentiation is to provide function that becomes essential rapidly after blastocyst implantation. Hyperosmotic stress begins to induce this absorptive capability in mESCs in monolayers, similar to the induction by several stressors of the placental hormone PL1 from TSCs (Xie, 2014; Awonuga, 2011; Liu, supra; Rappolee, 2013) that increases nutritional supply to the fetal-maternal interface in vivo.

[0238] PI3K and p38MAPK protect potency after adaptation to stress, leading to recovery of Nanog/Rex1 and Nanog/Oct4 between 4 and 24 h, respectively (Table 6). Oct4 recovery may occur for several reasons. One is that a sufficient, successful stress response occurs during the 1^{st} 4 hr and allows substantial ESC proliferation and accumulation, and thus induction of full differentiation is not required to compensate for fewer cells. Alternately, the function of early stem cells is to retain potency and divide exponentially between days E4.0 and E11.0 (Embryogenesis in mammals. (1976). Elsevier, Amsterdam; New York; McLaren. Embryo growth during the immediate post implantation period. In Embryogenesis in mammals. (1976). Elsevier, Amsterdam; New York) so stress-induced differentiation of all cells would not be tolerated. A third hypothesis is that Oct4 function is required to mediate the ongoing stress response as established also for Oct1. Kang, Trends Biochem. Sci., 34:491, 2009; Kang, Genes Dev., 23:208, 2009; Tantin, Cancer Res., 65:10750, 2005; Riley, Dev. Biol., 284:377, 2005) If the function of transient Oct4 loss is to enable sufficient ExEndo differentiation, then this may have been accomplished and longer culture in monolayer of embryoid bodies would show that a larger subpopulation of these cells arises. The ESC survival effects corroborate previous studies for PI3K function in ESCs, TSCs, and embryos (Gross, supra; Riley, supra), but the role of mediating Oct4 loss from 0 to 4 hr is novel and unexpected.

[0239] As in the described Example, Mao, found that mESCs maintained a pluripotent phenotype during long-term exposure to hyperosmolarity, although proteins involved in both protein synthesis and degradation via the ubiquitin-proteasome system were decreased. Mao, J. Proteome Res., 7:3968, 2008. In many cell types, such as cardiomyocytes, hyperosmotic stress at these levels causes an 80% decrease in new translation within the 1^{st} 30 min. Patel Eur. J. Biochem., 269:3076, 2002. When stress decreases new translation and increases potency factor degradation, rapid, adaptive programmatic changes are possible.

[0240] The ubiquitin-proteasome system has been reported to have a role in the self-renewal and differentiation of both human and mouse ESCs (reviewed in Naujokat & Saric, Stem Cells, 25:2408, 2007). Inhibition of proteasomes decreased levels of four: Oct4, Sox2, Nanog, and Rex1 mRNAs (Vilchez, Nature, 489:304, 2012) and Oct4 and Nanog mRNAs in unstressed human ESCs and thus proteasome function is proposed to be part of potency maintenance. It is not clear from these studies or the Examples described here whether stress would increase proteasome-dependent protein destruction in human ESCs or proteasome-dependent increase in potency mRNA occurs in unstressed mouse ESCs, respectively. The activity of the 20S subunit of the proteasome is normally upregulated during mESC differentiation (Hernebring, Proc. Natl. Acad. Sci. USA, 103:7700, 2006); its suppression during hyperosmotic stress supports the finding that mESCs are not enabled to differentiate fully during extended hyperosmotic stress.

[0241] The reported half-life of Oct4 protein ranges from 1.5 to 8 hr. A half-life of 90 min has been reported for Oct4 protein in undifferentiated P19 (Sax, PLoS One, 4:e4467, 2009), 6-8 hr in NIH3T3-overexpressing Oct4 protein (Wei, J. Biol. Chem., 282:21551, 2007), 6.9 hr for Oct4 mRNA in mouse ESCs (Sharova, supra), and a few hours for Oct4 mRNA in differentiated cells undergoing reprogramming. Taranger, Mol. Biol. Cell, 16:5719, 2005. Oct4 is required to exclude Cdx2 in nonpolar inner cells of the blastocyst (Niwa, Cell, 123:917, 2005) and is required for FGF4 secretion that sustains adjacent trophectoderm (Arcuri, Mol. Cell. Endocrinol., 141:13, 1998; Ma, Dev. Biol., 154:45, 1992) and primitive endoderm cells in the three-dimensional (3D) blastocyst. Frum, supra; Frankenberg, supra; Cho, Development, 139:2866, 2012; Krawchuk, Dev. Biol., 384:65-71, 2013. However, Oct4 also plays a transient, cell-autonomous role in establishing primitive endoderm. Frum, supra. Importantly, Oct4 is a stress response factor that controls stem cell metabolism in mESCs in culture before and during stress (Kang, Trends Biochem. Sci., 34:491, 2009; Kang, Genes Dev., 23:208, 2009) and metabolism of cultured mouse embryos. Frum, supra. Thus, the cohort of potency TFs with Oct4 at its apex is dynamically poised under normal circumstances to regulate potency, allocation, stem cell metabolism, and stress responses.

[0242] Nanog has a half-life of 2 hr in human ESCs, and is controlled by proteasomal regulation via the PEST motif. Ramakrishna, Stem Cells Dev., 20:1511, 2011. In mESCs, a half-life of 5.2 hr has been reported for Nanog mRNA. Sharova, supra. Rex1 half-life has been reported to be from 30 min (Gontan, Nature, 485:386, 2012) to 2.2 hr (Sharova, supra) in mESCs (Gontan, supra). In mESC system, inhibition of the proteasome for 4 hr led to a 3-fold increase in Rex1 expression, suggesting a short half-life of this protein. The rapid turnover of Rex1 as compared with Oct4 and Nanog allows it to respond more quickly to changing conditions. That Rex1 was the only pluripotency marker that did not recover to normal expression levels during stress is unique, as it normally recovers quickly during fluctuations in expression. Toyooka, supra. This may be due to increased protein destruction, JNK-dependent silencing of the Rex1 promoter despite Oct4 (Boyer, supra), or JNK-dependent phosphorylation of Oct4 that decreases binding to the Rex1 promoter. These data suggest that the stressed mESC monolayer may act more like the epithelial embryonic ectoderm of E5.5 that has lost Rex1 since differentiating from the ICM, but still expresses Oct4, Nanog, and Sox2. During normal, unstressed mESC culture, subpopulations of both low-Rex1- and high-Rex1-expressing cells exist. Toyooka, supra. Low-Rex1-expressing cells have poor ability to differentiate into primitive endoderm, and predominantly differentiate to primitive ectoderm lineages. High-Rex1-expressing mESCs were pluripotent and, upon reinjection to embryos, they contributed to multilineage chimeras. Toyooka, supra. These populations were interconvertible during culture without added stress; low Rex1 expressors could revert back to high Rex1 expression regaining developmental potential, and vice versa.

[0243] In the current Example, hyperosmotic stress maintains low Rex1 expression in mESCs and suppresses interconversion back to high Rex1 expression. This result led to the expectation that the stressed mESCs would induce epiblast markers, such as FGF5, due to their inverse regulation. Pelton, J. Cell. Sci., 115:329, 2002. This did not prove to be the case, however, as epiblast was suppressed while primitive endoderm markers were induced. Rex1 expression is required for complete development of extraembryonic lineages. Rex1-negative mESCs were defective in some visceral endoderm markers although the major marker, α-feto protein (AFP), was expressed (Masui, 2008) and Rex1-/-F9 teratocarcinoma stem cells were only able to differentiate to parietal endoderm. Thompson & Gudas, Mol. Cell. Endocrinol., 195:119, 2002. The data suggest that Rex1 plays a role in directing lineages of endoderm differentiation in F9 cells but data should be interpreted cautiously as, unlike mESCs, AFP requires Rex1 expression and F9 cells may not emulate complex regulatory mechanisms of mESCs. In this Example, persistence of some Rex1 expression in stressed cells presumably allows mESC priming toward primitive endoderm. However, the persistent suppression of Rex1 expression raises the question of whether visceral endoderm downstream of primitive endoderm will be decreased in favor of parietal endoderm. Brown, supra.

[0244] In the current Example, JNK activation by continuous hyperosmotic stress suppressed Rex1 expression, but was not adequate to trigger outright differentiation of mESCs. JNK may not be activated long enough to irreversibly commit ESCs to differentiation, or there may be insufficient activation of other enzymes needed to complement JNK-induced differentiation, or insufficient 3D interactions may occur. Unlike TSCs, ESCs may require the 3D interactions available in embryoid bodies. However, it was not defined whether JNK directly decreased Rex1 protein or indirectly suppressed it during induction of differentiation. In each case of stress-induced differentiation of mESCs and TSCs, JNK was active within a pathway required to produce a new lineage, but in none of the cases was it capable of initiating differentiation on its own. JNK may work with other differentiation cues and enzymatic mechanisms. But during the stress response, the activation of multiple pathways with competing effects prevented outright or complete differentiation of large cell subpopulations. For example, JNK suppressed Rex1 expression during 24 hr of stress, while PI3K signaling was simultaneously maintaining Rex1, preventing total Rex1 protein loss. This additional signaling masked but did not negate JNK's action on Rex1. Of course if a single ESC lost the three potency TFs undergoing transient stress-induced loss, and the continuing loss of Rex1 for a long enough period, then it might differentiate irreversibly.

[0245] Finally, the stress-induced differentiation of TSCs occurred even in the presence of FGF4 signaling that sustains their multipotent state. Xie, 2014; Xie, 2013; Awonuga, 2011; Liu, supra; Zhou, 2011. Stress signaling was dominant over FGF4 signaling at doses where stem cell populations expanded, but at diminished rates. In the current Example, mESCs integrated stress-response signals with potentially competing signals from exogenous LIF and bone morphogenetic protein (BMP). The cytokine LIF promotes mESC self-renewal by activating the TF STAT3. BMPs are a serum component that induces expression of inhibitor of differentiation genes that block expression-lineage-specific TF function and facilitate the self-renewal response to LIF/STAT3. Ying, Cell, 115:281, 2003. In the described system, the integration of all these signals during hyperosmotic stress led to preservation of a pluripotent population; stress was not dominant in overt changes in mESC monolayers. However, in vivo the pluripotent ICM is a transient stage that stem cells move through to populate the lineages that will eventually make up the embryo and its support cells. LIF in the four-cell-stage embryo and interleukin-6 at the blastocyst stage are necessary to maintain phosphorylated STAT3 and Oct4 in order to maintain pluripotency in vivo. Do, Genes Dev., 27:1378, 2013. If stress occurred in an environment that was more characteristic of the nonepithelial ICM, one where differentiation was not repressed, then the stress activation of the differentiation program may proceed unimpeded. Thus, stress may drive preimplantation ICM to Ex-Endo but suppress other lineages that arise at gastrulation.

[0246] The data suggest that the period when stem cells 1^{st} allocate at E3.5, differentiate soon after, and mediate gastrulation at E6.5 is critical and can be affected critically by stress. The understanding of how stress enzymes mount successful adaptation to stress through regulation of potency and differentiation-mediating TFs during this critical period is of profound importance. The goal is to understand the mechanisms and thresholds between healthy, adaptive and unhealthy, maladaptive responses that are important in the general population but also during medical procedures such as in vitro fertilization that alleviate infertility.

### Example 3

[0247] The embryo undergoes stress in vivo and in vitro and this decreases developmental rates, stem cell growth rates and causes potency loss (Puscheck, Molecular Biology of the Stress Response in the Early Embryo and its Stem Cells. In: Cell Signalling During Mammalian Early Embryo Development. Henry Leese D B ed. Springer, 2015 (Puscheck, 2015, MB); Xie, 2011). ESCs respond to hyperosmotic stress with transient loss of Oct4 and long-term loss of Rex1 proteins in a proteasome-dependent manner and this correlates with induction of 1^{st} lineage and suppression of later lineages during stress (Example 2; Slater, Stem Cells Dev., 23:3049, 2014). Early embryos at the 2-cell and blastocyst-stage also undergo stress-induced potency loss as do placental trophoblast stem cells (TSCs) derived from the blastocyst (Xie, 2013; Zhou, 2011).

[0248] Oct4 and Rex1. Oct4 is a DNA-binding transcription factor that mediates stemness in gametes and early embryos and in pluripotent cells through the start of gastrulation (Pesce & Scholer, Mol. Reprod. Dev., 55:452, 2000). Oct4 null lethality occurs at the blastocyst stage when ICM lose pluripotency and fail to synthesize FGF4 (Nichols, Cell, 95:379, 1998) that maintains adjacent polar trophectoderm (Chai, 1998). Oct4 promoter methylation is diminished in oocytes undergoing in vitro maturation (IVM) (Milroy, Fertil. Steril., 95t:2094, 2011) and Oct4 expression is decreased in embryos derived from smoke-exposed mouse females (Huang, Fertil. Steril., 92:1456, 2009). Oct1 and Oct4 have been used to test for toxic stress in HTS of embryonic stem cells ESCs (Pal, J. Cell. Physiol., 226:1583, 2011) and both transcription factors have stress domains that prepare stem cells for stress and are phosphorylated and regulate the stress response (Kang, Genes Dev., 23:208, 2009). Rex1 is also a transcriptional factor that is lost from ICM as they differentiate to either extra-embryonic primitive endoderm or embryonic primitive ectoderm fates (Toyooka, supra) but its null is not lethal at the blastocyst stage and it is not required to initiate and maintain pluripotency of ESCs (Rezende, Dev. Biol., 356:370, 2011). Taken together the data suggest that Rex1-driven reporters should be more useful than Oct4-driven reporters to create HTSs for toxicants or other stressful stimuli that negatively affect embryo and stem cell stemness and differentiation, thus depleting stem cells and imbalancing differentiation.

[0249] In order to produce modified reporter mESCs without the stress of electroporation or cationic lipids, lentivirus infection can be used (Kaufman, Theriogenology, 82:1043, 2014) and in place of antibiotic selection ESCs are passaged in the normal manner but fluorescence activated cell sorted (FACS) to select stem cells reporting pluripotency. This creates viable potency reporter ESC lines with normal growth rates and without cell loss during infection and selection. These mESCs also report potency factor activity loss using 1) visual microscopic inspection, 2) microplate readers, 3) FACS, and 4) immunoblots. The assays provide similar results as in Example 2. The analysis by flow cytometry also provides important new information on the size of the bright (potent) subpopulation that goes to zero potency and the microplate gives a platform of high throughput analysis of toxicants or other potential stressors that may induce potency loss and for performing high throughput screens to further elucidate the mechanisms of potency loss.

[0250] Materials. Germline competent mESC-D3 cells were purchased from ATCC (Manassas, VA). DMEM medium was from HyClone (Logan, UT). Gibco™ glutamine and sodium pyruvate supplement solutions were from Life Technologies (Grand Island, NY). ESC-qualified EmbryoMax fetal bovine serum, 0.1% gelatin solution and ESGRO™ Mouse LIF medium supplement were from EMD Millipore (Billerica, MA). Oct4 promoter reporter lentiviral particles that express the green fluorescent protein copGFP and TranDux™ transduction reagent were from System Biosciences (Mountain View, CA). Rex1 promoter reporter lentiviral particles that express the red fluorescent protein mApple were from Allele Biotechnology (San Diego, CA). Rabbit anti-Rex1 antibody was from Abcam (Cambridge, MA). Rabbit anti-cleaved caspase 3 antibody, Rabbit anti-β-actin antibody and HRP-conjugated second antibodies were from Cell Signaling Technology (Danvers, MA). Pierce RIPA lysis buffer, protease inhibitor cocktail and BCA protein assay reagents were from Thermo Scientific (Rockford, IL). ECL chemiluminescence reagent was from GE Healthcare Bio-Sciences (Pittsburgh, PA). MEM non-essential amino acid solution, sorbitol, 2-mercaptoethanol and other chemicals were from Sigma (St. Louis, MO).

[0251] Low stress production of single and double viable potency activity reporter mouse ESCs. mESCs were cultured in 24-well plates pre-coated with 0.1% gelatin. The starting confluence of cells was 20% or 100,000 cells/well. The cells were incubated in 37° C. for 2-3 hr for attachment and readiness for virus infection. Virus infection medium was made by mixing Oct4 and/or Rex1 promoter reporter lentiviral particles into regular growth medium supplemented with TransDux. The final concentration of the viral particles was 10⁶/ml. The infection medium was applied to mESCs at 400 μl per well. After infection, the cells were cultured for 3 days to allow the expression of the fluorescent reporter proteins. After expansion of the total cell number by passaging, the infected cells were subjected to flow cytometry sorting using BD FACS Vantage SE cell sorter (BD Biosciences, San Jose, CA) at the Wayne State University Microscopy, Imaging and Cytometry Resources (MICR) core facility. Pure, fluorescent cells were obtained after two FACS repeats. But, as indicated in FIGS. 25A and 25B and as previously reported by Toyooka and colleagues Toyooka, supra) heterogeneity reestablishes after sorting and culture and normally a small population becomes Rex1 dim.

[0252] mESC culture and stimulation. Germline competent mESC-D3 cells (ATCC, Manassas, VA, (Doetschman, J. of Embryology and Experimental Morphology, 87:27, 1985)) were cultured in the absence of feeder cells in DMEM (Gibco, Grand Island, NY) supplemented with 15% mESC-screened fetal bovine serum (HyClone, Logan, UT), 2 mM L-glutamine, 1 mM sodium pyruvate, 1 mM nonessential amino acids, 0.1 mM 2-mercaptoethanol (Sigma, St. Louis, MO), and 1000 U/mL murine leukemia inhibitory factor (LIF; Millipore, Temecula, CA) on 0.1% gelatin-coated dishes at 37° C. in humidified air with 5% CO₂ (Masui, 2008). mESCs were cultured overnight after passaging before stimulation with sorbitol. Osmolality of ESC media with and without added 200 mM sorbitol was determined as in Example 2.

[0253] Fluorescence determination by plate reader of pluripotency reporters. mESCs that stably express Oct4-copGFP and/or Rex1-mApple promoter reporters were plated on 96-well plates at a starting confluence of 5%. Four identical plates were made for the time course study. Cells were grown for 24 hr in incubator till 10% confluence was reached; an addition of stimuli was designated time zero. The cells were stressed for a time period selected from 1, 2, or 3 days. At each time point, the medium was removed and the cells were rinsed with D-PBS. At 50 μl/well, ESCs were measured for fluorescence using the Synergy H1 microplate reader (BioTek, Winooski, VT). The excitation and detection wavelengths for Oct4-copGFP were 485 nm and 528 nm, respectively. The excitation and detection wavelengths for Rex1-mApple were 568 nm and 611 nm, respectively. After live-cell reading, the cells were lysed with 50 μL of lysis buffer (1% NP-40, 0.5% TX-100, 100 mM NaCl, 2 mM EDTA, 50 mM Tris-HCl, and pH 7.5) and measured for fluorescence with the same parameters above. After fluorescence determination, the cell lysates were further measured for total protein concentrations by adding 100 μl of Pierce BCA protein assay reagent (Thermo Scientific Inc.) following the manufacturer's instructions. Finally, the fluorescence readings from either live-cells or lysates were normalized to total protein concentration readings, in which higher readings represent higher pluripotency of the cells.

[0254] Flow cytometric analysis of mESCs expressing pluripotency reporters. Fluorescence determination by the plate reader reported an averaged biochemical result from a population of cells inside the tissue culture vessel. In order to get insight into the heterogenic nature of the cells that respond to the same stress condition, a flow cytometry assay that provides quantification of cells that show different levels of pluripotency under stress was used. mESCs expressing potency reporter Oct4-CopGFP or Rex1-mApple were plated at a starting confluence of 10% and grown for 24 hr until reaching 25% confluence. This time point was designated as time zero. The cells were then treated with different sorbitol concentrations for 1-3 days. At each time point, cells were trypsinized and re-suspended in ice-cold D-PBS for flow cytometry assay using an LSR Fortessa flow cytometer (BD biosciences) and the FACS Diva Software version 7.0 (BD biosciences). Non-stressed mESCs that express Oct4-copGFP and/or Rex1-mApple and the non-modified, parental mESCs were used to set up the parameters that define the fluorescent cells and non-fluorescent cells.

[0255] From the histogram of FACS, two peaks are seen. The right peak represents the bright fluorescent potent ESCs. The left peak represents the dim fluorescent non-potent ESCs. An arbitrary vertical line is drawn here at the 5×10³ position on the PE-A axis to separate the low potency ESCs. The peak areas were calculated using Image J by counting the area pixels.

[0256] Immunoblot. After treatment, the ESCs were rinsed with PBS, lysed with RIPA buffer supplemented with protease inhibitors and sonicated briefly. Total protein concentration was determined using Pierce BCA protein assay reagent admixed with Laemmli sample buffer, and boiled for 5 min. Equal total protein amounts from the lysates were size-fractionated by 5-20% gradient SDS-PAGE and transferred onto nitrocellulose membrane. Rex1 immunofluorescent signals were detected using ECL reagent with X-ray films and quantified using ImageJ 1.48v software (NIH, USA).

[0257] Statistics. Data collected over at least, three independent experiments were analyzed using SPSS Version 22.0 and presented as means±SEM. Data distributions met the assumptions of independent t-test and one-way ANOVA. Dunnett's post hoc test was performed following significant ANOVA test. For FIGS. 23A and 23B, Independent t-tests were performed to examine the difference between control and treatment for Oct and Rex. Significance was detected for Rex (p=0.019) but not for Oct. For FIG. 24, One-way ANOVA was performed followed by Dunnett's post hoc test using 0 mM as reference. All treatments were different from the control (highlighted p-value in excel). For FIGS. 25 and 26, One-way ANOVA was performed followed by Dunnett's post hoc test using 0 mM as reference for parental dim, intermediate dim, and bright separately. Differences were detected for parental dim and bright groups, but not for intermediate dim (highlighted p-value in excel). For FIG. 27: One-way ANOVA was performed followed by Dunnett's post hoc test using 0 mM as reference. Differences between treatments and/or groups were considered insignificant if p≥0.05 and significant if p<0.05.

[0258] Results. It was previously shown that Oct4, Sox2, and Nanog transcription factor protein underwent stress-induced transient loss at 4 hr, rebounding to baseline pre-stressed condition by 24 hr and later. However, Rex1 protein loss due to stress is not transient but chronic. Here Rex1-RFP ESCs were developed and their kinetic and dose-dependent responses to stress were tested. To create the Rex1-RFP vector, and compare it with Oct4-GFP activity in response to stress, ESCs were infected with lentivirus with either single vector or both vectors (FIG. 22A, 22B, 22C). Note that single infected cells were red for Rex1-RFP or Oct4-GFP, but expression of both produced yellow emissions (FIG. 22C). This was done with no cell loss in comparison with huge cell death using either electroporation or cationic lipids. In a second step modified ESCs, were trypsinized as for a normal passage, and a fluorescence-activated cell sorter (FACS) was used to purify Rex1-RFP (FIG. 22D), Oct4-GFP (FIG. 22E), and dual Rex1-RFP/Oct4-GFP expressing ESCs (FIG. 22F). To test for the stress response of these three modified ESCs they were incubated for 3 days with LIF and with or without 200 mM sorbitol, the sub-morbid dose that created a strong Rex1 protein loss as in Example 2. Oct4-GFP fluorescence intensity was similar without (FIG. 22G) or with (FIG. 22J) stress, but Rex1-RFP fluorescence was clearly higher without stress (FIG. 22H) than with stress (FIG. 22K). In corroboration, -d culture of Rex1-RFP/Oct4-GFP dual expressing cells were not affected by culture without stress (FIG. 22I), but stress decreased Rex1-RFP, removing red from yellow and re-exposing green fluorescence from Oct4-GFP (FIG. 22L). Thus, the visual data suggest that Rex1-RFP activity reporter is decreased in viable ESCs after 3 days of hyperosmotic stress.

[0259] The amount of stress-induced loss of Rex1-RFP or Oct4-GFP was next quantitated using a microplate reader. It was found that stress mediated by 200 mM sorbitol, despite the presence of LIF, induces a significant loss of Rex1-RFP but not Oct4-GFP (FIGS. 23A, 23B). This is in general agreement with the loss of Rex1 protein but not Oct4 protein after 24 hr of stress. However, the loss of Rex1 protein is greater than the loss of Rex1 activity detected by the multimerized Rex1 response elements driving RFP fluorescence assay in the microplate reader.

[0260] In the test of Oct4-GFP and Rex1-RFP reporter ESCs 200 mM sorbitol was used as described in Example 2. However, higher doses of sorbitol created increasing potency loss and toxicity. To test for higher dose-dependent stress, increases were used in increments of 25 mM from 200-300 mM sorbitol for three days in ESC culture with LIF present. A dose-dependent increased Rex1-RFP loss was found in triplicate biological experiments in which stress was dominant to Rex1 activity as measured by the microplate reader (FIG. 24). Although Rex1-RFP activity was less at 200 mM sorbitol, by 300 mM the 60% loss of Rex1 activity measured here was as high as the Rex1 protein loss reported previously and in FIG. 27.

[0261] To further define the nature of the response of ESCs to hyperosmotic stress, changes in the potency of ESC subpopulations using flow cytometry were tested. It was found that there was an increase in the dim subpopulation that was at 10² arbitrary intensity units, the level of fluorescence of non-modified parental ESCs (FIGS. 25A & 25B, FIGS. 26A & 26B). Unstressed ESCs had 8.6+/−1.0% dim cells but this increased to 24.4+/−2.9% by 300 mM sorbitol, despite the presence of LIF. In contrast 83.3+/−3.9% of unstressed cells were in the bright group (near 10⁴ arbitrary intensity units), but this decreased to 61.8+/−3.7% at 300 mM. There was a small increase in intermediate dim cells, from 10.7+/−1.2% to 13.8+/−2.1%. The 60% decrease in Rex1-RFP from 0 to 300 mM sorbitol determined by microplate reader in FIG. 24 is matched by a total change toward intensity decrease of 40.4% of cells; 3.1% increase in intermediate dim ESCs, 15.8% increase in parental dim ESCs, and decrease of 21.5% in the bright group (FIGS. 25A & 25B, FIGS. 26A & 26B). The additional decrease in brightness determined by microplate reader compared with subpopulation change producing decreased brightness may be a result of increased changes in brightness/cell.

[0262] Finally it was tested whether endogenous Rex1 protein levels decreased commensurately with decreases in Rex1-RFP activity levels assayed in FIG. 24. Rex1-RFP ESCs were cultured for 3 days with 0-300 mM sorbitol and assayed by immunoblot for endogenous Rex1 levels normalized to ACTB loading controls and with time zero unstressed Rex1 set to 100 as a baseline level. Whereas stress-induced decrease in Rex1 activity in FIG. 24 were 20% and 70% at 200 mM and 300 mM sorbitol, respectively endogenous Rex1 protein losses were 30% and 70% at 200 mM and 300 mM, respectively (FIG. 27). Through the series from 200 mM to 300 mM sorbitol there was generally good agreement between activity level and endogenous protein level for Rex1 at 3 days of stress and with Rex1 protein loss at 1 day (Example 2). To correlate stress-induced Rex1 potency loss with stress-induced diminished cell growth rates, cell counts were performed at time zero and at 3 days over the same sorbitol dose range as in FIG. 27 and FIG. 24 and FIGS. 26A & 26B. As in the past, potency loss was directly proportional to diminished growth, suggesting that the differentiation enabled by potency loss would compensate for fewer cells. Stress-diminished cell counts were also multiplied by stress-increased subpopulations of intermediate dull and parental dull stem cells that had loss potency and for several doses from 200-250 mM sorbitol the product, which equaled total numbers of cells which lost potency, was constant (Table 8, doses from 200, 225, 250 have constant numbers of cells with lost Rex1-RFP; see Brief Description of the Figures for Table 8).

[0263] Interestingly, in the 200-250 mM sorbitol range cell doubling rates decreased but in a lineage range between 34.1-39.3 hr, but total numbers of intermediate+parental dim potency loss cells decrease at 275-300 mM where doubling rates fell off to 51.4-103.4 hr. This is also predicted by the theory of stress-induced compensatory differentiation (Puscheck, 2015, MB; Xie, 2014). Taken together, dose-dependent stress effects on cell growth rates, Rex1 endogenous protein levels, decreases in Rex1 active subpopulation and increases in Rex1 low activity subpopulations suggest that stress induces potency loss in a coherent manner.

[0264] The goals of this Example were to 1) test whether four lines of evidence show consistent outcomes for potency factor activity reporter ESCs and biochemical data for stress-induced potency loss, 2) validate these reporter ESCs for use in HTS for toxicology, and 3) to further test the theory of stress-induced compensatory differentiation of stem cells.

[0265] The 4 lines of evidence confirm that Rex1-RFP potency activity reporter ESCs show consistency between micrographic analysis, biochemical averages from immunoblots and microplate reader, and subpopulation studies using flow cytometry. Endogenous Rex1 protein levels are consistent with Rex1-RFP activity levels measured in the same cells under the same stress exposures.

[0266] Rex1-RFP is a sensitive stress reporter and will enable an HTS for developmental toxicology of manufactured compounds, environmental pollutants, new Pharma and cosmetics and fluid collected during IVF ART protocols. These include follicular, vaginal, uterine, amniotic fluids and spent media. Hyperosmotic stress, which is a “gold standard” for discovery and characterization of stress enzymes (Xie, 2011), was used in this Example. There is also an exemplar set of toxicants used for the only government-validated ESC toxicology assay (Genschow, European Centre for the Validation of Alternative Methods. Altern Lab Anim, 30:151, 2002), and these will be used to further test the validity of the Rex1-RFP HTS. Similar results are expected; more particularly, however, similar in “shape” of the dose response curve. Because Genschow used an ESC cytotoxicity outcome which requires high doses, the compensatory differentiation assay should be more sensitive in that differentiation is induced at lower doses than cytotoxicity.

[0267] The theory of stress-induced compensatory differentiation (Xie, 2011; Puscheck, 2015, MB; Rappolee, Syst. Biol. Reprod. Med., 56:168, 2010) states that stress 1^{st} diminishes normal stem cell population expansion and then compensates for fewer stem cells by differentiating more of the remaining stem cells to produce essential 1^{st} lineage differentiated function. This occurs despite the presence of growth factors that would normally maintain proliferation and potency and thus stress destroys potency. There are three lines of evidence for the theory. One is that dose-dependent stress diminishes stem cell growth and that was observed previously in ESCs (Example 2) and TSCs (Zhou, 2011; Puscheck, 2015, MB; Xie, 2014; Awonuga, 2011; Zhong, 2010; Xie, 2010; Abdallah, Fertility and Sterility, 92(3):S136, 2009) and here. A second, previously-established line of evidence is that stress induces increases in stress enzymes proportional to average decreases in potency factors and increases in differentiation factors in biochemical assays such as immunoblots and qPCR. A third prediction is that there is a putative subpopulation of stem cells that decreases potency and increases differentiation. Because the modeled stressed embryo is under duress, this prediction includes the stipulation that the subpopulation cell number should be constant; a minimal size but not larger.

[0268] The stress dose-dependent cell number of low potency cells can be determined by multiplying the fractional subpopulation size of cells with potency loss, which increases with stress and the decreasing cell numbers with increasing stress. This was done in Table 8 and compared with a previously published Venn diagram for compensatory differentiation (Puscheck, 2015, MB; Rappolee, 2013), modified to produce FIG. 28. In the stress-dose range where population size decreases, but increasing doubling rate is in a manageable range, the absolute size of the subpopulation of potency loss (intermediate and very low dim cells) is remarkably the same. At stress doses where very large doubling rate increases occur the subpopulation number with potency loss decreases, probably due to stem cell morbidity at these higher hyperosmotic stress levels (Example 2). Thus all three lines of evidence summarized here are consistent with the theory, but with limitations.

[0269] A Pdgfra-GFP ESC line can be tested for stress effects on differentiation of the 1^{st} lineage ESC-derived extra-embryonic endoderm that this line reports (Artus, Development, 137:3361, 2010). This will provide an even more direct test of stress-induced differentiation and the regulation and number of cells in the subpopulation undergoing stress dose-dependent potency loss and differentiation increase. Without being bound by theory, it is hypothesized that Pdgfra-GFP cells will derive primarily from the parental dim subpopulation of Rex1-RFP cells, but differentiated cells may arise from the intermediate dim or even bright groups of Rex1-RFP cells, but at lower frequencies.

[0270] It should be noted that a recent high impact paper claimed that a three-step stress regimen induces potency during reprogramming of adult differentiated cells (Obokata, Nature, 505:641, 2014) however this report was retracted (Obokata, Nature, 511:112, 2014). Many stresses were used (Xie, 2011); Puscheck, 2015, MB) and others have also shown (Soares, Trends Endocrinol. Metab., 18:114, 2007) that stress can induce differentiation in placental and embryonic stem cells TSCs and ESCs of the early rodent embryo. The modified stem cells (e.g., Rex1-RFP and Pdgfra-GFP potency and 1^{st} differentiated lineage ESC)) and their use in HTSs will be invaluable in rapidly compiling quantitative data on stress-induced differentiation from large sets of stressors of interest to toxicologists and reproductive scientists.

[0271] Any embodiment (e.g., modified stem cells, assays, HTSs) can be used in combination with any of the following markers of interest for pregnancy outcome including Cofillin (NM_005507), DIAPH1 (NM_001079812, NM_005219), ECT2 (NM_018098), MYLC2/MYL5 (NM_002477), DGCR8 (NM_022720), Dicer/DICER1 (NM_030621, NM_177438), TARBP2 (NM_004178, NM_134323, NM_134324), CPEB1 (NM_001079533, NM_001079534, NM_001079535, NM_030594), Symplekin/SYMPK (NM_004819), YBX2 (NM_015982), ZAR1 (NM_175619), CTNNB1 (NM_001098209, NM_001098210, NM_001098210, NM_001904), DNMT3B (NM_006892, NM_175848, NM_175849, NM_175850), TERT (NM_198253, NM_198255), YY1 (NM_003403), IFGR2/IFNGR2 (NM_005534), BTF3 (NM_001037637, NM_001207), and NELF (NM_001130969, NM_001130970, NM_001130971, NM_015537).

[0272] As will be understood by one of ordinary skill in the art, each embodiment disclosed herein can comprise, consist essentially of or consist of its particular stated element, step, ingredient or component. Thus, the terms “include” or “including” should be interpreted to recite: “comprise, consist of, or consist essentially of.” As used herein, the transition term “comprise” or “comprises” means includes, but is not limited to, and allows for the inclusion of unspecified elements, steps, ingredients, or components, even in major amounts. The transitional phrase “consisting of” excludes any element, step, ingredient or component not specified. The transition phrase “consisting essentially of” limits the scope of the embodiment to the specified elements, steps, ingredients or components and to those that do not materially affect the embodiment. As used herein, a material effect would cause a statistically-significant reduction in the ability of a method to detect stress in a stem cell.

[0273] Unless otherwise indicated, all numbers expressing quantities of ingredients, properties such as molecular weight, reaction conditions, and so forth used in the specification and claims are to be understood as being modified in all instances by the term “about.” Thus, unless indicated to the contrary, the numerical parameters set forth in the specification and attached claims are approximations that may vary depending upon the desired properties sought to be obtained by the present invention. At the very least, and not as an attempt to limit the application of the doctrine of equivalents to the scope of the claims, each numerical parameter should at least be construed in light of the number of reported significant digits and by applying ordinary rounding techniques. When further clarity is required, the term “about” has the meaning reasonably ascribed to it by a person skilled in the art when used in conjunction with a stated numerical value or range, i.e. denoting somewhat more or somewhat less than the stated value or range, to within a range of ±20% of the stated value; ±19% of the stated value; ±18% of the stated value; ±17% of the stated value; ±16% of the stated value; ±15% of the stated value; ±14% of the stated value; ±13% of the stated value; ±12% of the stated value; ±11% of the stated value; ±10% of the stated value; ±9% of the stated value; ±8% of the stated value; ±7% of the stated value; ±6% of the stated value; ±5% of the stated value; ±4% of the stated value; ±3% of the stated value; ±2% of the stated value; or ±1% of the stated value.

[0274] Notwithstanding that the numerical ranges and parameters setting forth the broad scope of the invention are approximations, the numerical values set forth in the specific examples are reported as precisely as possible. Any numerical value, however, inherently contains certain errors necessarily resulting from the standard deviation found in their respective testing measurements.

[0275] The terms “a,” “an,” “the” and similar referents used in the context of describing the invention (especially in the context of the following claims) are to be construed to cover both the singular and the plural, unless otherwise indicated herein or clearly contradicted by context. Recitation of ranges of values herein is merely intended to serve as a shorthand method of referring individually to each separate value falling within the range. Unless otherwise indicated herein, each individual value is incorporated into the specification as if it were individually recited herein. All methods described herein can be performed in any suitable order unless otherwise indicated herein or otherwise clearly contradicted by context. The use of any and all examples, or exemplary language (e.g., “such as”) provided herein is intended merely to better illuminate the invention and does not pose a limitation on the scope of the invention otherwise claimed. No language in the specification should be construed as indicating any non-claimed element essential to the practice of the invention.

[0276] Groupings of alternative elements or embodiments of the invention disclosed herein are not to be construed as limitations. Each group member may be referred to and claimed individually or in any combination with other members of the group or other elements found herein. It is anticipated that one or more members of a group may be included in, or deleted from, a group for reasons of convenience and/or patentability. When any such inclusion or deletion occurs, the specification is deemed to contain the group as modified thus fulfilling the written description of all Markush groups used in the appended claims.

[0277] CE of this invention are described herein, including the best mode known to the inventors for carrying out the invention. Of course, variations on these described embodiments will become apparent to those of ordinary skill in the art upon reading the foregoing description. The inventor expects skilled artisans to employ such variations as appropriate, and the inventors intend for the invention to be practiced otherwise than specifically described herein. Thus, this invention includes all modifications and equivalents of the subject matter recited in the claims appended hereto as permitted by applicable law. Moreover, any combination of the above-described elements in all possible variations thereof is encompassed by the invention unless otherwise indicated herein or otherwise clearly contradicted by context.

[0278] Furthermore, numerous references have been made to patents, printed publications, journal articles and other written text throughout this specification (referenced materials herein). Each of the referenced materials are individually incorporated herein by reference in their entirety for their referenced teaching.

[0279] In closing, it is to be understood that the embodiments of the invention disclosed herein are illustrative of the principles of the present invention. Other modifications that may be employed are within the scope of the invention. Thus, by way of example, but not of limitation, alternative configurations of the present invention may be utilized in accordance with the teachings herein. Thus, the present invention is not limited to that precisely as shown and described.

[0280] The particulars shown herein are by way of example and for purposes of illustrative discussion of the preferred embodiments of the present invention only and are presented in the cause of providing what is believed to be the most useful and readily understood description of the principles and conceptual aspects of various embodiments of the invention. In this regard, no attempt is made to show structural details of the invention in more detail than is necessary for the fundamental understanding of the invention, the description taken with the drawings and/or examples making apparent to those skilled in the art how the several forms of the invention may be embodied in practice.

[0281] Definitions and explanations used in the present disclosure are meant and intended to be controlling in any future construction unless clearly and unambiguously modified in the examples or when application of the meaning renders any construction meaningless or essentially meaningless. In cases where the construction of the term would render it meaningless or essentially meaningless, the definition should be taken from Webster's Dictionary, 3^{rd} Edition or a dictionary known to those of ordinary skill in the art, such as the Oxford Dictionary of Biochemistry and Molecular Biology (Ed. Anthony Smith, Oxford University Press, Oxford, (2004)).

The application's sequence listing, which the Patent Office published only in electronic form, follows.

SEQUENCE LISTING (136 sequences)

SEQ ID NO: 1 - DNA, 4108 bp, Homo sapiens
  source 1..4108: mol_type = genomic DNA
ccggccgtctatgctccaggccctctcctcgcggtgccggtgaacccgccagccgccccgatgtacagcatgatgatggagaccgacctgcactcgcccggcggcgcccaggcccccacgaacctctcgggccccgccggggcgggcggcggcgggggcggaggcgggggcggcggcggcggcgggggcgccaaggccaaccaggaccgggtcaaacggcccatgaacgccttcatggtgtggtcccgcgggcagcggcgcaagatggcccaggagaaccccaagatgcacaactcggagatcagcaagcgcctgggggccgagtggaaggtcatgtccgaggccgagaagcggccgttcatcgacgaggccaagcggctgcgcgcgctgcacatgaaggagcacccggattacaagtaccggccgcgccgcaagaccaagacgctgctcaagaaggacaagtactcgctggccggcgggctcctggcggccggcgcgggtggcggcggcgcggctgtggccatgggcgtgggcgtgggcgtgggcgcggcggccgtgggccagcgcctggagagcccaggcggcgcggcgggcggcggctacgcgcacgtcaacggctgggccaacggcgcctaccccggctcggtggcggcggcggcggcggccgcggccatgatgcaggaggcgcagctggcctacgggcagcacccgggcgcgggcggcgcgcacccgcacgcgcaccccgcgcacccgcacccgcaccacccgcacgcgcacccgcacaacccgcagcccatgcaccgctacgacatgggcgcgctgcagtacagccccatctccaactcgcagggctacatgagcgcgtcgccctcgggctacggcggcctcccctacggcgccgcggccgccgccgccgccgctgcgggcggcgcgcaccagaactcggccgtggcggcggcggcggcggcggcggccgcgtcgtcgggcgccctgggcgcgctgggctctctggtgaagtcggagcccagcggcagcccgcccgccccagcgcactcgcgggcgccgtgccccggggacctgcgcgagatgatcagcatgtacttgcccgccggcgaggggggcgacccggcggcggcagcagcggccgcggcgcagagccggctgcactcgctgccgcagcactaccagggcgcgggcgcgggcgtgaacggcacggtgcccctgacgcacatctagcgccttcgggacgccggggactctgcggcggcgacccacgagctcgcggcccgcgcccggctcccgccccgccccggcgcggcgtggcttttgtacagacgttcccacattcttgtcaaaaggaaaatactggagacgaacgccgggtgacgcgtgtcccccactcaccttccccggagaccctggcgaccgccgggcgctgacaccagacttgggttttagactgaacttcggtgttttcttgagactttttgtacagtatttatcacctacggaggaagcggaaagcgttttctttgctcgaggggacaaaaaagtcaaaacgaggcgagaggcgaagcccacttttgtataccggccggcgcgctcactttcctccgcgttgcttccggacggcgccgaccgccggagcccaagtgacgcggagctcgtcgcatttgttataaatgtagtaaggcaggtccaagcacttacaagttttttgtagttgttaccgctcttttgggttggtttgttaatttatacaaagagattaccaccaccaccccctccttcagacggcggagttatattctgggttttgtaaaactttatgtatctgagcatttccatttttttttttgggttttgtattatttcttgtaaatgcattgtgaaaaattttattttcggcgttgcaatgcggggaggagaagtcagattatgtacatagttttctaaaaagcctttcttctaaaaacgaaaaaagaccccccacccaaaatgtttcgagtcaacaaatttaagagacagagcccattttctccataaatttgtaacatgctatttttatgtgcatgttttatgagttcaaaatgcaatgaggaaatctgacagggaaattatctgtatgaactaaaagtaagggaaccccggggaatgggaggacaggatttttcaaggaacctttttcaatgaaagagaaggaagttaaaacctataggttattttgtagagctgagtgttaatacgggccgagaaataaaagtatcttctgctccggctgtttcactgcggacggctggggctgctgcgcgttaccttgctgcaagcggggcgccttccacctggctgggggtctgcgccacagtttggtccagaggagggaggaggaagggaagaccccagtggtgggaccctggaccaggccatggatgaaggacaaagaccagggcaggtcacgggtttcccaattccccagcaattaagatttcgagcagaatttatctaaatgtgtttcaaggaaacacaatcgctgaaccaaaacgtactgcagccgagccccctccgtccatcctctgcccctccccctggcttctttctcttgggaaaacgggcaaaataattgtgctggattctcacacacacagaaatatcgaccatcaccctcccccgcgtgaactgggatgcaagttgctaaccgatgtgaacgcaaaatgccttgttcattattcctgacgagatcttgaggttgtttgatgctttaaattttttaattatattattttctaggtgtttattggtacattgcagttttttttttgaaatttaaaaatttctgtaaaactttgtcttcaagtaatctgacagcattaaatattgcatttaaaaattatactgtagcaaatacatttaaaaattaatcacaacgttaagatgaaattatatttttggaaaaaaaaaacacttgaagcccagatggaaatacgtttatttcagcagccttaggtttcccctcgctttctcaacacccttccttgtcctggagtatggactgtccgtccaaaagtgagcctatgctataagtttaatgagaaccgaattcagcctgcattcgagaatagctttaagtataatgctgatctgacaattgacgtgtaatttgggaagtcattttgataattttgcttaaaccactcattcgttaaagtgattacaaaaaagttcaagaatgatgtccactgctttctaacaagataataaaccccccccctcttttctttttctttatttttatttcttttagctatttgatcctttctgaagcagttgtttctggaagagtctgtgcgcccatggatggctgagcaccactacgacttagtccgggataagggcctccccagtcctctccgggagatgatttgggaaattttataatgcttgttctgttaactcaccgggaccttgagggtccaatgggaccttgagggttttctctgaaatatacaaacttaaaggactctctctgaggttctttgactgacgtccactctcagtctggcccctgtgctcccctgtgtgtaccctggagtttctgtgtccaattgttggcatctaggtcttggctcaagattaggatgtgggccccactttagaggcacagactatgaaaagctgagttagtgcgcccgggacgccaggcaagcagcttttacagtttggcatcttattgcaggtgcttcgtgcacagtcagctgaaatagccaatgccaggtgctccaaccaccttatttccttgttttgttgattagaacaacacagaaaaaagcaaatataaatttttaatgactccatttaaaaatatcacagggtgggggcaaggaaattagctgagattcatctcaggattgagattctatccccccttccccgcccccagcagtgtcgctccaattcaaattagtggagaaaagattacagtaggccctgagccgactgtgaattcggtgcttggccaaggtaacactcatcgtattcacggagtgaaatactatatgatgatagttattatattatatgacgacttcattcacttcccaaatcacagggt

SEQ ID NO: 2 - DNA, 45872 bp, Pan troglodytes
  source 1..45872: mol_type = genomic DNA
gggggggaagaaatgttttgtgggtttagaagggaaggggggtcccgggtggaccaaaaaaggatggaagctggtgaaataggggtgcggggggataagcacccaggggggatgagattcaggcgtgagccaccacacccggccggggataaataaatactacttgatcaatatgtgttatcttttcatgaactgttaactttggctagctaatattttatttaggactattgcacttacatgtataagtgaaatgggtttatggctttcttatctagtttgagaatcaagattatatagctgtataaaattagctaggcaactgggcagcttttcttttgttcttttttattcattttctgaagcaattaatacaaaataggtattatctcacaaaaaatggtatgtgaggtaatacatatgttaattggcatgatttaactattccacaatgtaaacatattttaaaacatgttgtacataattatatataattttatttgccaattttaataaagaaataaaataagatacataccatcaaactcttgaaagttttgtaaaattccactggaaaactctgtaagctaggggctttttggtggggaggttatagcttctttttcttcagttattattttatatactgctgtaccttacaaaattaggatgatgtgaatgcataaaccatgcagaaagttacatacacatacatacacacctacacacaccccttttagaaaccagagaagaggccaggtgtggtggctcatgcctgtaatcccagcactttgggaggttgaggcgggcagatcacctgaggtcaggagttcgagaccagcctggccaacgaagtgaaaccctatccctactaaaaataccaaaattagccaggcatgatagtgggcgcctgaaatgccagctactcgggaggctgaggcatgagaattgcttgaacccaagaggcagaagttgcagtgagccaagattgtgccactgcattccagcctgggtgacacagcaagactctgtctcaaaaataaataaaataaaataaaatattaaaataattaaaatcagagaagtaatacataattattttattgactttttaatttttatggctgtataatagttttacatttctatggggtacatgtgaaattttgatgcaagcatacaatatgtaatgataaaatcaggataattggaatattaatcacctctaacatttattatatctttgtgttggaaacatgccaaatcttctagctattttgaaatatacaacaaattactgttaactataattgtcctactgtgctatcaaacgtgaaatcttattccttctatcaaactgtattttgttgtacctgttgaccaacccctccgtaacctcctccctccccactacctttcccagcctctgataaccaccattctactcagtacctccacaagagcaattttgttagctcctacatgtaaggacatgcaatatttgtctttctgtgccagacatattttacttaacataatgtcctccagctccatacatgttgctacaaatgacagtatttcatcatttttttagctaaataatattccattgtgtatatatacgccctattttctttatccattcatctgttcataggcattcaggttgattccatatctttgttattgtgaatagagctgtaataaacatgggagtacagacatcgctttgatatgttgatttatttcttttgaatatgtattcagcagtgggattgctagattgtgtggtaggttttattttttagttttttgaggaacttctatactgttttccatagtggctatactaatttacatttccaccaacagtgtatgagagttctcctttctctgcatagtcgtcagcgtttattattttatttttgctaatagtcattttaactggggtgagataatatctcattgtggttctgatttgcatttccctgatcattagggttgttaagcattttttcatatacgcattggccatttgtaagtcttatttttcagaaatgtctattcagatcttttgtccattttttaaattggattatttggtttttactattgagttgagtttcttatatattctgattattaatcccttgttggataaatagtttgcaaatattttcttccattccttaggttgtcttgatactttgttgattgttttctttactgtgtagaagtttttcagtttgatataatctcatttgtcaatttttgctttggttgcctgtgatttttaggtcttgtaagccagcggcttttttactcaagatatctttgcccagaacaatgtcctgcagaatttccccaatgatttcctctaatagttttatagtttcaggtcttacatttaaatatttaatccattttgatttgacttttgtgtatggtgagagagaggtctcatttcatttatttgcatatggatatacagttttcccagtaccatttattgcagactgtcctttccacaatgtacattccttggtgcctttgttgaaaatgagtttgccataaatgcgtagatttatttctgggttctttattatgttccaatggtccatgtgtcggttttcatgccagtaccaagctatgttggttactatggctttgtttttaaattcacataatccagtttgtgccacatatcttccatttaccaatccagacccttgccttccctgttctgcctcagaagcatgtatatatgtatatacatgttcccttgagagctagctttcaactgtgttagaccaatctccaacaagaaatccaagaaacaggggagtgcggtcaggatatgtacgtccctagttcccttcctggaagtcccttcagacttgttgtttccttgaccagagtcagaagcctggccaaggaagcagcctctaccacttggctatataatagttgtgcttgtctgtggggtacatgtggtcctccctctaccactcattctctctgagttccaaatattgcctcctctgctcatctatttggacctagggatgttaacttctgctattcctggcactgggatactacattatcttttgtggtttccctgcactttgcctacatattcgtaaatagtttctttactaagcccttgttaggtttagtaaaacctagaattatctcagtttgaatatgccatctgtttcctcctgggaccttgactaacatacctgactagtagagagaaaatctgacactgccacttccccaccacacacactcttccagtttaatgattactaatagttttgtgtgtgaatgccttcaaacacagaacattatttgtgagacatataacaccaaagacatatggaagaaacatagacaatgtttttaacatgagaacttttttgaaaaagtgaaaatttctggttgctactgaccatgcctcattttgtaaattcctttcctgatccctataacccttcacaattttagtattcctttgatctttttgatgactcattgtctccccttatgggcttatcttcttaaatgtaggtgtctgggttctccatttttctcttctctcaccatcccccttctctctctctttgagattttatttccttgaatagcttaaattattgtcactatgccaaagattccaaaatctctacctccagccctgacctatctcccaaattcatccattttcattactctctgaaagctatccccaacttgaacattctaacagtaattcaaatacaacaggatcaaaaccaaattcatatatttcccactaaactagttcttccacctgactttcccatttctattctcaacacccccaatctcctcttctcagcccaaaattttggtgccatacttgactcctgtttgttgcttttcatcactcctatttaggacactccaatagctacactattcatccagtattcatcttctcctttcaattgccacagccaaaatccaatataatattctcatcccagaatttcataacaccctcccaactcagcttcccagagctagtttttcctccccttacacctagccatctaacagattgacagcctgatcttcccccaaaatacaatatttctattctctgatttaaaaaataactgcccagtgttccctgaatttaagtctagacttcatggtctgtatataaatgtctctactatgtgacctcaacctatgcaagcccccatcccagtatgtcccccaggttccagtcaagaaaacttaactagcacatcatactgttttctctgcttatcaaaccttccacacatctccgcagatttacattcttcaaggtccaactcaaatcttacctccctaatgtgcttttcgtaagactttaattatattctgctttacaatacattatttttgtattgtcatcttatataccagattcaaagttctctgagagcagggactatttcttactcattttttttcctcacagcacctatataagcccccttcacataatccgtgatcaataaatattcattgaataaattaataaatgaaaaatcatcagaaatatctcatttttaataaagatctggaagacatttcctttgtttcttaggatttttttctttttagatgcatgcatagctatattctgtagcatctgtttatttttagactttttaaaggttttagattctgtaaaatatgtacagaatattccgttcaacatagggtgtgagattgatcacagcatgacccataattgtataatttctaatcaaaagtaagtgtgactttggcataagccaaactttaagaggaagtaagagtagaataaaaattctcggccgggcgcggtggctcacgcctgtaatcccagcactttgggaggccaaggcgggcggatcacgaggtcaggagatcgagaccatcctggctaacacagtgaaaccccgtctctactaaaaatacaaaaaaattagccgggcttggtggcgggcgcctgtcccagctactcaggaggctgaggcaggagaatggcgtgaacccgggaggcggagcttgcagtgagccgagatagcgccactgtgctccagcctgggcaacagagtgaaactccgtctcaaaaaacaaacaaacaaacaaacaaacaaacaaacaaaaaacctcagtctattgggccttttactgaagtacttcttgtggttacttcctccttaaatacaccatccgaatctatcttaacaaaactatgttaattgtatttttacaaataatcagtgaaaataaaaaataaatatgatacttctggatatcagaagttgaacatattgagtaaccagctcatcttagaagctaatctatgaagtattatgtataaaataaaaaagatgtgttgttaaagatagagatagagtgacacaggtggctgagtagatctgttttctacttccatatgaagaaaagcttaaacatgtttgtttatttattccttcattcattcataatcctatactatgtgccaagcactatgttaggcatgagggatatcataaagcataaatgtatgatcccttctttaaagagaagaaagaactacaaacaaacgataggaaaataattcaaatgtaaagtttgttccaggcatagcagtagcacagaggagaaaaaaacttgtgacagtttcatccttgaatggcttcactaatctagctttctataacttactgtaaaatatcacccactggacaaagccaggaagaaagaacatattataagacttaagtatttgaataatttataatggtttcattgcttggaaaacttcaattcattttggcaacatatgagatcactggtctcaatgtggaagataaagcatacagcattgcagggcctgaaaaagaatatccaattgtaattacagtattttaaaagggaatgctagtcattattattttcagtggtcaggactgaaaatgcttgtttacttcaagttttagcagcatatttacctaccttagatttgttatctctgagctaaacaaaccattttaatttcaagcaaagccacaaagcattatttctcaaaatatacatttaattaatagcttatttgctttcttctcacttgactgtgagtttcatctaggacagaaattatttcttattgatctttacatttcatgcctaagcataattcctggcacacagcagacaatacttgttaatagaaatacttgttaaatagttgttaaaagaaaaatgtaaatgtagacctttagctccttaccaactgtcgatattcaagtgttctagtgcccatgatttgcaaccttttcttgtttttttctcctgataagatcaggcaaaggagaaggatttccaaatagcctgatagtgtatcagtgtttcaaaaagttaaagccccaagacttaccagggaactttaattctcataaaaagaaaataaaccttatattaacctttacgtgtaaactcaaaatggtgcactccctgaaagtattcctcttgttagatatttacgagatacctttgcaaatagaaaactgcagacatgacccctaagcttcatgtaaaatgactgtatttattatttttattttgatcttcacttttgcagtagttgctgtaaatggcttggaacatgcaaaatatgctaaacaagaaacctagcccctacctgaagagttagccgttgaaaggcacaaagaagtacaatggatataaaagcctcttgaagaacagccttttgctgcatagatgctaggcaagacagtatgtggcaggaaaagagttggggaaactgctttaaaaacctattaactaggaatgtgaaaagcaaggaacaattgggaaaggagggaggtgctcactgtttaaaagccttttaaaggtgaccatatttttgttggctttttgcctgcaacataaaatgaggatgatgtactgaatggctagctggctggtgaaggtagaatgaatggcctgggctaggaagtcaaggctgaattttgagatgctactctggactatgtgcagctgttgaaacaattctcagcaatgaccacttagactttgaagtaaagacaaaattcagtcagcctcctcaatcaccctttcatttttgtgtgtttttctcggtctcataaatatttgcctgtgctgcctttgctgcagatattaaggagttaataaattagacagccaacaagcaggaattgggaaaagccacagaacttagaattgaacagctgacagcagattctgcaggtgcaagatgggaatcagctctgcattttctatgtagcacagttttctctgcctggcctgtggcctgatttcctggcctctttgggataagctgaattataagacagagaattccagaagatctagctctgtgatcctatgaactctagcgcttcaaaaggaagcaatctccttctatgtttagactgacaatattacatattggtggcagccttgtaagattttggtttcacgttaggaaagaaaaatgctctaaatgccatcctacttaaagaaaaaatggttgattaaactgcactgcataacaaattagcctcctgcaattgggtgtctaggaatgtgtagtgtgtgtgtgtgtgtgtgtgtgtgtgttgtgtatgttaaagggaatcactacttattaaatatataagtaccacagtgaatattaaggtcataatagggtatgggaaaggagagaaatgggctgcattcaagtgcatatttctaatcaactacttttttgtattcttctaatcattgtatttgatagtaatggacattcaaggctaaactctgcattgtggcagttcttccaaatctttttggctctatagtggtaaaaatattaattccattacacttgaaaatgtccaatatgatcccttgattaacaaaacattccggtgtttcttctgtgaaggactttgggctgcctgcaaggatgatggtaggagtggctgattgaattgataataggaaaattaatttttttccatgctggtgaatatggcctacacatccaaacccttttgacaaaactattttgaggaatatatttgtaataaggacagaaaaacttggagatctgggatttttttttacctaaatggactccaggaaggacagataaatacctctagttagcaacagttaaaatgggagctaataccaactattaattcccagtttggatcttctctttctctcaggactactttaagtccccaaaattccatgcttccaatttccccttctacaactgaagatcctatgatttaaatcataaaagattagctatatttggacactggccttgtattagtttgacagaaaattctgaaaagatctccccattccaaaaatgtctttctcagactttttgtggagacctaaaattccaccactagaaattttaatatttagagtaatgctgtgtcccttactgacaaattcaatttcaaaacacagtaaaattaaataaacataaaaataaatgtattaaataaatataatttttaagtatttgtgggccaaagatcaggagggaatatagaaatgttatttgtggcgtgaaggtagtagtattacagattacatcttcattttataatttctctttactatgctgatataaacatcaatagggaaaaaaatagtgttacttttgaaggctcaattctacctgaccactgtatctctagctagtggaacttaaaatataagtcaccaaaattttaaaataaaaaaattaaagaatactctcacttagtgatttacaactagatttagggagaaaaaaacaaaactcgacaaatattcacttaaaagttaatgagtatttgctatggagaaggcattttgttgagtgatacagaggatacaaaaatgaccaagatctgcaacccccctctttcaaaagcttatggcataaggctagtaactttgaagaaaaagcacattgttatcagtcatcagtatattttggtgaatccatctactagccatttgtttcagattttgaaaagctgaaggatggggcaagcctaggatactacctaggaaagatcagcctggattaagacacttaatgaaagaagatgagggaagtaggcacaagccgggggaggcgatagcacaaaagagggtagaagatgagagcacgctgactgcaaactgtgtgtgtttcagagggtggatttcctagctctgacttctagcaaataattttcacaatgtaaagtggaccctaacaacgtaatattcctctcaatccaagagtgccaagcaatcaaggagagagatttacagacagtgtactttcaaattcacaatgcaaactctaaagtaatatgtattttcttataagcttaactttagtaaagaatgatttttgaagttcactcaaatatctaatatttgcagatatccttatttcattactttgctccaaatatttaaaaccagatgaaaaaaagtaatgtccttaaggagtcaaattcattattaaaataagatattttccaagttgtttggaaaatggtttactttctttttttccccctttactagacctcaaaatacattgagttttcctcactggtaaagaaatacaacattgagaagtatcaagtgaatccatttgaacaggcttcaaaaccataccactaacgtattattttaaaatgtttctctaagacgcatttattacaagggaacactctttaggaagcattaacactcacagtccctaaattttaaattggtccctaatattccatttggtaatcaatatcctcctttgctcctcccccaccctctcagatggccttattctctgtcagtatctatcacattttcttttttcttttcctttttttttttttttgtcaccttcttcattcttaatccttccttttgggccaagctgtctgccctttgtagctatatttacttcctccttctctttcccctttaactctttgtagacctttagattatgaatgctgaaatttgtgattcattgtttttgccatattgacctcctattaataaaatttgcctcctccacaagattattctaagaaagcatacttttaagcatccacaactattgcccaaagagagacaaccatttggttcaacttcatatgtgttaagccaaatatattcaaaaatgatttcctactccgattcttattcagtattttctgtgattctcctttattatacctttctagtgcaatggaaacttcagctatctgtggtctagtctgaactgtacatggggtagtgacaatggccttctgaccctatggctcttcctggctgtggatagaattgatagcacttttccaatttctcccttgtctttgcttgaacatactggaattacaacctctgacaaaggtaacatcccttttgtagtggaaacaaaaggggtgtgtaatgaattggttaagattacattgcatgtttagatgatgaaatccaactgcagctcaattcctttatttcctctccctggacctggtctttcaataagacattattgactggcatcttccccagaacaggtgcttaggaatatagtcttgctgctttgagtcctttagactggaaaacaactatggaataggtcaagagaatcaggtatgagacaataatgcccagtaccttaggacatgcactgtagatgattcatatccaggtggtattaatggaataaagggtccttagacttatatggggagctagcgcttttcaaattaactaaggtggaaggatatgagttacaggtttatttgccatttttctgcaaaaattctatgaccaggaggagatagaggaggaaggcaatttttaacataattcaccactatagattgtgctataattatattataaaaggaatttttaatttttatgaagatgaaatcaatgccacagtgtgtggtattaacaaatgctatctttttaccacaaatcatatcacctttggttactctggatagcaaattattggcctctttcttctttttcccttaaattactttggcttgtggtttgtctttttttttatttttcaaaaacaagatcgcttacaatttttgcttttaaaaatgatataatacccatattggctgcagaaaatatttaaaatgtgtgcttttcaaagaatgatcagatcatttattcatctttagataaagatgattatattcatctcaattatttttgccaaggactgtaacactaattttactctttctaaaaattaaaatagcaaacagtttatataaggtgttgataattacctatattattgtactgctgtgacagatgttggcaaaaaagcctaaaatgcctacagctgtgcactccatgccatctagtttatactcagacagaaggctaacagatgttctgaactgtcactttgcctaaatgtttttaaagtctaaggacctgctttataattcgccggagtctggtttggtttcacagaggttctcagaattcccatctgtgacaattaatgctgaagacattgataaatcaacccttgtgttttctctcttctttaacaaacagacatcagtttatacatggatggtagattgtgaaggctgtttttatatacatcctgtttgtaaaattatctccttaaacacagatagaattgggctataagaatacgtggaggtttgttttgagccatggaaagggccaggaaatcacctattattttctttctgctaaattttatgcaccttggaagtaaaatgttaaccatttccaatgacaattttccaaagttatatttgttctagtgaataaaaaaagtttttatttttattcagcatgttaacagttctgctcataacaataactcttaattgtgcagcctgttagaaaaatgaaagaagacaataaatggcattgagaaagtacacagcacatcttctccagcttgacaccctaatacttcctcttcccaaacataccttcagatccctcatacagaattactgccccgtgcaaaggccatcaatgccttatttgctgttgctcttaattttaacaagctggattcctgtagtacacttgcttaatagtttaaacattctgttaacaatcaggtgtttggcctatcctgtttctcctctattctgtaaagaaatataactccaaatagtacatctttctgggtttgtttctaaattagtccccacacttaattatgaggatgagagggatgccttattcctctttgttataggctaagctctcagtaatcccaaacaaaagagccagttctggaagatacaggatttgctagcaggattatggtctcatagataatgatgtgcagtcagcagaagcgaagctttattttaattcaaataagctagtaaacaaaccactgacaagtctgctggtgagagtaactggctgctgttgccacattggcagcaaaattatagaaaatctattataccctgttcaccatatgtttaatttaatacaagatacaaattaaactattcacagtgcctattaaaataacaatacttttttatatttgaatgttttaaaataatttctactgaccttttaaagggcagttttgatataggtgactatcaggggtggagggaggtagttaataaaagtcaaaaaattgtaattgccttcctgaaaaaataaaagtataaatgttcactggtttgcagatgttaataaggttaattagcagtcatgtgttctgctactactatatttccctcccatcctttgggtttctgaggctagagttttaagagtgatacttagtttgacctatgtgagtctgtcctcatgaaatcattacctggatcaagccagcctatgggtagccttagaactaacgccaattgagacctataatctgaaaattgagtttaaactctaggcccaactttggtatggaaaaaggcacagacttttatattattgctttcagtcaatttctccgtagccaaaagatcctaaggggagccagaattaagaggctttcttccagagacaggagagaagaaaaagacaagcccacaacaaatttgtttataacaaatttttctcttgtacccacaacagtcggcaaccagtgatgcttgcttgagtctatggggactcagtctaccagattctaaagaccagactgggttttaaagttatagagctagatttgaaacccatatctattatttcccagctgtgaaaccacagatctttaacctagctggatcttcctttattctgtaatgaggggacgttggggtgaggggaagtataataattccaattttatagtattattatgagaagtaaataagagaaagtatctggtacataatagatactcattaaagattggttcctttcctctttcactctcaagcaaatagacatgttgccctttcttcaaaggtgaagggagagtgttaggaggaggagctggagggggagatatgaacaaaaattcgtggaatcaatttctttggatcattaattcctttctacctccaaaacccaaaatggcattctccttttctctcaaaattcaccataatacttactctctttaagactgtattggtaagccacccaaaccagctccctattgttgggcatatgaattagaaaaataaaatataaccattgcactttgagatatcttttccaacttttatgtacagattttgcactgagtctacaattgtgttcatggggttgcctcatgtgaattttggttcagagaatagaagtctagcagatccaactacgtactggtaattacaatatgcataaggtgtacacttggaaaatggccttagtttcaattgttcttgaagtccaacagatgatattaatattttacccaaaaaactagtaaatttatctcagattgatgcaagaagcgattttcaaagcatggtcctggtaaggatatgccagagaaacaccagacaaatatccatggtcccttcccctctctccagtaacctgttattcagaggttgagagatcagagatatttccatttattgaaacactggatatatcgttaaattaagaaactggaaaaaaaaagggtgacaaaatttgtggcatattttaagtgtttagcattttaaaattaatacttttaacacatgaagacaaaacacgattgtacgtataacttcattttgtatataacaaaggaatttaaatggatttaaaggctctccacaggccttgcttctacctctaaatttccacttagttacatccttctctagtccctgttgtcaggtcccagagcataaaacagactgagggagcctcagagctccagaagtgtgagaagggtgagaaggcaggccatgctggctaggtacatggccacttagcagacaggccgccaagcgagcctgcactgtcaccttccccacctcaggtttccaggtccgtggctcctgacctgagagccgctctcctctgagagggtctcccagtcccttgctggcccaatctcggttcctgactttccacccccgaaccctccccgctctccagggaaccacgatccagccctccagagaggttctcctgggctcgccgtttcgcccacggggtacggggaacgaacccaactggacacactgtgcacccggaaaaacagacggttccaaattcatttccgcatttgagtctagagtcagcaagatcttggccgcccgcctgcgcctcggagcagcccacgagccggtgaaggcgcgtggggaaggggggcctggaaagcccgggcttcgactcactgggccagtaccgctccgaggaggggcctcagcctccttcggagccagggccgcgcccgagccgcgctaggccagggggccggacgcgcacggaagggggctggcggacacggccgggtggtggcgcagttcctgggggcacagggcagtccagcccgccggcccgcgcctccgcttccccactccagcgaaactggacaaggccgacccacccagccgggcccgatccctcaagacactttcggcctccgcccccgtgtctcctcgggtttccacagacccagggaaggacagaggcggcgagcaggctgacaagtttattctagaggctttgaaaaatgaggtttccaggtctcttcgcacgcgcgcgcgcgcgttctcgggctaaaggttcgaagctagagtttgaatttaagccacgtcctgggacaggtcgcgttcagcgtgggcgtcggccccgccgcggccccaggcctcttcgaagtgcgcgtcaagtggggtgtcgggtcgttttgttgtttcactaagtgaataattcaatcgtgttaggccagattacatgctcataatacccgggtgtatttaaaagcacccgcgtttctaaacctcccgcagaaagtgggaagcaatcgccccctcggacctggcgccgctgcgcctgctggagcctcgcttccccacagtcgggcggccagtggagggcgaggagcgcgcgcgtcacgagaggcggccccggcctcccagagcccgcaccgggaggccgagggctcgggactcgagccgtctgagtccgatttctttccacgtgcagagggtagaaagtcagggcgtgattgattgcttaaggaaagagaagctacagctttcacggtagttgataactaaagcatgacatgatgccatctgtgtgaaactcgtgatgtgtgtggtcattggctccctggaacatccagaccctgatcgtgcgtatcgtgtttccttataagcagcactcgcgatttaaaaacaggtcccggtgcccctcttgctgatcctctctgccattagcccgcttaattccctttttgtaaattcccctctttacctttctttcgtccctccctccctctctttcttctttcctcctctccttttcccctttctctttttcttcctcaatctaggtcgtttctgctgaatgatatttattcaccgaagtcccaatctgagggtgaggggaaaaccccaccctccacatctccccagctaggcttgcgcttgtaaaatatggggttcagctttggctccagagcgcttttgaacagtaaagtttccaattcagagccacctctaaataaatgcccataaatttcccaaccccgtgagaaagccatttctacaacccagcatcgtctgggtgatgtgtgtttgttccaactagagaggcactggtcagtcacctcagtttctgccctctggatacagaaagtgcttttgtttgtgttttttttggtttgtttattgtttgttttttttaaagcagctttccagttgtagactactggttcctgattccctcatctatcaagacagtttgtcagtttggccctgcaccttgcgtttcacattctacgttttttagttaaacgttgaagcctttccctatgtcagatgggatgtcattgcattacagtttttgagacaacttttgctgacttgcctaaaaaaatatgtcgtcctgatctcccacaggagagcgaggtcaactgagggatttttcagctttcttatggctgggattgaatagatccaagtaataagatatctcaggtttcctcacctttagtcaccttgggctactcatggatgcactcctatcttacagtcttagattcagcccaaaacccctcagtggaaagaagacagcagttcagattcttctttcaggttgttgtaaaaaaaaaaaaaaaggaaatggctttttttcagttaggagcatcctttgtaagttttgatatccaaaaaatacatatgacacaagaagcaggaagagatcttcagttattccagtggattacttttttatgaaaacactggctaaaacattttacattcacccttcctcattccacttttagttggaagaagtttctaatattgatttaattttgtataaggcccctaccctctcctacaataccattaagtaacaagttcacccaccttagccttttctggtgaaagtcactcttgatttactctcttcacttcccttctatccccaatgcactcatacttttacagacacatttttcttgatccagagagtattgggaggtacataactttttagtattgtcttgactttcattcttttctaactgagattggactctttatcctgtgatacaaaatgaatttttgagaaacaaccatgggaaaaattacttaattttctgttttgatgtatttgtttttcaagcttcataggaaaggctttagttggtgtttaaatgatagtccatgaaaattccttattagatgactccagaccaattgtaaaccaataacataattgtttccaaaagggaaagtggaagttgagatcagttagtcgagggattcatttgagtgtgtttatctttaaaatggtttatgagaagaaagggagaaatgaactgggtggaggacagaggtagagaatccagtgaaaacatgtttttaagattaaagccatttttccacattattgtcttgccacaagtgacaacacagagcaggagtcatgaaagtggattactgtcactctgggctattggaggcccagagagccctggcattaattcctatagaaaggtagacaaacctagtcagtaactaacactgtcccccacagcgccctcactgccaagtgttcaggctctctcagagttgatacagacctcggggggtctaggtggcagggcttcccttgtgagaggaagcggaggctctctgtggaactgagagggaggaagccaggtggctgtaagagcaagcctgaggggatagggtgctgtaataggaaggctgtggccaccagtccctcacatggctgcaattagtgagtcaaagctagctaatgatgaatcaaaaagagccaagagtaggaccttctgggtgctaaagactaacctttagcttgttccactcctcccactgggctcccatcctaggttttccaggactggagaccttactggaggaaagggcaagtatgttaagaaaacatgcctagcccctgtctagcatgcgcatactggcggggtcttgcagagatggggagaaacaccttgggatgaaagaagccctcagtgatctgtgtgtctggctcatacagttgtgcacggccaaccagagagtgggggagaggaaagcctcattttttttcagtcactctatctggggttgcttatctcctctcccgcaaccctctgcctcaccccaccaggaccaaatagaattgaaacttcattgcctttgcctgtactgagcctaaaaactcagggtttgataaggttactgcaccaatgatacaattgtagatttttaaaagcctcctcaaagagacagatgtttgggctgattaagaattgaggaggaaacctgcagctgcaccaaggaataatctattggacaaatattttaataaaaaaatatgaagagatcagcccgaccttgcaaggtcttctgctttaaaaaaatctttatcaaacccctattctatggcttcaataaacagaacccattacctcacggcatcttttgttggccccatacaagagagaacaaaatggttattcaggggaacgctttcgatttttattgtgggtagcctgcacaaagagccgtgttattgtatttaaaagaaccatctgtagcagaaacaatggcatcaaattatctttgaatacccactgaaaaaacataaagcttttttttttattcttcttctgtacggtggggggatagagcagtgttaggataactgacttttttgttgttctctgggtgcattcttctcgctccccctctctctccccctcaccctctctctcttctctctctccctctccctctctctctctctctctcttttaaaaaatcagccatttggggttttaagccataaacgatttttcttgttgcaggggattgcagtggcaaagctaggctaggtcttggaggctggtgtaaggcgatgcgggtgaaggcaggaggctgatggagagactggggggaagaaaagccgaaatggattcacggtgccttggatgaaggacgagaggggaactgcaagctccttcaactggttctgtccggtgagaagtgatcaagcttgggctgacaagaggctcagggagccctcacgttctttcgcttttttacctgccaatcaaactgctacaagacaacaccctgatctggcatggacatgtaagtagcttgcaacccaactttgacattcactgctagctcactcctccccccacctcactttcttccccactcattctgtttttctttctttctttttttttcttttgacctttaagagatctggaaatacaccctgtgtggcagtcatttaacactggtagatttaagtctgaaagcgttaacttttggaattaaattctaatttagatttaacaaatgcagaaatgaaatgacattatttcattctattttggacggttttggtactgaacttaatcagttgtcttacaagggtgtgtttcttttactatgaaactgaagaaatagatctgtgagcccccagaaagaaacccactaatgaaaaattcaggcttccatcgtaaaaatgttaaactctagcatttcacccccataaagaacctcttccagaccaatgttactaaatggaaagagtgatttgattcaaaaggtacatatcattaaggggttgctactacttcaatcggcgtcttaactattttggtggtggttacgggtaggggcaagttgcaaaacaagaggaaggggacatggcgatacctcgttttttataagagattgacatagaggaagatagaaatgcatgggggcagaataagcaggaaatattacctgagagaaggaattacagagcatggcgaagctggaaggtgggagggtttctgcgggaagtcgagcgaggggtgacggggcttgctctttggcgccctctaatggcaacttgaaccaatgttttactttcgtaatgcagtactgggaaaagcagctgggtttttgttattgctgttggtttttttcctccgcagacttagaaactagagactattagtggagtaaattgattgttttcagcctaggaacttatatatatatgtcttaaactcaccagtgtttcctcctcaaacatcccctcctctccctaaatcttgttagactaatagaagaggacaggctaatggcaaattgacttatggagggtggtccacgcccaattagccattgcgggcgggggagagggtgtaggattcgtttcctacctgaacagcattctgactcttctaacatactcgagaggtgtagggggtggagtaggaagggatgatttggaaattgcagattctgacacgggctcattataatacacttttaagggggctcttgggaacctctgttattgcgacatgtggtggtcagggggctttccttcccgccttctttttcttttttctttttcttctttctttccttcttttttcttttctttttttttaatttgatagataaaggttaatcttgggctgaatgatagagctatgattgacaagagaaaaggtgttgagggcaggtcgcgctgtcttatttacagcccactgcttgctgtagagtctttgttaggactggaaagctaatttagtgctgatcaaaagcaccacagagttaaaggactggtaatgactgctaatttcatttcagcctcatgcatccccaactgctgtaattaaagacacgctatttaaatacaggtgaagggtttttttttttttttaagttgggtgggggggggggtgggtggattacaattttatttagatcttttcttctactctacttgggtgttatgtagtcccaaattagattttattattattattatttagagccgctccttgtcatttatacctggctttgcagaatcggaagtgtgaaatgtgtcactcacataaaagcccctgtttaaagaaagggtggggcgggggagtgcagaggagtaactatttaggggtgatttaaatatttaggtctcctttttttctccttcaaattaatagaaaggccttctatatagttaaaagtatttgaaactgggggcaaggttaacaggccaaagggatcagtgtcagctttttaagtacttctaaaaagatcatgtgaacagatggaaaaatatatttttaattaaataatttcccccacactatagctgcagtgttggctcagaaaccgtgtaatttctcatccgataggagtttctttatgagaacatcaaaggataaaaagctctgcattttcgtagttggttaaaattgataaccacccccccatgcgcgcgcgcgcgcacacacatacacacacacacatacacatatacacacacacaccccaacacacacacacacacacacacacacacacacacacacacacatacatatacccaaaaaagaatttagcctttaatctctttttatccacgaagactaaagctctgtactcgaccccgcgagcggctctcgccttccggggctggaacccgactcagatgtgaagcggcactgagccgctgcgcaggttcgtgcccagcgccccctgttggacacagtaggagctgcgcagcgccagtcccggaaatcgctggaatcctgctctggggttagagaaaactctttattgccctccaaaaaagaaacgggatgcgaaaacaaatttttatatccttgaaaaataatataatattaactcaataaaaaactaaagaggcgatactacaattttaattcaataaaaaataaagactgtcctcctcacatcccagccatcccccacccggtttggttttgtaactcttttgaaaggttctgcgatggtaaaacaggtaaagaaaagtgacgaaaaacaaagcatttttctgtagccgtggagaatcaagcaaagtatacttcctccgttttgtccacatttcaaaaaattaaacggaagatgctgctgcttgctgttttgacgttgtcagcagcgtcttgaatgccctcagaggtcctgcaagtatcgtaactgagccttcgagtaaacgaaataacttgcttctatgtgtttatttccagagtataattaaaagaccagtctcttctttgagtgtttcccatcccccagaccaatcctggtcaaagtttttccttcccagatactggctaagaaacacatactggctaagaaacaggtgcctggtatcttttttctttcatcttagccgtaggatttcggggaaggtgtgccaatggtagggaaggttttctttgaaattcagcatttcgttgaccaggaatccaaattatcctagggaagggggagtatttttacacttccaaaaaactacctgcctacataataaagagctttgccttttttattattattatttcttcttcttctttttggtcagcaagtgagggcaaaagtagcctttgaattatttcagaaagagaaactgtaaaaatggcacatcctctgaatttaaaacaatagggaaatgtgggtttgcttaattgtttaaaatcaaatagaaataattactgtgctaaatgaacaagatgttttaagatttacgtcttcagggttatggttattgattttaactttacccttaagaagtttagagatcgcgttttttaaagtttgcttattgacggaaatcggcttaatttttcataaaagaatggctttttaaaatattgaatactatggctatgcaaggtttatgatacctttatgtttattcttcccacctcccaaaattagcgaattcgagataacatttcaaggggaattgctatttagtgcgatgagagatgacttctccatctggttccagaattagatctcggcttaggttttttagtcagtaggttcagatgcaatggcaggagagaagaatcaagccttttgataaaatctctaccccgaattctatcgaaaagacaggcaagcgggattccagccacagcacccccaccttttgctctaccaaaaggcttgtccccattacagaaacaatatagtcggtgctagttttgtgaacccgcgccaaccggtaaggtaagaaacggtgcgctgacagccgaggtccgaaggctgctcagtggttcccgcagcccgtggggtagggaggccaaagccagcaaaatgttggaggcgacgccagaaagagagtatatgcctgctattcggaagtgatgtcgaacgtgcaatagcagagtcctggagatttccaccccgttccgcacccagggatcccagcctgtggggtagcaggttgttgggtgaaggcaggagggagaagccgcacctggctgagggcgggtgggcgtgccgggagcgagtgcccaactttctagggcccatggagaaagcataacccctagttgaggaaagagagctaaacaagtgggtggcccaggcctgggaatgccacccagctctcccgacgcagtgttatttctgtggtcccagggggccccagcacctgcccgaatcccactccccaaggccgccagcaggaaggcagcccctccatctttgagggctgaggagggggcagcgagtgactgattccttagtagcagggaaaaccgcagcggctggcaacgggccgcgtttctccgcggcggcaaagcgccctttaggggcggggcgggcatttttggtctcctgtcccagcgtccaggcctgagcccgcgcgggttggctgggcgccctgctttgtaagtaaccaatcttgctggattctgaggactatccaggcggatgggcccacttagcttaggcccactgagaccctgccaactcctcagacccttttccccttcatccctcacacctttcatgatgaacccaggaaagaacccgaactctgaaaaacaggacatgtagtttgaagtttgatagttatttgggtgtgagggacatgactctattaataaagactaagattcaaggctgagctctcatttattaaatttgctctttcactctgtttttaaactctggagatctttcagtttcgttgctccaaccctgacacagacaaaggcgccagggagaaagcccaggcgggcttgaagcagttgaggtatagactgatactcatctctccatcactcagacgggcagataagcactgccagactgggggtcctaatccagggcccagcggctacgtgggttgctgcggggtgttgaaaccacaagtacaacttgacaccattgagcccacggtgcttgtcaataatctgtgaattaggtgcagagattgtcactgtagatcataacagtttctgaaggactcattacagcctatcgtgtcaatgatcttcaaattaaggagggggggggtggggcgagacgaaaaaggagtggggagagccggcaaaaagggaagaagggtgggagggaagataaaagtcagagccccagctccgaaggagcctttaaagattatcaggccagcgatctgagaattccattgggatgggtttggaaacccaactccatctgagccaggactggaagaggggcgctgggggcaagcagaagtgggcccctgggaaggccgacttctcaggcatttcttttgaggccggaatagcttttgggagagggttctagatgtcaatgggaggccttgaggatgccagcccgcccaggatgggtgtacactttgatttagagcactttccagggcaagccgcagctgcagatctttgaaaaaagtggtaatagtttcgtttagggatgatggtgattgtaggatgacttttttttccaatggtttgctttaacttcttttcatgccacaggtgaaagctttcttccttttcctctgatagtattcctgtctgtccctcacatgttacgtagatctaatttctttccccaacttgtttttttgggtgccaaacacatcagccctctgagatttttatcacttttgtggtttgtattgagtccaactgtacttctggaaagggaacttgtggataacacagtagcagtatgttccataagattccagaagaaagaagactaaattccatttatgcggtgtggcaggggccaggctaagggaaagaggttttccctgcttggtaaattgtccttgcagtgaaagggtagcccagccttcactggagtgtcatttaatactggctagagaaaggttaaggaaagtgtaggtttgtttttcccacaaaagttgtggtcacaactaaacgaagtaatcacagttggagaatttaaaacaactgttttttctctaaaatgagggtaataaccctagccactggaaaattgggattctaaggaaaaccttttcctttggtataattaattgcataagatagtgtggtcaatcagagacatatgtatttagactcaagcaatgatttacaggtgtaaaaggtccagtggctttttgggctacctggagttcctactgatcattttgccttttaaaaaattttcttctaattttaaaaataaaagtcatagatttaatgcaactgaaaaccactggtggcagctcttcaggttttcagtttatgtttttaaaagggaatttatatttaaaataattaaatcatttaatggtcacactacattttctcctggacaacagctgtagtgcagggatagaatcttaacttatgttaaaattgcttgataattcagaaatggaaatgaaattgtgaattaatttctccagaaaatatttgagctagaatataagaaggatgttcatatataatactgtaagtaacatgatgattattatatgcagcttgaaagacctacacaaatgattatatactacttctgttgctataatttaaagtaaggggaaatatatttagttttataactattgaattcttttcaaaatgtatttatttcatcaatgagcattagatgaaagagaatgagtaaaaaggggagctgaatgcaaagctgttctgcattccttaggtttcaagggtacttacagctcttgagtgaaattatttggtgaaattgggtctggactgaaacagcaattgttatcccttgttcatttgttaagtgtaataccacttctggaaattaaaggcaaggtgctgaagggacagacaagaagaaaaaaatatgattaagcaatttgaaattgccaatgtaccatgcagccatatgcatatctctatcttagtaaatagaaagggatagagatatatgtttattctttttatcatctggaaacattcattatagttactgtcactaatccttcacacttccaaaatctgacaagtttgacataggaaaaaaatggggaaaatgtagatgaaagagtttctatcattttgaaaattgtgttataaaaattaaggtgtctatcccctctaggaattcctatgagggatccttcacagtctaaaggaaatgaagtttgacaatggtacaattcagttttgaatttttgctcttactttctatatcctaaccttttccagcttatttcttgtggattgtttttggaaagtatgcaatgctcttttaagggaaaaaaaaatcttctaatgcacttatttaccttcatttatatgtgtttgtttctgaaatgaagaatcaagctttggtcattctggaagtcgtgtagcatgctccaatttgaagtgactgagatcttttgtgacttacagaggagaaggaaatgttttaaaaattggcttatgccagtctccttactctgaaattctcaactttcttgtattacaggataaatataaatatcatctcaccaaattgtaccagcattgtcctaaacatttaaattttcctttatttttggcctttaaaattagaaaattttctccagttgctgtacttagctttttaattttgttttcttctcacttaccagactactggtatgatctctttcactgcagtatgattgctgctatggtcacttttagaggagattgtgggaaggttaggattcggaggaaacatgacaaaaaagggaagaaaaaaaaaccttcatttgaccacatctggctgcttgtatatttaaccagttctagaattagaaaacctttctgtacattttcttctatttttctcacttttttccttacataatgaaattaaaacttttggagcccacagttgacatttttcagaaaattgagttatcaaggcagtaattatttcacggggagataaaactctcatagccctaactgtcaaatagggcccttttcagattttaattacaaaataaaattagtctgctcttcctcagaatggtttgtgagtggttaaacagagctttcccccaatactggtggtcgtcaaactctgctaattagcaatgctgagaaattccagttaacaaggacattctccaagactctgcaggttccctgccgtttgccttcatttccataagaagattaagagaggaggggaacacactcaaatgcagatgcagaaaagaagcgttttttaacaagcatcataatagtaagatgcttggctagttctcacctaattactgcaagttaaacctctatttgacactaagaagaaaaaataagtctacagtcccctgtctccacaaaattgttagttggtttcagatataatacttgaggagtgctgaggagactttaggagagaaaaatcaatgtgcaagattttgaaataaaattgagttacacttaacagttaaggccttttggctagggcctataatagaacaaaataaaatcagaatattccaggagtcatgcaactactaatcttgctctaaaagtatgtatctttttgttgcccatggaaggtaagtgttacactccctttagattaagcactttcaattttcgtaaattgtgccaatggcaacattttagattctcagaggatgaagcatcctgttccaagtcttttttgattgtctagtagtcaatggtatattgttgttagtactgtagctgtctattacaaacctaaaacagtgttgcttctgtcatctattggaatcgttatagttattatatttagggatcagtgatggtgctggattgaaatagagtgggcagtgatctgattttttaaaatgcatatgttctaaaaaatctaatgagaaaatgttcctgctatcaccatcttctttaatcttattttcatagcacattattatgcataaccgccagccacagttagtttattgtctcgataagtacagcaggcttaattaaaataaagctgtaaataaatgcaaccaatgataacacaattgtaacgtaattccatagcttattaatgtgataaaagcaattaataaaagacctagccaacccctttaacctcttaaatacattattatagagttcatgcacaaacacatgcatctgagaatgtgtaaaagctgttatatatcctcccaaggaaaaaaattgtgccttgagagaaaagcaacgagatttaaaagatttgtgtctataaccatctgttattagtatttattttaacaaatatacaccacccttatccacaccaattccctggttgtttcttcaaacaattatccacaagctttttaaagtttttagaataatgctattaagcagaccgatgcatacacaatcataaagtgaattcttggtctgccctttgtggcgtctggacaatcataattcattcacatgttgaatctcataatttgtacctattttttcccatggtctaacctcccacttatctcgaggttgtatgtatatttctaagttaggcaaattaaatctgattcttatgatttggttccgcagcttataagatatgttaacttttcttttgttttgattatgtataattagtctgatcttccatccccctctttttttttttttttttactttaattattttcaaataccttcttttaaaggtaaaagcaatagtcttggaaaagcgaatctaccagcagggggcgcaccagccacatccctgaaaccagccgcgctgaaaagccggtggccgccttctcttctccagatcttctcaaccttttctctttcctaatctccaggtccgtgtttaccttaatattacacctcgattaaacagaaaacagtgctgtattttgaagagcgccgaatatgtatgcattttgagaaacccaatctcaccctttccgggttcccaagaactaaaacaagccataacttgagagaaaaaggagaaccttcggggggcaggaaggttgattggaaataacttaaggaaagtctgcagaattcttttttttacaacttttctgagtttccagtgggtatatttagtgtgagtttgacagtaacaggctagggagggcagagattggagaaattgggggtcgggggagtgattatgggcagaaggttagtaaggaacaaaacaatgcaccgttttgtaaagataataaatggaacgtggctggtagatactattcagtacattttcttagggtgagtaagggtagaccaggggaggagggggcggagagagtgttacagaagaaagaaaataagtaaccctgatggtttaagccctttataaaaaagaaatggcatcaggttttttttttttctttattcccccccaccccaccctttgtagtcaagtgcattttagccacaaagatcccaacaagagagtggaaggaaacttagacgaggctttgtttgactccgtgtagcgacaacaagagaaacaaaactacctatttgtaacggacgtgctgccattgccctccgcattgagcgcctacctattgaaatctttacgtcgggacaatgggagagcggctaaaattaccctctcgggtcctgggcgggcaagattcctgagcccctacccccgcccccatctcatcctcctctaacccgggccttgctgggctcccccttccccagtcccggccgccttctcccagtgtgcgctgcctgcacctgtgcctggagagcatcgaccccgcctcccaggccttgagcccctttgcggcgcagccccagccttgcgcggcctgggctttgcggccaccacaatggaaatctacggggaaaatgccagggctggttctgctggagtcctgggaactctgcgtgggagggagtttgtgactgcggcccaaaagccacctccatacagtgccgtgggatgccaggaagttgaaatcaccctcccccatcgcctgcacttttgagcgcccttccgtctgtgtctttccccagcccccatttgaaacccgcacgaccgaaacccttctttcggggaggcatgggatgggaatggggagtggggggagacagtagaagcatcccctttgctacggttgaatgaagacagtctagtgggagatatggctggggctaagaggaagagctgcagtttcctgggccaaagagctgagttggacagggagatggcagcttaccaaggcctgcttgttctcagctctagagtctgccttatggtccgagcaggatttatttttaagaacagagcaagttacgtggaagcaaggaaggttttgaggacagaggtttgggtctcctaacttctagtcgggactgtgagaagggcgtgagagagtgttggcacctgtaaggtaagagaggagagcggaagaacgcagtacgggagcggcaccagaggggctggagttgggggggagtgctgtggatgagcgggagaacaatgacacaccaactcctgcactggctgtttccagaaatacgagttggacagccgccctgagccacccactgtgccctgccccacccccgcaccttagctgcttcccgcgtcccatcctcatttaagtaccctgcaccaaaaagtaaatcaatattaagtttaaagaaaaaaaaccccacgtagtcttagtgctgtttacccacttccttcgaaaaggcgtgtggtgtgacctgttgctgcgagaggggatacaaaggtttctcagtggctggcaggctggctctgggagcctcctccccctcctcgcctgccccctcctcccccggcctcccccgcgcggccggcggcgcgggaggccccgccccctttcatgcaaaacccggcagcgaggctgggctcgagtggaggagccgccgcgcgctgattggtcgctagaaacccatttattccctgacagcccccgtcacatggatggttgtctattaacttgttcaaaaaagtatcaggagttgtcaaggcagagaagagagtgtttgcaaaagggggaaagtagtttgctgcctctttaagactaggactgagagaaagaagaggagagagaaagaaagggagagaagtttgagccccaggcttaagcctttccaaaaaataataataacaatcatcggcggcggcaggatcggccagaggaggagggaagcgctttttttgatcctgattccagtttgcctctctctttttttcccccaaattattcttcgcctgattttcctcgcggagccctgcgctcccgacacccccgcccgcctcccctcctcctctccccccgcccgcgggccccccaaagtcccggccgggccgagggtcggcggccgccggcgggccgggcccgcgcacagcgcccgcatgtacaacatgatggagacggagctgaagccgccgggcccgcagcaaacttcggggggcggcggcggcggcggcaactccaccgcggcggcggccggcggcaaccagaagaacagcccggaccgcgtcaagcggcccatgaatgccttcatggtgtggtcccgcgggcagcggcgcaagatggcccaggagaaccccaagatgcacaactcggagatcagcaagcgcctgggcgccgagtggaaacttttgtcggagacggagaagcggccgttcatcgacgaggctaagcggctgcgagcgctgcacatgaaggagcacccggattataaataccggccccggcggaaaaccaagacgctcatgaagaaggataagtacacgctgcccggcgggctgctggcccccggcggcaatagcatggcgagcggggtcggggtgggcgccggcctgggcgcgggcgtgaaccagcgcatggacagttacgcgcacatgaacggctggagcaacggcagctacagcatgatgcaggaccagctgggctacccgcagcacccgggcctcaatgcgcacggcgcagcgcagatgcagcccatgcaccgctacgacgtgagcgccctgcagtacaactccatgaccagctcgcagacctacatgaacggctcgcccacctacagcatgtcctactcgcagcagggcacccctggcatggctcttggctccatgggttcggtggtcaagtccgaggccagctccagcccccctgtggttacctcttcctcccactccagggcgccctgccaggccggggacctccgggacatgatcagcatgtatctccccggcgccgaggtgccggaaccggggggcccccgtagagatcacatgtcccagcactaccagagcggcccggtgcccggcacggccattaacggcacactgcccctctcacacatgtgagggccggacagcgaactggaggggggagaaattttcaaagaaaaacgagggaaatgggaggggtgcaaaagaggagagtaagaaacagcatggagaaaacccggtacgctcaaaaagaaaaaggaaaaaaaaaaaaatcccatcacccacagcaaatgacagctgcaaaagagaacaccaatcccatccacactcacgcaaaaaccgcgatgccgacaagaaaacttttatgagagagatcctggacttctttttgggggactatttttgtacagagaaaaccaggggagggtggggagggcgggggaatggaccttgtatagatctggaggaaagaaagctacgaaaaactttttaaaagttctagtggtacggtaggagctttgcaggaagtttgcaaaagtctttaccaataatatttagagctagtctccaagcgacgaaaaaaatgttttaatatttgcaagcaacttttgtacagtatttatcgagataaacatggcaatcaaaatgtccattgtttataagctgagaatttgccaatatttttcaaggagaggcttcttgctgaattttgattctgcagctgaaatttaggacagttgcaaacgtggaaagaagaaaattattcaaatatggacattttaattgtttaaaaattgtacaaaaggaaaaaattagaataagtactggcgaaccatctctgtggtcttgtttaaaaagggcaaaagttttagattgtactaaattttataacttactgttaaaagcaaaaatggccatgcaggttgacatcgttggtaatttataatagcttttgttcgatcccaactttccattttgttcagataaaaaaaaaccatgaaattactgtgtttgaaatattttcttatggtttgtaatatttctgtaaatttattgtgatattttaaggttttcccccctttattttccgtagttgtattttaaaagattcggctctgtattatttgaatcagtctgccgagaatccatgtatatatttgaactaatatcatccttataacaggtacattttcaacttaagtttttactccattatgcacagtttgagataaataaatttttgaaatatggacactgaaattattcttgagtctttcatttatttggataacactgtgattatacataacttttcggggaattataatactgtgctcagccaagaaagcaaaataccaaaaaccttggtattactagtccagcatcatgtgctaatgttaattgcaaaaaagaaacggctggatgattaataagtactggaaaaattgaaatttctgtcatttctaaaatagaaactagagacatatattgtaaatccgccccctccttttctaagcagcatgaataagcatgatggggacctatacttaaaactgatttatgccacttgttgccagaaaggattcaattctgaaatttttcatgtagtttagcagatggggtattgagccaaatcagaaccaggttggctggttttgttttcattttcttcacagcacaatggccctttgaaacctggctatagagaaaaatgatgcttcttgtatcagaataattgcaaactagacatgcaaagtgttcatctgctgggtgggtgtttggattactctggccctgctattgtctgagaggaaacaagtggtttgctttctttgttccttgacttcataaactttctcctctacattttcctgttcggggagagggaaagaaaagaacatcttgcaaaactccccggcttatcataaacgtagtttttttttattatttattttcttttttcccctctctctccctctctccctgaattccatttcttaaattggcagcgcgggtccaagcctgtagccccaaatcggataatctctgcagctgataacaagcaaaagagaagccaggcaacagccatattaaagaagaaaacagtcaactctgaggtagatattttactttgtccggtctaatcacatttggagatgattatgcttttgatctgttaacaatgttttactactgtagtagagaagtgggggaggggaaaggggtggggaaacaagattggatttgttgtgtggtgttttttgttttttttttttttgccctaggaaaggtaaagaaaggctatagttgtcctcagtgggagtggaaaagttgagacatcgccatggtctttgaattagcgatgcttctgcatcaccacccacccttgctttggggcagcctgataatctgttacctagtcagggacttttctactttatttactacttgattcgctcgtcttcccccacccacggggaccaggaaccaacagtcgggcacttttaagagcacgggtttgcttcccacaatttcaagagcttgtgtcaacttgctacaactttggagaagttggaatccggcagcgtcttccacccttgagtaaagtacccgctgcagccactaagttagctcatcccgttggtttgcatcttctcatttccaagaaagtatttctttctcatggtgttgctaatgttagttctgggctgaactgaggatatctcatattttctgtactttctatttttttctagattgctttgttttaggtatgtactggtttttatttattactttttaaatcctcatttttaggataacattgtactgggaagggacaattattattccagttcccaattctaagcaaggcattttcccccctaattaatgcagagactctaaaagaatttcccctagcctggccagccattgtaatgcatatacggattattcacgtggtaatgagcacattcgccagttcttgctcacacatacgaataaaagaaactttgaataaagatccaaatgatcatcctgggggagtggggaggatattcccggaatttgaggcagtcaactatatagattatatatattttgaaaatagaaatatattagaaatatgtatagaggtttacagtaattgcactgcactcacctctcattttttaaaaaaagcccacagggtcagcaactttctggcaaaatggtcaggttcaaatatttagcaaaaggaaagggagcacaatattttgggaagtagaactagctttgaataattgtcactatctgcataaaacaagagaactcccgttcccccttctatcccttcatatcaccaagccaaatagttgaaaattgaaagtcaaaatattttgtttgcaaatataaatgcttttgataactacatctgagggaaatgatatatatcttgtacgatcattcatttgattaaattaaagggttacctgagatatgtaatttcatggctagattaatatcgaacatataatattttaataataatgtgattttcaaggagagtaaacccataaacttgcccagagatggttatctcatggtgctgaagatagttgttgtttagttcttttcctcaggatattattctgctcaatgaaaccactcaatttccagtcaaatagggtgaatttaaatgttttgttaactatatacacagaatagaaatgtgcaaaaggatgagagtacagtctgttctttctgcaatttttttctctccccaaaccacccgcccccctaccacatactttaaataaagagcgttaaaatattttgctgagctgtagtagattagcaaggtttcttgccaatgctgggaagctggtattacagaccatcccaggggaaaatggctcacattaaccactaaatgaatatttgacaagggctcattcggaggtattattgctataaacgtgtccctactggacttttcaagggtcaaagagcaatgcttcaattaattatttagactgctagtagatttggtggtaatagctgtacttatttctagaaatcgacacattcttacagtaggaaaatctcaggagaatcttctccatcagcaataccttggattgaaatacacatggagccctggcattctaaagctgactttttcataaaacctttccctgggctggtggggggtggggggcacagaattatagtctctttttctgtttcactggctgttttttttggtttaaaagaaaaaaaaacagaatacagtaatttatcttaatatccacatcatgtgtggcaaggtcttttagggatttgcaatatggggcaaaaggggagggtgctcatttacaacctttgccttttctaagtagagatgtcacaggatttcggagactcagagaggccctgaatttagacaggatacacattcctgtttgccaataaaatgcaagtttgaaagtggaaggttccataagctgagtacccttagttctagtagtctcgagtaaattggggtacaaggtagttcctccttctctccccacctattggtctgaacactgcaaggtgcagtagcggggccagtgttccattgctgccgtgtcataggttcctccgtggccctaggtaaaatggtaagggaatgattttgagggtaagattcctcgacaataatataagttgaatgaataagagataagctgcaagggtggggggggggggcggtgggaacagtaattacaaacccaattcattcagcttttcagaacttttgttgtgggagctccattgacgggttttgagctgccagttttctcacattaaaaagaactgatcagcgcctcagggggacaagaaataccgcttaactgcatagtgatggggtcttcatttagaaccattacaagatgaaaattaaacagtgcctttgtgtgcatgaggtttacttttcaactgctaacagtttatagctaactgctctgagattgaagtttgactatggtttgatcgcctgctgattgacactgcttattatttatttatttatttatttatctgttataattaagagaacttttcatcaccccaccccagtttcatttattgatcttggagaattttgaaaaacagatcctcatatttttctttgtggaaggagtttcctttgccatgagctttagcagagacttcagttcacattccccaacggacaacccccaccccacacacccacgttatttccttaaaataatttgcatctcattctctgtttttttctgctgcattttcttgctctccaagctagagttgcttttcgggcagcaagtagggttggagataggggttaatttatttttttgctttgctttctttttttgacctaaattggaagagggctggatggatttcctaaggacttcacctatgaggtgaatccctcaaagaaggaagaagggggagaaactctgacctttactgtgaaaatatggatacagtccaaaaggacatagtttccggagttctagagtaagaaaagctgtggaaggagcttcccaaagacaggaaagttgcccaaaccagataattagtttagtgtctttcatagttattttctattaaaacttttctggaaacccgacatctgttaccaccaagagacacttgtaacctcctctctccctgctaacagtgctgtccagttttatgattcttgttttcagtttgtctattttgcttctgtggcctttagaaaataatggacttgactttcttattttgactaaggggatttctctttggaagggtggagtattaagataaatctaagattcttgtctgtggcagaaagctctctttctctatttggagttcagatggattttattttatactttggtataatggtgatatttctgattccttgagcactttgctcagtttctctcctaaagcaaatagaatgtcttctcatttcgggatgcaaagatatttgcttcacctaggcgtttgaacttgagatgcttgttctactttgcaaagaagtgtcaggtgatttgaaagctggaggtgtccttcgttttattaccctagtctgcccgcgtgtacagaatgaagggtgcactgttttatatagagttcggcgctttgaactatcatttgcctagctctcccagcttccgcgcgggccacggctccgggctgtgagcgcgccggcctcccgccggctgccctggggagcgcgcagtgcccagtgctgagagccgacgcgcgggcaaattgaggccgagctgacgagctccggcgggtggacctgacgtcaccgcggcccgggtcacctcacccatggggctccccaagaaggtgctgtgtggggctcgagttctctctgcccgggctctgctcaaacggtcgcattccctctccctcaggcaccgacccgcgtcagacaagtctagaaagtctcccgaggcgttggggccctcaccactccagagtcctctgcctcctgcgccccagcccaagccctctccatgttgacttcgtgacacgggagacggtgtctaggccccagattcccacccacatcagagattgtctacccaagaggatgtttgtccctgtttgtggccaaatctcagtattagtgatctcgctcggttcttcccgattagaggccgaggattggcagggctgggggaagcccccggagcaatctgggatccctggaatattggccccctctggattagagcaggtagggatgggaagatacagacccttcactttcccatttgtgagatagggataatatatagttaacctcgaagaagatgaatacagagtgcctgaaaaaaaggcttaattgataagcatgactttacttactgcccagcagaattagggaagggaagcagttctcacgttagactacagagaacaatacagaagccccggtcctttctggccttcctggctctggacagtgaaattagtcttgttcataccacccttcttacttttccagtgctctctctgacttaagatttgcctaggaagttatcttgcaaacttgccatccctgggcatcgtcctgaagggagggatcccggcattccgggcaggacccgcccccacccgcagaaggcagaaaaataattactgtattaaataaggagcggtgaattcttcccgagggttcttatcgctggcggccaggccagaagcgggactgcgcccccacccccacctcgtgacgtcagggcctgcagggctccggggatgaaatgattcgtttgagtgttccagaaagggcaatccgaacgcttacagggcgaggccagtgcagcccagctccatcaccactaccaagccccagtttgggaggctcccgaggcccctggccgccccccagaccccgtctccagaacataaccacatatacaagtaaccataatcctaagtacgtatatagtcacgcgcacaactctcgtcacaggaccgcccttcttccaaatatatatatgttatttagtttgttagccacaatttgttgtgggatctgaatgagttgtttctgttgtgtttgtatgtttttgtttttagacggtcgacaaattacgacaaatgcctttataaagcacaccatagctttatttaacccggtgcaagtttcagcggcgatttaagaaatggacttagaagagttttctggctctcatatccagccatggttaggacaattgctccaggcttaccattgctgcaccagttctattttctctttcccctctattcctaagaatttgtatagcttttaaaaatctttttagagtcatgtattgctgagagaatttcttagaactgtgatttaaattgtagataagaggaaagattatctggtcagtggaatgtgtgtaagtggcatagaagtatttgttagggaaaggcacctgggcatttctggatttctgggagatgcacttctcaagttttctttccaactctcaaatcaatttgatttattgaatgcccttccaatggaaaggatcctggaaaacaggccttatgttctgatattggtccaggatctcacagagtaacgattagccaatattttgcatgcagtcagtttagtatcagctcacatccaggtcgattttatcacacttaacagctcaaatctgggttattgcataatattagagtttaatcagtctggaatactaaatggcaaacctgtcttctccttctcaaggccctcctccctttctctatttctccttcctcccacctccaaggaaactatcttaaaatcaagtttccctttgagagtttgtttaccccaacttctgttaaactagactaacacgctctcatcagctttctaaacactgtctcatcagctttgtgaaatggtgcaaaaacatcttggaatccaagatggcaaaataaacttgagcatatggggggaagactgccttgttaagaaattgatttaaatgtttagcttacacttcagcctcaatgcttcccttactacccactcttacttccctcactgcccactcctggttcttgggtaccccacctctattagcaagcttgttcccccagcataaattatgaatgcatatcaacaggctcatctgctgtgataaatcagaggcttttctcttttgcacatttctgcttttattctcatcgaaatgtctttctgccccatgctagcagtgtctttctacaaacttactatccccgtataaactatggagatatattctcaattggaaaaatcaggtaatttcaaccgttccccccacccccaggaagccttacaagttaaggatacaaaatatttcatggttagttgtatgagcttccaaattagctgcatataaagtatttaagatttttttttttttggctgtcactggctggcaatactcattttgtgtgtgtgtgtgtgttggtttgaaaagcaggaagaaatgtaatgaattgagtgctgtcagagatgtcttctgtttgaacaatctgtgatgggctgaatggcagggactccctcatccagtgcaggtgcagtagagctggggaaggggggaggggggctccctctgttcagtcaaaaagcaccattctccacaatagaccacacactgacagccagcgtgacatcaactcacactttcatacttttccccccatccatagttctgagttcacaaagtggccatacagtagccttggttaggttcctttaatgaacattttgtggctcctatgaccaacattgaaatccgtggagccctgggaggaacaaatagatttttaatcgtgagttccaagccagaatgtatagctatagatattaaaagtaagctggtctctacatcctctcccaatgccaatgcccacagcaatcccagatgatctgaaaactctgagttaaaagttcttctaagacttcttaggttccaagacactgttttccatgtcctgagagagatcaaacaggaaaggagagaagacacaaattttatgtatttatttaaatgtaagagcacctctagtattttattatgcttcatgagagggttaatcctacaaattaacaaacattaatcttgtggagtggagttctgcccccttttgaattggttttactgggaagaggggtgtggagaaaaacaagagggttagaaaaggcagcaactgttttaaaactctgaacaaagatgcgaccaccttttggctgtcctgctgctgcaaggactggaccttccaagagttcgtttcacatttgttgaagcccaggccttggtgcctcaagttttaaatggaattactcaaggcgggcacactactagacaaactattctagtcaattccttcatccccgacccagtccctactcctctctgcccccgcccacttcgccacttcttagtcccggatctgaacattttagctgaaagagggagggttgaggaaagggccaggacagttccctcagtgccaccactgcgggcgaggacagttccctcagtgccaccagtgcgcctggagagatccccgcggccctgccgctggctgattctcccctgtgccttgacttgctgaaacatctctctggggaaaattactccctacttgcttacatgtgtgtactaaaaaacacatgtagccatacatgtttcatcacggcaacaaaaaatatcaacattctagccccaggagcaaaacgtatcaatcattcgcctaaatattgttcagtagatgggggcgggaataggtagacctcctaggacagcggtcacaagtcccctctcctccgcatggacaccaggaatgcggggtctggcggtgcagggcgcagggtgagaagatttgatgtgcagggtaagtaaaggacaagttatttaaaacctcaacacaggaaaagatggtaagagtgctgtgtagccctttgcttgcttgtgactacaagtcgctaggtggcccgcgtttagagtatgcctacggcgcctactaacgtctagacctaggagaggcgtctcccgcccctcgacccacagccagccgccacttgatagctaacgcgtcttccggccggtacacacccacaattaatctttcttattaaagcctccattctgtacccatggggcgactcaaacctatttagatttccgtggttggctgcacaaatttaagtgggcaacgagttataaacctaataacagaggacgagagagggtgatttgagtagagaagacgcaagattcactagggtcgtgaagatgctgcgggccttgcccaccacggcatctacctcggggtgcacgccaggctctgagaaaggtagtgaacctcacaatcacactcaccacacacaacatgcgtacacacacttgcactcctaccccctttgctcacaggtacacttgtgtggaaattgcctcttccgtagttcttataaactcctcccagacaggcagaattctcagagcatcggaaccagggaacttgcagggaaccagggaaggtttgcactgtttgggattaattgagaataattaacactggagccgttaatcaccactttgctgctctctccctccttccgggtctgcggcgtctgcctttttcgctcccgctgccggcgcgggtgtactggtgaaagtgaagacgtcgcggtagctgtcacccagttcggctgtacttttttaaacgctcgcatattgtttgattactaattcgagttaatatgatctttatggcaacataacagtggataattggcctttttttctgaacaacaatgtaaatcacaatcgctttattatttaataacgtcaaacgcttcgttggattggccccgaccgagaagaccttttctttctagacagtgttgtggaggaagaacaatgaagatctaattgtggagatttcataagttggctcccgtaaatgaacagcttagatatggaagttccagcagatgtgggtactattcgcctctacaagctctaccccccacccccatatacgcagtccaaacactctattggagggttttttgtttttttttttttttttttgtggtggtagtggtggtggtcctcagatcctagcaaccacctaaagtttccagtagtaattagagcttttatcgggcttgctcttcagccctttatattgccgatttagcgttaaggcattaagtccacacaccaaattagcgcgacttccaaatagccacaaccacttattctccccttccctcattttggtggttggacaccaagagcatgggcctgggacttttttttttttttttttttttggttttactttgttttgatttgatttttaaaacctattcgctaccgcactgtcttggaatatacttgtttcaggcagagttttgcaagggacctgagccattattttgcaaacgcctggaagagcacatgaaactcagagaactacaatgcagacgacaacgcctagaaggaatgggtccccgctgctcgaatgaaagattaattacatttgccccaaaagccccaattctaacggtctctatcgcggcttttgccatcactgaaggaccgctgtctctggggtcttcagacatcggagtcctttgcaaatgaagagcccccaccatttggaattcgggtcaaggagaaagactctgagcctgcagcagtttttgtttttgcgtgtgcccgcctctccattttattcaacttcttctgcctgtcgggaagcagaacaatcgctccccacccacccccctccgccccgtttctaagataaacaggaggtgcaaaatgctttgcctgcacacgcgccctcgtggcccagtcttcctgcaacccccagcgcaccggccatgcagctgtctcccaaccagacgtgggagaagacatccccccttcactcttcccacctgcaattaaaaaccatcacattgactgctctagagtcaggttcacatttttggccctccatgccaccttccagtttcttcccggtccactctctctctttctcaggacctaaaaagtgacggggagagggtgaagaattggagaaagcagcggattttcaaaacgtatcccccccgcccccccatcttttaaagtagtatgttaccacaaggagtgcatttgggaaactttccctaacaggagctgggcgcagtgttattcttctccatggggtctgctggcctccccgcccccgctggacaatgcgtgctttgagactcggtggcctgcaggcagcgggagaacaggggactgggcagccttcctcccaggggccccgcagttgggggagcgccaggcagggaacagggacagggagcgagccacgcaggaaggaaaaccataaaagtgccattttttccctcagccctgcacagaggcaggctttgaggacctagggccaggcagctggggcgggctggggttggggtgttaaaggtttgcgtgtcttttaacccctttcccccactgaaacattttattccggcacatacttaggccctgcagatcccacctcctcgccctcaatcttggtacctgctctggctgataatatgccactcggacttcaagtccgatctccctcaagtccaagtctc

SEQ ID NO: 3 - DNA, 2457 bp, Mus musculus
  source 1..2457: mol_type = genomic DNA
ctattaacttgttcaaaaaagtatcaggagttgtcaaggcagagaagagagtgtttgcaaaaagggaaaagtactttgctgcctctttaagactagggctgggagaaagaagaggagagagaaagaaaggagagaagtttggagcccgaggcttaagcctttccaaaaactaatcacaacaatcgcggcggcccgaggaggagagcgcctgttttttcatcccaattgcacttcgcccgtctcgagctccgcttccccccaactattctccgccagatctccgcgcagggccgtgcacgccgaggcccccgcccgcggcccctgcatcccggcccccgagcgcggcccccacagtcccggccgggccgagggttggcggccgccggcgggccgcgcccgcccagcgcccgcatgtataacatgatggagacggagctgaagccgccgggcccgcagcaagcttcggggggcggcggcggaggaggcaacgccacggcggcggcgaccggcggcaaccagaagaacagcccggaccgcgtcaagaggcccatgaacgccttcatggtatggtcccgggggcagcggcgtaagatggcccaggagaaccccaagatgcacaactcggagatcagcaagcgcctgggcgcggagtggaaacttttgtccgagaccgagaagcggccgttcatcgacgaggccaagcggctgcgcgctctgcacatgaaggagcacccggattataaataccggccgcggcggaaaaccaagacgctcatgaagaaggataagtacacgcttcccggaggcttgctggcccccggcgggaacagcatggcgagcggggttggggtgggcgccggcctgggtgcgggcgtgaaccagcgcatggacagctacgcgcacatgaacggctggagcaacggcagctacagcatgatgcaggagcagctgggctacccgcagcacccgggcctcaacgctcacggcgcggcacagatgcaaccgatgcaccgctacgacgtcagcgccctgcagtacaactccatgaccagctcgcagacctacatgaacggctcgcccacctacagcatgtcctactcgcagcagggcacccccggtatggcgctgggctccatgggctctgtggtcaagtccgaggccagctccagcccccccgtggttacctcttcctcccactccagggcgccctgccaggccggggacctccgggacatgatcagcatgtacctccccggcgccgaggtgccggagcccgctgcgcccagtagactgcacatggcccagcactaccagagcggcccggtgcccggcacggccattaacggcacactgcccctgtcgcacatgtgagggctggactgcgaactggagaaggggagagattttcaaagagatacaagggaattgggaggggtgcaaaaagaggagagtaggaaaaatctgataatgctcaaaaggaaaaaaaatctccgcagcgaaacgacagctgcggaaaaaaaccaccaatcccatccaaattaacgcaaaaaccgtgatgccgactagaaaacttttatgagagatcttgggacttctttttgggggactatttttgtacagagaaaacctgagggcggcggggagggcgggggaatcggaccatgtatagatctggaggaaaaaaactacgcaaaacttttttttaaagttctagtggtacgttaggcgcttcgcagggagttcgcaaaagtctttaccagtaatatttagagctagactccgggcgatgaaaaaaaagttttaatatttgcaagcaacttttgtacagtatttatcgagataaacatggcaatcaaatgtccattgtttataagctgagaatttgccaatatttttcgaggaaagggttcttgctgggttttgattctgcagcttaaatttaggaccgttacaaacaaggaaggagtttattcggatttgaacattttagttttaaaattgtacaaaaggaaaacatgagagcaagtactggcaagaccgttttcgtggtcttgtttaaggcaaacgttctagattgtactaaatttttaacttactgttaaaggcaaaaaaaaaatgtccatgcaggttgatatcgttggtaatttataatagcttttgttcaatcctaccctttcattttgttcacataaaaaatatggaattactgtgtttgaaatattttcttatggtttgtaatatttctgtaaattgtgatattttaaggtttttccccccttttattttccgtagttgtattttaaaagattcggctctgttattggaatcaggctgccgagaatccatgtatatatttgaactaataccatccttataacagctacattttcaacttaagtttttactccattatgcacagtttgagataaataaatttttgaaatatggacactgaaa

SEQ ID NO: 4 - DNA, 11 bp, Homo sapiens
  variation 10: note = n is a, c, g, or t
  source 1..11: mol_type = genomic DNA
srscsattans

SEQ ID NO: 5 - DNA, 7636 bp, Homo sapiens
  source 1..7636: mol_type = genomic DNA
cacacccacacgagatgggcacggagtagtcttgaaagacatgacaaatcaccagacctgggaagaagctaaagagccagagggaaaaagccagaagtcgactacctgggaggagggatagacaagaaaccaaactaaaggaaactaaggtaggtgctgaaaacaagtaccattttcaacattaactgatgccttggcttcatgctataatgccatgttgtgtttcactataacctcagagtgaatgaaagaggaaaatggagctagttgaaatttctgcctaaactagccagattttgagacactaagttatctcaaatcaagaaatcaccctaatgagaatttcaataacctcaggaatttaaggtgcatgcatcccccaccccccccttttttttttgagacgtagtcccgctctgttgcccaggctggagtacagtggcgcgatatcggctcaccacaacctctgcctcccaggttcaagggattctcccgcctcagcttccagagtagctgggactacagacacccaccaccatgcgtggctaatttttgtatttttagtagagagggggtttcgccatgttggccaggctggtttcaaactcctgacttcaggtgatccgcctgccacggcctcccaatttactgggattacaggggtgggccaccgcgcccggcctttttcttaatttttaaaaatattaaagttttatcccattcctgttgaaccatattcctgatttaaaagttggaaacgtggtgaacctagaagtatttgttgctgggtttgtcttcaggttctgttgctcggttttctagttccccacctagtctgggttactctgcagctacttttgcattacaatggccttggtgagactggtagacgggattaactgagaattcacaagggtgggtcagtagggggtgtgcccgccaggaggggtgggtctaaggtgatagagccttcattataaatctagagactccaggattttaacgttctgctggactgagctggttgcctcatgttattatgcaggcaactcactttatcccaatttcttgatacttttccttctggaggtcctatttctctaacatcttccagaaaagtcttaaagctgccttaaccttttttccagtccacctcttaaattttttcctcctcttcctctatactaacatgagtgtggatccagcttgtccccaaagcttgccttgctttgaagcatccgactgtaaagaatcttcacctatgcctgtgatttgtgggcctgaagaaaactatccatccttgcaaatgtcttctgctgagatgcctcacacggagactggtaagaaagaaatttatccttgaaaggccaagttccttaagggaaaagagagaaggagagagggttaagggatcatttccctcttgagcaatgatggaccattactataaagaagtgttattatcaactaatcctctggaaacccctttttccattataacttggtggcacctgccctttgaactatgtcccaggtctcaggagtgtgcattgagttgaaggacacagaattcggcagttgaacagtgtgcagtaagtttgagaacctatgggcttaggcatggtggaaacaaaaatgtatcgttatagttaaatgaaggtgatgtgtacatcttcacatagtgctggacacatgtgaataaatagcagatttattgctaattagccagaagacctaacgtcatagctcagggatgagcatgattttgttttgccaaaaatggcatggcaaatcacgatgagatttctgtaatacataatttgggtaattctttctatgtcagtaacggctgtctcttctccattctctgggtttgtggatgttactgggcagctctgagtttgggagcacctcccatgtctaattctcctaagtcctgggaagcgttgacccaactttatggtaaagataattccagaaagtttaatctactgacagtcaaacagaatgtagctagaagtccagtttggcttcaaaacctgtgctagtactcatgcttctgactggtagctgcaaggggtgggggatactcgggatactcataaagccgctaccacttttttgaaaatcaatttttcagtagttttcaaaaacttgagaatgaaccaactttaccaagaatgccattggtaacactgaacgctgtaaaatagcttaaaaagcgcatttacattatgactacagttgtaaagagtaggttgtggaaaaggaataagtaaacatgattgctatatttgagcctcagatttgaatgtcaccctgcttttcctcttttttagaatcagggactcactttgtcacataggctggagtgcaatggtgtgatcatggatcaccgcagcctcaaccctgagatcaagtgatcctcttgcctcagcctcccaactactaggacaagaggcgtgtgtcactatgcccagctaattaaaaaattatttttgtagagacagggtctcactttgcagctcgggctggtcttgaactcctgacctcaagtgatcctccaccctcagcttcccaagtcgctgggattacaggcgctgacccactctgcatggctattcacccagtttttctaaactatgcattaatgttcttgcctttataatttctttctttctttctttctttttttttttttgagacagggtctcattctgttgcccacgcgggagtgcagtggcgtgatcttggctcactgcaacctccgcctcctaggttcaggtgatttctcctgtctcagtctctcgagtagcaggtattacagatgtatgccaccacgcctagctaatttttgtagttcttagtagagaaggggtttcggtgtgttggccaggctggtctcaaactcctgacctcaagtgattcacctgccttggctgggcaccgcgcctggccacctttataatttcaaatgttaaaaatacattgctgggtttgggaatgagcaagtggggatgtgttttctttagcacacatcaagtgacagtttatataggtagctaatatttaggattttccccaattctaatcattagttgaaaggcttcctctgcttttcagatctacttgcaagagagaagagattgttaatttttgctgttttagagcctgtccctttgttatgtgactgcaggggtagaattgagagttgaacactgggaaaaccgcagagcaattaggtatataagtgatgactaaatctagatattcatttctagttacaaaatcagtaaatgccaggccctatgctagagaatttcaattggttacctcattttaattaataaaaaaataattttagagatgaggtcagagctagtaaagggaaggcctggattgaaacagaagcttatccggattcacatatcctgctggtcctagcattgagaactgggcagtcagttgctggttttgttttttatttttttgagacagtctcactctgtcacccaggctggagtgcagtggcactctcggcttactgcaatcacggcctcctgggttcaagtgattctcctgcctcagtctccccagtagctgggattacaggcatgcgccaccactcctggctaatttttgtaatttttagtagagatggggtttcaccatgttggcacgctggttttgaactcttgacctcaagtgatctgcccaccttggcctcccaaagtgttgggattacaggcatgagccatcccacctagctgaggtgctggttttatagaatccccagaatcatggcatttaagcaatcatgtaggtgttgatgaagatcataaacaaagtgatttagggtgagatgcaatacgtgaaaattggtgaatctccattctgacctattaacacccagtgtgggagcttttgagcatcagtttaaagcaaaaggtggtagcgccggcctgatgaggtggctcacacctgtaatctcagtacttcgggaggccgaggcaggcggatcacgaggtcaggagttcgagaccagcctcaccaacattgagaaaccctgtctctactaaaaatacaaaattagccaggcgtgatggtgcctgcctgtaatcccagctactcaggaggctgaggcaggagaatcgcttgaacccaggagatggaggttgcagtgagccgagattgcaccatcgcacttcagcctgggcaacaagagtgaacctccatcctaattttaaaaaaaaggggtagcgccgctcagcaatgcattggccaccattatagatctctcccaacgcagtctattatgtacaaaatggagatactgataagacttcttggagtaatactatataaagcttgccaaagtgccagggctgcttaagaaattgcttcttattacttagatctggggttctgggaattatcaaagtactttgaaaacaatttttttaaaggatattttaatatttgaaaaattttagacaaaagtgtccttttatttgttcccaacagtctctcctcttccttcctccatggatctgcttattcaggacagccctgattcttccaccagtcccaaaggcaaacaacccacttctgcagagaagagtgtcgcaaaaaaggaagacaaggtcccggtcaagaaacagaagaccagaactgtgttctcttccacccagctgtgtgtactcaatgatagatttcagagacagaaatacctcagcctccagcagatgcaagaactctccaacatcctgaacctcagctacaaacaggtaggcttgttttgtccttggaataaggtgaacaaaaattggactaatttgcatggctaagacctctgtggatgcatgtagatgtgtgtactatgtgtccgtacatcgcctcttgcaaataatttatgaagatgaaatgcttttgtaacttccttcacctctttctttccttaaatattctattatgtgaataattatgtcataatttaaccactttcttgcacagaccaatattgtgaaaatctttccaacgtttccttaataaaaaagaagtatctaactccacttaccagggtaggagaaaccctaactcacactggttctcattaaaataaaaactttttttttcctttttttctttctgccagcaactccagcttgttttgttttttatctgtgtgcattcaataaggccaatcattgtttattacttgttggccattttccttcattaattggcttatcctcttctaggctttatttccttcttttcttttgtttatttttgagacggagtctcactctgtctcccaggctggagtgcagtggcctcataatgagacatcataatgacattagcattacttggtttaagtacaaatggatgaaacctccacctcctgggttcaagggattctcctgcctcagcctcccaagtagctgggattacaggcgcccgccactacacctggctaattttactgtattttttagtagagatggggcttcaccatgttggccaggctggttttcaactcctgacctcaagtgatccacgtgcctctgcctcctaaagtgctaggattacaggtgtgaactaccacacccggcccttgcctttattttctatccaaaatgttcatttctctctttttttctgagacagtctggttctgttgtcacgcagctggagtgcagtgatgcaatcttggctcactgcagccttcacttcccaggtgcaagcgatcctcccgtctcagcctcctgagaagctgggaccacagacgtgcagcattacacccggctaattttttgtatttttgtagacacggtgtttcctcatgttggctagcctgtagcgaactcctgggctcaagcaatctgcccgccttggccttccaaagtgttgggattacaggcatgagatatggcacctggccaggaataaaagttagcaatatactttgattcaaagtacctctgtattatgaatattttacaatttctatcattttttcctgcaggtgaagacctggttccagaaccagagaatgaaatctaagaggtggcagaaaaacaactggccgaagaatagcaatggtgtgacgcaggtaacaggaaacttcattctgttctttcctttcagtgatctttcaatcttgtccatccctgaaacacacaactccagtcacagacagttctggttgtccttgtaccctttctgttaatccctccttctctttcagaaggcctcagcacctacctaccccagcctttactcttcctaccaccagggatgcctggtgaacccgactgggaaccttccaatgtggagcaaccagacctggaacaattcaacctggagcaaccagacccagaacatccagtcctggagcaaccactcctggaacactcagacctggtgcacccaatcctggaacaatcaggcctggaacagtcccttctataactgtggagaggaatctctgcagtcctgcatgcagttccagccaaattctcctgccagtgacttggaggctgccttggaagctgctggggaaggccttaatgtaatacagcagaccactaggtattttagtactccacaaaccatggatttattcctaaactactccatgaacatgcaacctgaagacgtgtgaagatgagtgaaactgatattactcaatttcagtctggacactggctgaatccttcctctcccctcctcccatccctcataggatttttcttgtttggaaaccacgtgttctggtttccatgatgcccatccagtcaatctcatggagggtggagtatggttggagcctaatcagcgaggtttctttttttttttttttcctattggatcttcctggagaaaatactttttttttttttttttttgaaacggagtcttgctctgtcgcccaggctggagtgcagtggcgcggtcttggctcactgcaagctccgtctcccgggttcacgccattctcctgcctcagcctcccgagcagctgggactacaggcgcccgccacctcgcccggctaatattttgtatttttagtagagacggggtttcactgtgttagccaggatggtctcgatctcctgaccttgtgatccacccgcctcggcctccctaacagctgggatttacaggcgtgagccaccgcgccctgcctagaaaagacattttaataaccttggctgccgtctctggctatagataagtagatctaatactagtttggatatctttagggtttagaatctaacctcaagaataagaaatacaagtacaaattggtgatgaagatgtattcgtattgtttgggattgggaggctttgcttattttttaaaaactattgaggtaaagggttaagctgtaacatacttaattgatttcttaccgtttttggctctgttttgctatatcccctaatttgttggttgtgctaatctttgtagaaagaggtctcgtatttgctgcatcgtaatgacatgagtactgctttagttggtttaagttcaaatgaatgaaacaactatttttcctttagttgattttaccctgatttcaccgagtgtttcaatgagtaaatatacagcttaaacataa

SEQ ID NO: 6 - DNA, 20342 bp, Pan troglodytes
  source 1..20342: mol_type = genomic DNA
tgagacagggtctcactctgtcacccaaactggagtgcagcagtgcaatcataacttaccgggctcaagcaatccttccacctcagcctccctagtggctgggactacaggtgtgcaccaccaggcccagctaatttttgtattttgttgtagagacaggttttcgccacgttgtccaggttggtctcaaactcgtgggctcaattgatccccttgccagggcttctcaaagtgctgggatcataggcatgagccaccatgcctaacccttatctgagtttttgtaacagtttgaccaacaagcttgttgtcgtaaagaagtaagagtcctgcaaatttgcgtcggcccgcccggccaattgtttttttattattgaaaggtaggaacactgagaaaagcagggaaagagtaggaccttcctggtaggagcagaaacccataaacttagacaaggtaaagcctcataaatcctacagtcaggccagtggcagtggctcacgcctgtaatcccagcattttgagaggccaaggtggacggatcacttgtgcccaggagttctagagcagcctggctcacatggaaaaacctcatctctactaaaaacacaaaaattagcagagtgcaatgtggcatgtgcctgtaatcccagctacttgggaggctgagacaggagaactgcttgaacctgggaggcggaggttgcagtgagccgagatcgcaccattgcactccagtctgggcaacagtgggagactccatctcaaaaaaaaaattagctgggcatggtggtgcacacctataatcccagctactcgggaggctgaggtgggaggactgcttgaacccaggagttggagactgcagtgaactatgatagcaccactgtactccagcctgggagaagtcaaaaaagagtacactaagtttggaccggcccatgtagctcatgcctataatcccagctctttggaaagccagggcagaacaatagcttgaggccaggagttcaaggacagcctggacaacgtaacaagaccccagtctctacaaaaataaattttaaaaaaattttatttcataaaaacaattagccaggtgtggtggtgcatgcctgtaattctagccactggagaggctgaggcaggaggatcacttgagcccaggagttcgaggctgaggtgagctatgatcgatccactgcactccagcctgggtgacacagccagacactgtctcaaaaaaaataaaaaataaaaaataaatgctcatgtaaatgtaaactgaaaaaaagtaaaaaataaaaataagtaatgttaaaaataaaatgattgagcaggcgcggtggctcacgcctgtaatcccagcactttgggaggccgaggcgggcagatcacaaggtcaggagatcaagaccatcctggctaacacggtgagacctcgtctctactaaaaatacaaaaaaaattagccgggcgtagtggcaggtgcctgtaagtcccagctacttgggaggctgaggcaggagaatggcaggaacccaggagacggagcttgcagtgagccaagattgcgccactgcactccagcctgggcgacagagcgagactctgtctcaaaaaaaaaaaaaaaaaaagatttaaaaaatgaatgtattcctcattcctccacagctcaggtgacagaaaactgaaatctatttttttgttgttgttgttgatggtgctggggaatgaacccagggccgtgtgcagaaagctgaaattttatggctggaagtgcccaaaaccaacagagcagtttgaaaaataggagtgaattggctgggcacggtggctcacacctgtaatcccagcactttgggaggccgaggcaggtggatggtgaggtcaagagatcaagaccatcctggctaacacggtgaaaccccatctctactaaaaaatacaaaaaaaatttagccgggcatggtggcggacgcctgtagtcccagctacttgggaggctgaggcaggagaatggcgtgaacccaggaggcggagcttgcagtgagccgagatcacgccactgcactccagcctaggcgacagagcgagactccgtctcaaaaaaaaaaaaaaaggagtgaatcctaccaaaaacaactaaaaagggggggaaaaaaccatagagaaagtcattcctaaaagtctgatcatattttctgcccaaattcctgactgaccagcgaattttgcaagcacaggtgtctccaggccaaaaagcagcagatgaagaccctagctcaggatagagagatcagctgttgctcgttgctgggaagataacgtttttgcctactagaacaaaaatacaaaatgcccagaagaacacaagagaatccagaatttctataacataatatttgcaacatcaaactttcaatccaaaatgactagctcacgtcaccccccacaagtgttgggctgtgaactactcctaaagactggcggtagatcccaggagcctacctccctggtgccatgttgctggatgtcccgcacctgtcccatactatagctgtgctagatgttctgattctaataaactctgaattttcctcagctaatacatgatcttgaccacgaatctccacaaggatctcttgtaaactgtgagggaagctgaagccaatcctatgactccgacactctgttcagcttgccttctgtcagtctttgttcaaccgtggccctgttcatacacacctgcgggcttgctacccaattttctaaagctaaataggtgacaaaagagaaagagaggccgggcgcagtggctcacgcctgtaatcccagcactctgggaggccgaggtgggcagatcacgaggtcaggagattgagaccatcctggccaacatggtgaaaccccgtctctactaaaaaatacaaaaattaaaaattagctgggcatggtggcggcacctataatcccaactacttcccagctactcaggaggctgaggcaggagaatcgcttgaacccgggaggtggaggttgcagtgagccaagatcacaccattgcactccagccttggcgactgagcaggactcaaaaaaaaaaaaaaagatgaaagagactgatacacttttagttaaactccacagcaacagatttcttttttccaatgtcctcagcaaatttgtatcatcattacaatatgtaaacacactcttccaagaacatttccatgtctgcctgctggcttagtttataaccactatgaatcacttctaaaagcagtgtcacttattctgctaaggttttcaatccattttttcccctagggcctccagtttattccatttagaggaccttctacttcatcaagtacatctgagtatatctgatccatcattctcaattgatttctatcctgaaccacatgtaattgaagaatatgtctgggcatccattcccttgtccctgaacatgtgatggttaaggaaagttccctatcattgtaaaacagttgggagattggtgagcccagtgccacggtagaccactagaggggggtgtgactctctcagtgagcttgacattgacttaatggctttgcccaaagagcgacagtctaatctgtgtttcaaaagcaagagttccagtattctagcatgtcctaaaggtatcagtacaagtacttgagttattttcatatttcaaaaatgttcacggaaatgttacttttactaccaattatttagttccatagaggctactcttatgctttccaaatagatttatctattatttttgtcagatatgttctaaaaatagaggaaaagcaaaaaatgcctcctaattttatttcctagagataactattacttttatttctatatctgtatctatctttccacacttaatttatctccatatatgacatgaatgggatcaccttaacctataaacgaatctgctcttttaccttaataatggaattttcccatacatttaaatctgcttcatcctttttgtttttgttttgttttgttttgagacagggtctcactctgttgcccagactggagtgcagtggctgaatctcagctcactgcaacctccgtctcccgggttcaagcaattttcctgcctcagcctgccaagtagctgagatacaggcactcgccagcatgccgagcttatttttgtatttttagtagagacggggttttgccatgttggtcaggctggtctcaaactcctgactttgtgatccaccagcctcagactcccaaagtgctgggatgacaggcatgaaccactgcacttggccatcttttttgttttttatggctacataagtactccaatatatcataacacatttaaggaaagtcctattgatatacatttagatttaaaaaaatatttttggccgggcgcagtggctcacacctataattccagcactttgggaggccgaggcgggcaaatcaccaggtcaagagatcgagaccatcctggccaacacagtgaaaccccgtctctactaaaaatacaaaaattagctggcgttggtggtgcgcaactgtagtcccagctactcacgaagctgaggcagaattgcttgagcccgggaggtggaggttgcagtgagccgagatcgcgccactgcactccagcctggtgacagattgagacttcgcctcaaaaataataaataaataaaaataaaaataaaaaattgtttagctattaccaacagtgctgtaatgagtatctttatgtggttgtttgattaatgccttggcatacattcctagggggtgtatcaaaggatgatcacattttacattgccatgcaggtaactgacattaattgtatatgttctatgagctagacaaaatacatattagatgacagaaatcacttcaagtattatttctatttacacaaaagggaaaacctaaaagcctgcaaaataatttgcccaaggtcttaatggtggagctgagattttaatgtgtgtattttcttttcttttttcttttttttgagacagagtttcacacctatctccctggctggaatgcggtggcatgatctcggctgattgcagcctctgcctcctgggttcaatcaagtgattctcctgactcagcttcccgaatagctgagaccacaggcatgcaccaccacgcccggctaatgtttgtatttttttgtagagattggattttgccatgttggccaggctggtcttgaacttctggcctcaagtgatccacccgcctaggcctcccaaaatgctgggactacaggtgtgagcaacctctcacggcctactgttttttgattgtttgttttttgagacagggtctttctctgtcgctcaggctggagtgcagtggcacaatcacagctcgctgcagcctcaaccatcaggctcaattgattctccctcctcagcttcccaatcagctgggactacaggcaagcgccactgtgtccagctaatttgttttattttttgtagagatgggaatttgctatgttgcccagccttgtctagaactcccgggctcaagtgatcttcccacttcagcctctcaaattgctgggactacaggtgtgagccatggcacccagctttcatgtaacctagagtgaagcaggactctatcaactttcccccaaactgagaattgttacttctatttcctaaataatttattatttatctattcatctgaaatgtaaattctgggtgtacgtttttatcctcccagaaaatgtttgtatctatgtggcttaaattttttaattcaaatagaataaatcattcatatggttttgtgccttgtttttctttctttcttttttttttttttttttttgagacagaaccttgctcttgtcacctaggctggagtgagtgtagtggcatggtttctgctcactacaacctccacctcctggattgaagcgattctcctgcctcagcctcccaagtagctgggattacaggtgcccaccaccacacccggctactttttgtatttttaatagagacagggtttcgccatgttggtcaggctggtctgaactcctgacctcgtgatctgcccagctcagcctcccaaagtgctgggattacaggcgtgagccactgctcccggcctgtttttctaactaataatatagtgatctaaactagaattcttaatcacatatgcagtttctatatatatttcgtagtcttcctggactctctaccttgtaaaattgatttagttgtagctgtactagagcagatatacactggttgctgtagcagaaactgttcgttttccattcacatacaattatcttaacttcttctgaaggccatgtcttttagttaggaggtaaatctttttattttattttattactatttttttagagacagggtctccctctgtcacccaggctggagtgcagtggtgcagtcatagctcattgtagcctcaaactcctgagctcaggcaatcctctagcttcagcctcctgactggctaggaccaaaggcacgcaccatcacacctggctaagtttttaaatttttctgtagacatggagttttactatgttgaccaggctggtgtcaaactcctggcctcaagtgttccttcagcctcggcccccaaaatactaggataacagatgtatgccactatacccagcggtgggaggcaaattgtaatgatctcattcgctttgccaaattgttagtttaatcatgggcttatgtcaattttggataatatgtgaggagaagtcgcagaaagacttctgagatttttctggcttttcaattgtctgcacataaagtcaatatctgcaactgcccttaattatagcaataccagcgatcagtttttatctctaaatattattccttgctaaaagtaactaatgcttcttggagaaatggccaattctagaagaatgtgtaaaatgggctgacaaccaattgcacaaaaacaacaacaaaaacaaaattagccgggcgtggtggcgggcacctgtaatcccagctacttgggaggctaaggcaggagaatcacttgaacccaggagacagaggttgcagtgagccgagattacactactgcactccagccttccagacaggagcgagattccatctaaaaagaaaaaaaagccgggccggtggctcacgcttgtaatcccagcactttggggggccgaggcgggcagatcacgaggtcaggagattgagaccatcctggctaacacggtgaaaccccgtctctgctaaaaatacaaaaaattagccaggtgtggtggtgcatgcctgtaattccagctactcaggaggcttaggcaggagaatcacttgaacctggaaggcagaggttgcagtgagcagagatcacgccactgcactccagcctgggcaacagagccagacaaacaaacaaacaaacaaaaacaaacaaaaaaaaatccatgatctctaacatagctgttgaagaagtaaaaaaaaaactccaaaaatcattttgattagggtggtatacttgagccaggaacagtggcttatgtctgtaatctcaaaactttgggaggccaaggcaggtggattgcttgaagccagctgggattacaggcacccgccaccatgcccagctaatttttttgtgtttttagtagagaaggggtttcaccacataggccaggttggtcctggactccctgacctcaagtgatccacccaccttgacctcccaaagttctaggattacagacatgagccaccgcatccggctatgaaatcattctttgatcatctccttacttctgtcatatgtaacacactgtttcccagtgaatcctaatctaggctcttataaataggcataatcattaaaatagactaatctctggtcttgctcccttccaataccttcccgtagtacagggagaacaatctaaaatgcaaatctaagtatgttactccttaaagcttttaaaggctcatattttgcctatcctattttagtgtttctctagtataccgtcttatactaccatcctttctcccttttttttttttttttgagaccccatctctactaaaaatacaaaaattagctgggtgtggtggcacatacctgtaatcccagctactcgggaggctgaggtaggagaattgcttgaacccaggaggcagaggttgcagtgagccactacactccagcctgagagacagaaaaagagtccatctcaaaaaaaaaaaaaaaaaaaaaaagctgggcatggtggctcattcctgcaatcccagcactttgggaggctgaggcaggcagatgatgaaatcaggagttggagaccagcctgaccaacacgctgaaaccctgcctctactgaaaatacaaaaattagccaggcatggtggcgtgtgcctgtagtcccagctacttgggagtctgaggcagaattgcttgaacctggggggcagaggttgcagtgagccgagattgcgccactgcactccagcctgggtgacacagcgagactctgtctcaaaaaataaaataataaaataaaataaaaataaagattagcttcaaggctaacagagtatcttcctattgtagcctgagctctcagaagctagaagagggcttgagtgcagactgcagcatattagagagcacactgattaaaaaaacaaaaacaaaagaacaaaaaacaaacaagagtcttcatctgtcacacaggctcactgcagtctcaaaatcatgggatcaagggatcaccctgcctcagcctccaaagtagctagaactacaggtgtgcatgaccataactggctactttttttttttgtattttttctagagttggggtctcactatgctgcccaggctggtctcaaactcctgggctcaagcaatccacctgtctcagcttcccaaagtgttgggattacaggtgcgagctgccacaccccgcctatagcatgcactcttgattttctgagaaacaatcaacaaagtttaaccctgctactgcctaagctctcaaagtgtctgtcaaactcttgagtttatatgtatttttgaagttcagtagttgaggtcaaaacacccacctttggggttgggtctgatcgaatttgatgttaacattcttgagggaagcttgagttcactcccaagttctcacatatggtgtctgataagacatcagactcaaaggaagaggggagtttattccacatcaaactatgtaactttctggggttattgcaaagctatataacataatgcaacagagagcaatatctggggctttggagtcaagcaattaagggcttgaatccagattttaccacatacaaccagtaccacctttggcatgttgcttaagctcttagcttttttcttctataaaaattattacccaggccagatgcagtggctcatgtttgtaatcttagcactttgagaggcccaggtgagagggtcacttgagcccaggaattcaagactagcctgggcaacatagcaagagccctgtctctacaaaaaagattttaaaaattggctgagtgtggcagtgtgcacctatagccccagctactgaggaggttgaggcggaaggatcatttgagcctaggagattgaggctgcagtgagccatgaatgcaccactgcactccagtctgggtaacagggtttttaatttttttaatttaaatttaaaatttaatttttaatttaaatttaaaatttaatttttaatttttaaatttaatttttaatttaatttaaattttagtttaaaagttaaaattcaaattttaaatttaaatcaaaatttaaacatataatgtggctgggtgcggtggctcatgcctgtaactccaacactttcagaggctgaggccggtggatcacctgtggtcaggaggagttccagaccagcctggccaacatggtgaaacaccgtctctactaaaaatataaaaattagccaggcatgctggtgggtgcctgtagttccagctattcaggaggctgagggaggagaatcgcttgaacccggaaggtggaggttgcagtgagccaagatcgcgccattgcactccaacctgggaagcaagaccaaaagtcggtcactaaataaaaacttccagcctcgtctgaaggtagtcagttacgtcaattgtttgttcacggtgaattacagatcgaactccttgttctactcttccccacttctcactactgcacttgtcttaaagaaaaacagagctttagcttcttaacccacaaatggtagttaacctcagagtatagcttaaggttcaagtgtaatacagtttataaatattttcctatgttgttgagtgctgtgtaaatcttttttttttttgagatggagtctcgctctgttgcccaggtgggagtgcagtggcactatctcggctcactgcaacctccacctaccgggttcaagtgattctcctgcctcagacttctgagtagttaagattacaggcatgtgccaccatgcccagctaatttttgtatttttagtggagacaaggttttatcatgttggtcaggctgatctcaaacccctgagcttgtgatccaccagcctcagcctcccaaagtgctgggattacaggcgtgagccaccgtgcccagcccagtgctatgtaaatctaaagtactcttaaaggtatgtacctccaaacggaactcattttaattttcagttttttgtttttttttttaatggagacagggtcttgctgtctcacaggctggagtgcaatggtgcgatctcggctcactgtaacctccgcctcccaggttcaagcaattctcctgcctcagcctcctgagtagccgggattataggcccctgccatcatgcccgggtactttttatttaggagacggggtttcgccacgttggccaggctagtcttgaactcctgtcctcaggtgatccacacacctcggcctcccaaagtgttaagattataagcttgagacaccatgcctggcctgcaaatagatttcatagctgctcaatgagccaagaactactttcgtggccaggaataactgcccctttgtctccctgataagagcacattcacacctatgtgtccaggtacatctgttctgaagatgcctggccctaattgaatctcaaattctcacccttggttcttgtccttagctcctgtgactacagcagtgtatcagaggacatataaacactgctaccctttctactccacatgcaccttatcctaaatggattaatgtatcccatctttttgcctgttttgttccatgtatttaattgatttaatacgattctagcatcttaatttgatctgtgagcttttgtttcttaatagtttgcttggtagtatcatcagaggtagtgctaccactgcattgaagtaatttcccagatgcttaacctcctaaaattctcaaggacactttattcaaggaccacagagtttacaccaactacccagaagccaggaatagcttaaggagagactcaccaccagcagcttcttttcaatcaagtttcacttcaacctcacacccaggaacccattcaaattcctacatttcggtatccttagtcgaactaacttcctgtgccggaagcttttgtctgtctcagtgacttctttctttaacaaattcccttcatctcccccttcagtcaaagcccatgggggccccaggaggcatgcaatatttaccaagggctctcccccactttcctgcctctgtctggcagttgtttgcctttacttttaggtttgtagtcacagcctgttttttcttccttggacacaccagcttttctgaatggtaggattatttacagtagaattaaccttgtccttcaccccgagaactgagcttgaaattcactaatcaaggcctgtatttctcccacttctgagttttaaatttatattatgaaattcagaaaacccaggcaaattcaatccatgcttctctccttcaggtacaaactgaaatgaaaatgaaagctgagaaatgaaaataattaattttaaaaactaaaatatggtaaagctactaaaatatagtattggaagtaacacacacctccttttgggaaaagaaaggaaaattttctagagaaaggaagaaatgttaaacagagccttgtactatcctttttgcctaatctcgtattatatttgtttatttttgagacagtgacgctctgtcgcccaggctggagtggggtggtattatctggggtcactgcaacctcccgggttcaagcgattatcctgcctccgccttccaagtagctgagattacaggcgcaagccaaaacctctggcaaatttctgtatttttagtagagacagggtttcgccatattggccatgctaaacttgaactcctgacctcaggtgatccacctgccttggtctcccgaagtgctgggattacaggtgtgagccacggcacctggcccactaatcttactgcttttgactgtagttattattgttactttaaagagtattccaaatacatctctaaattcttacatgccaagaggttgaagattaatactgggtgattaaaaaaaaaagttcggaaaacataatacagggctaggctggtggctcatgcctgtaatctcagcacttcgggaggccaaggctggtagactgcttgagctcaggagtttgagactagccaggccaacatggggaagccccgtctctcctaaaaacgcaaaagttagctggcatggtggtgtgcacctacagtctgggctatttgagagactcaggcaggagaattgcttgaatccggaaagtcgaggctacagtgaggtgaaatggtgccattaagccccagtctgagcagcagaataagcccgtcttaaaaaaataaaaaagaaggctgtggctcatgcctgtaatcctagcactttgggagaccgaggagggtggatcacctgaggtcaggagttcgagaccagcctggtcaatatggtgaaaccccatctctactaaatacaaagaattagctgggcatagtggcaaatccctgtaataccagccactcgaaaggctgaggcaagagaatcgcttgaacctgggaggtgcaggttgcagtgagtagagattgcatcattgtgctccagcctgggtaacaaaagcaaagttccatctcaaaaaaaaaaaaaaattgcccagacacagtggctcacacctataatcccaccactttgggaggccgaggcaggcggatcacctgaggtcaggagttcgagaccaggctggccaacatggtgaaaccccatctctactaaaaataccaaaaattagccgggtgtaatgttgggtgcctgtaatcccagctacttaggaggctgaggcaggagaattgctcgaacccaggaaacagaggttgcagtgagccgagatcgcaccacaaaaaaacaaaaattacctgggcttggtggcaggtgcctgtagtcccagctactcggcagaggctgaggcaggagaattgattgaacccaggaggcggaggttgcagtgagccaagattgtgccactgcactccagcctgggcaatagagcgagactgtctaaaaaaacaaacgataggccaggcgcagtggctcacgcctgtaatcccaacattttgggaggccaaagctggtggatcacaaggtcaggagttcaagaccagcctggccaacatagtgaaaccctgtctctactaaaaatacaattagctgggcatggtggctcgcccctgtagtcccagctacttgggaggctgaggcaggagaatcacttgaacccgggaggcggaggttgcggtgagcagagatcgctccactacactccagcctgggcaacagagtgagactccagtcttaaaaaaaaacaaaataaaacaaaaaaaaaaaacacaaacacttggaactataccttacttcttctcttggccaattatctagataattagactggatagtcttagagagtaacattggacaattagggaaatgagagaaaagactggaaaaaccactctgataacctgcatcatgctgcttcagagtgaagggaagtgctcgcagatcagatacatttagggcaggcacaagatgggaaaagacagtaaaggattattagtgtaattcacagatgcctgcgtagctgctcttaaggtgagaacataaatcggtttccactagccttagaatttacttacatataggcctctgatgaaactttaaatgttagcatcaattacagattcatacactgaaataacccattacatttgtagattacctacaatgcacgtaagtgcccttttttctaaaactggcgtatttattttttatttatttatttatttattcatttatttatttttgagatgggagttttgctcttgtcgcccaagctggagtgcagtggtgtgatattggctcactacaacctccacctaccaggttcaagcgattctcctgcctcagcctcccaagtagctgggactacaggcataggccaccacgctcagctatttctacgcatttctaagatagcagtgtcctcagctaatttccttctccaccccaaccaaaaatttaacaaagatttatgtttaagctgtatatttactcattgaaacactcggtgaaatcagggtaaaatcaactaaaggaaaaatagttgtttcattcatttgaacttaaaccaactaaagtagtactaatgtcattacgatgcagcaaatacgagacctctttctacaaagattagcataaccaacaaattaggggatatagcaaaacagagccaaaaacggtaagaaatcaattaagtatgttacagcttaaccctttacctcaatagtttttaaaaaataagcaaagcctcccaatcccaaacaatacgaatacatcttcatcaccaatttgtacttgtattccttattcttgaggttagattctaaaccctaaagatatccaaactagtattagatctacttatctacagccagagacggcttctatcaatgttgtccttagcagccaaggttattaaaatgtcttttctaggcagggcgcggtggctcacgcctgtaatcccagctcttagggaggccgaggtgggcggatcacaaggtcaggagatcgagaccatcctggctaacacagtgaaacctcgtctctactaaaaatacaaaatattagccgggcaaggtggtgggcgcctgtagtcccagctgcttgggaggctgaggcaggagaatggcgtgaacccgggagacggagcttgcagtgagccaagaccgcgccactgcactccagcctgggcgacagagcaagactccgtctcaaaaacaaacaaaaaaaaaagtattttctccaggaagatccaataggaaaaaaaaaaaaagaaacctcgctgattaggctccaaccatactccacccctccatgagattgactggataggcatcatggaaaccagaacacgtggtttccaaacaagaaaaatcctatgagggatgggaggaggggagaggaaggattcagccagtgtccagactgaaattgagtaatatcaatttcactcatcttcacatgtcttcaggttgcatgttcgtggagtagtttaggaataaatccatggtttgtggagtactaaaatacctagcggtctgctgtattacattaaggccttccccagcagcttccaaggcagcctccaagtcactggcaggagaatttggctggaactgcatgcaggactgcagagattcctctccacagttatagaagggactgttccaggcctgattgttccaggattgggtgcaccaggtctgagtgttccaggagtggttgctccaggactggatgttctgggtctggttgctccaggttgaattgttccaggtctggttgctccacattggaaggttcccagtcgggttcaccaggcatccctggtggtaggaagagtagaggctggggtaggtaggtgctgaggccttctgaaagagaaggaggcattaacagaaagggtacaaaggacaacaagaactgtctgtgactggagttgtgtgtttcagggatggacaagattgaaagatcactgaaaggaaagaaacacaatgaagtttcctgttacctgcgtcacaccattgctattcttcggccagttgtttttctgccacctcttagatttcattctctggttctggaaccaggtcttcacctgcaggaaaaaatgacagaaactgtaaaatattcgtaatacagaggtactttgaatcaaagtatattgctaacttttattcctggccaggtgccatgtctcatgcctgtaatcccaacactttggaaagccaaggcaggcagattgcttgagcccaggagttcgctacaggctagccaacatgaggaaacaccgtgtctacaaaaatacaaaaaattagccgggtgtaatgctgcacgtctgtggacccagcttctcaggaggctgagatgggaggatcgcttgcacctgggaagtgaaggctgcagtgagccaagattgcatcactgcactccagctgggtgacaacagaaccagactgtctcagaaaaaaagagagaaatgaacattttggatagaaaataagggcaagggccgggtgtggtggttcacacctgtaatcctagcactttaggaggcagaggcaggtggatcacttgaggtcaggagttgaaaaccagcctggccaacatggtgaagccccatctctactaaaaaatacaataaaattagccaggtgtagtggcgggcgcctgtaatcccagctacttgggaggctgaggcaggagaatcccttgaacccaggaggtggaggtttcatccatttgtacttaaaccaagtaatgctaatgtcattatgatgtctcattatgaggccactgcactccagcctgggagacagagtgagactccgtctcaaaaataaacaaaagaaaagaaggaaataaagcctagaagaggataagccaattaatgaaggaaaatggccaacaagtaataaacaatgattggccttattgaatgcacacagataaaaaacaaaacaagctggagttgctggcagaaagaaaaaaaggaaaaaaaaagtttttattttaatgagaaccagtgtgagttagggtttctcctaccctggaaagtggagttagatacttcttttttattaaggaaacgttgcaaagattttcacaatattggtctgtgcaagaaagtggttaaattatgacataattattcacataatagaatatttaaggaaagaaagaggtgaagttacaaaagcatttcatcttcataaattatttgcaagaggtgatgtacggacacatagtacacacatctacatgcatccacagagatcttagccatgcaaattagtccaatttttgttcaccttattgcaaggacaaaacaagcctacctgtttgtagctgaggttcaggatgttggagagttcttgcatctgctggaggctgaggtatttctgtctctgaaatctatcattgagtacacacagctgggtggaagagaacacagttctggtcttctgtttcttgaccgggaccttgtcttccttttttgtgacactattctctgcggaagtgggttgtttgcctttgggactggtggaagaatcagggctgtcctgaataagcagatccatggaggaaggaagaggagagactgttgggaacaaataaaaggacacttttgtctaaaatttttcaaatattaaaatatcctttaaaaaaattgttttcaaagtactttgataattcccagaaccccagatctaagtaataagaagcaatttcttaaccagccctggcactttggcaagctttgtatagtattactccaagaagtcttatcagtatctcaattttgtatataatagactgcgttgggagagatctataatggtggccaatgcattgctgagcggcgctaccccttttttttaaaattaggatggaggttcactcttgttgcccaggctgaagtgcgatggcgcaatctcggctcactgcaacctccatctcctgggttcaagcgattctcctgcctcagcctcctgagtagctgggattacaggcaggcaccatcacgcctggctaattttgtatttttagtagagacagggtttctcaatgttggtcaggctggtctcgaactcctgacctcgtgatccgcctgcctcggcctcccgaagtactgagattacaggtgtgagccacctcatcaggccggcgctaccaccttttgctttaaactcatgctcaaaagctcccacactgggtgttaatagttcagaatggagattcaccaattttcacgtattgcatctcaccctaaatcactttgtttatgatcttcatcaacacctacatgattgcttaaatgacatgattctggggattctataaaaccagcacctcagctaggtgggatggctcacgcctgtaatcccaacactttgggaggccaaggtgggcagatcacttgaggtcaagagttcaaaaccagcgtgccaacatggtgaaaccccatctctactaaaaattacaaaaattagccaggagtggtggcgcatgcctgtaatcccgctactggggagactgaggcaggagaatcgcttgaacccaggaggccgtgattgcagtaagccgagagtgccactgcactccagcctgggtgacagagtgagactgtctcaaaaaaataaaaaacaaaaccagcaactgactgcccagttctcaatgctaggaccagcaggatatgtgaatccagataagcttctgtttcaatccaggccttccctttactagctctgacctcatctctaaaattatttttttaattaaaatgaggtaaccaattgaaattctctagcatagggcctggcatttactgattttgtaactagaaatgaatatctagatttagtcatcacttatatacctaattgctctgcggttttcccagtgttcaactctcaattctacccctgcagtcacataacaaagggacaggctctaaaacagcaaaaattcacaatctcttctctcttgcaagtagatctgaaaagcagaggaagcctttcaactaatgattagaattggggaaaatcctaaatattagctacctatataaactgtcacttgatgtgtgctaaagaaaacatccccacttgctcattcccaaacccagcaatgtatttttaacatttgaaattataaaggtggccaggcgtggccagccgaggcaggtgaatcacttgaggtcaggagtttgagaccagcctgaccaacacagcgaaaccccttctctactaagaactacaaaaattagccaggcgtggtggcatacatctgtaatacctgctactcgagagactgagacaggagaaatcacctgaacctaggaggcggaggttgcagtgagccaagatcacaccactgcactccagcgtgggcaacagaatgagaccctgtctcaaaaaaagaaagaaagaaagaaagaaattataaaggcaagaacattaatgcatagtttagaaaaactgggtgaatagccatgcagagtgggtcagcgcctgtaatcccagcgacttgggaagctgagggtggaggatcacttgaggtcaggagttcaagaccagcccgagctgcaaagtgagaccctgtctctacaaaaagaattttttaattagctgggcatagtgacacacgcctcttgccctagtagttgggaggctgaggcaagaggatcacttgatctcagggttgaggctgcggtgatccatgatcacaccattgcactccagcctatgtgacagagtgagtccctgattctaaaaaagaggaaaagcagggtgacattcaaatctgaggctcaaatatagcaatcatgtttacttattccttttccacaacctactctttacaactgtagttataatgtaaatgcgctttttaagctattttacagcgttcagtgttaccaatggcattcttggtatagttggttcattctcaagtttttgaaaactactgaaaaattgattttcaaaaaagtggtagcggctttatgagtatcccgagtatcccccaccccttgcagctaccagtcagaagcatgagtactagcacaggttttgaagccaagctgg

SEQ ID NO: 7 - DNA, 8151 bp, Mus musculus
  source 1..8151: mol_type = genomic DNA
cccaggaagaaccactcctaccaatactcactgtggtagagtcttcacatgggagatgttacgagaggacggcccttccctctctgcttatacacagaagccgacttaagctgggttagagtgctttcactcacttatctgtgagcacaaggactgatcggcaaactttgaacttgggatgtggaaataggaagatcaggagtttgggaccagctagagcaatagactgtgaggccagtctcgggtacgtgaaactctatctcaaagaaatgaccaaaaccaaatttgaaatacgataaatttcttcttccattgcttagacggctgaggcacttgggattgcagtaagtctgaagccagcctaggttttacagtgagaacttgtctcaaaacaaaacagaaggcctctacattaatttaaacactccttaaattgggcatggtggtagacaagcctggtctacatactgagtataagctactcaaggcaacagagaaaaacctgtctcaaaaccaaagcatggaccaacttactaaggtagcccgagtcttaagcaggacacaggctctttcttcagacttgcgttaaaaagccgcacttttggagggaagatttccccaggtttcccaatgtgaagagcaagcaagaaacgctgagtgctgaaaggaaagccgtgtataaacagagactttggcagcaaggtctgactctttcatgtctgtagaaagaatggaagaggaaactcagatcccccacttgacctgaaacttcccactagagatcgccagggtctggaggtgcagccgtggttaaaagatgaataaagtgaaatgaggtaaagcctctttttgggggggggggatgtctttagatcagaggatgccccctaagctttccctccctcccagtctgggtcaccttacagcttcttttgcattacaatgtccatggtggaccctgcaggtgggattaactgtgaattcacagggctggtggggcgtgggtgccgcctgggtgcctgggagaatagggggtgggtagggtaggaggcttgaggggggaggagcaggacctaccctttaaatctatcgccttgagccgttggccttcagataggctgatttggttggtgtcttgctctttctgtgggaaggctgcggctcacttccttctgacttcttgataattttgcattagacatttaactcttctttctatgatctttccttctagacactgagttttttggttgttgcctaaaaccttttcagaaatcccttccctcgccatcacactgacatgagtgtgggtcttcctggtccccacagtttgcctagttctgaggaagcatcgaattctgggaacgcctcatcaatgcctgcagtttttcatcccgagaactattcttgcttacaagggtctgctactgagatgctctgcacagaggctggtaaggaattcagtccccgaagaacccagtaaattagggtaagagtagaaaaaacgggctgaagggttattgcttctttatgaaccgtagtagtcattaacataagcgggtgtccttatcactcttctggaaacccctctgagtttgaccggtgatacgttggccttctagtctgaaatagagatccgggacacaggacggagcaatataaggctcttgtgtgtatttgagaacctaaatatttgggctctttggaatatgttcgggggcagtgagtggtgtcttcagtagcagggagacctaacatcctagcttggaatgagcaccccatttttttggtgaggttatacagttagtttgcaatttgcccaaatggccgttttctccagcagaagcagttagcatttctctcaacctttgggaatatggatgtcacttagcagttctgggtttgtgagctcagtgctccttccaaaccccaaacaagtgtacacagtttaagtcattcattcttatagctagcatctggagccaaggtctgaagctcattgtctgtacagagtcagcccagtactcaggcttgtaaatggtagaaccaagaggctgctaggctgtgtgtgccacggtgctcaggtgcgtgttgtgatgctcgggtgtgtgcagcgatgctcgggtgtgtgcagtgatgctcgggtgtgtgcagcggtgcttgggtgtgtggagcgctaggaagtgtgtgtccccttttttctgagcttttaagttaatgtctgtcatcttgatttttctgatttatgggttcaatttttgattttttttttgtttgtttttttttgttttttcgagacagggtttctctgtgtagccctggctgtcctggaactcactttgtagaccaggctggcctcaaactcagaaatccgcctgcctctgcctctgcctccctcaatttttgattttggaggtgggaaaagtgctgggttaggaatgaacgggtggggatagcctttgtaagtgatgtgtgtttttagagcatgtgtgtagagcatgtgtgtttgtagtgcgtgcccctagtgccagcagatggcataattttccatttagaagctgctttcagggctgtctacttatttgctagactgcaggctaacctcagcattgccatcagcgtggagcacagatgtcttcagtgtaggaggtgtcttctacctgctgctggatctaggaaatgttggggcaaagcttggtggaggagcacttgtctcttgctgaaggccctggaaaaaaacaaaaaagctaaccgaagagctagagggtcaaggataagagaaacgaatttggttaaccgaaattttactctagtaattaataattaactggaccctctgactggctgctcttgtactagcagaaaagatggtgggatatttttatttatttatttttttaaagatttatttattatatgtaagtacactgtagttgtcttcagacactccagaagagggcgtcagatcttgttacagatggttgtgagccaccatatggttgctgggatttgaactccagaccttcggaagagcagttgggtgctcttacccactgagccgttggatgctcttacccactgagccatctcaccagccccagtgggatcattttaaaatatacctttaaaaaaaaattgggggtggggggtgtctaaactcaggactgtgcattcctaacaacaagtgatttaaccctggaaatttccttagataacattcagtataatggatttcgtcatgacattttttgttcataaatattagttcatccctaaatgttaatgtgtgtgtgtgtgtgtgtgtgtgtatgtatgtatgtatgtatgtatgtatatatgtatgtatgtatagatatagctgactcagtggtagtagagtatgaaaggtcccaacaggattctattcacccagcaccatgcaaaaatctaggcgagataaaagtccccccaaacctgagtctttggataaacctccactcagaaggtagagaggtaggacccagagagcaggccagccttggctacctgagaccctatcccttagaaagaaaagaaaaccacaaacatagactagatcctctgctgcctaagctcttgtgctgtcttgtctgtctgtctctatttgttgagacgggctgatctcaaattctcccatctcagctactggagcaggggggctttagatttgtgctacccactgtcaggatcagaggtttacagtgtagatgcggtcacggttctaatgaagagggagcagggagaagggattggaaagagcagactacaaactcaaacctgtcttcatcctgccattgaactgagtattgtttggttagttgtctttttttttttttaaataggattcccagggtctaattgtataatttaaataactaatgaaacttaaaaacactgtatgtagggctggtgagatggctcaacaggtaaaagcactgactgcccttcccaaagtcctgagttcaaatcccagcaaccacatggtggctcacaaccatccgtaatgagatctgatgccctcttctggtgtgtctgaagacagctacagtgtacttacatataataataaataaatatttagcagagacattcttttttttttttaattaattaatcccatgtggttgctgggaattgaactcaggaccttcggaagagcagtctgcactcttaaccttaaccgctgagccatctctccagccccctaagtagaaacattcttaaaaaaaaaaaaaaaaaaaaaaaaaacactataaaagggagatctatgcaaaatggtgttacccaggggtgacaaagtattccaagaatactttccaaaaattaggtttttcttgttacttagatctatgaagataattgctttgaaagtaaatatagccgggcgtttaatcccagcacttgggaggcagaggcaggcgcatttctgagttcgaggccagcctggtctacaaagtgagctccaggacagccagggctatacagagaaaccctgtctcgaaaaaaccaaaaaaaaagaaaaaaaaaaaaaaaaaagaaagaaagaaagaaagaaagaaagaaagaaagaaagaaagaaagtaagtaaatatattaaatgtaacatttaattatctgggaaaatgatttatttgtttggttggttttgtttttgtttttttggtcagggtttctctgtgtagccctggccatcctggaatttactttgtaaaactgactggcctttttaaaatttatttattatatgtaagtacactgtagctgtcttcagacacaccagaagagggcatcagatctcattacggatggttgtgagccaccatgtggttgctgggatttgaactcaggaccttcggaagagcagtcagtgctcttaaccgctgagccataacccccaccccaccccgtgaactgactggacttaaacccataatctgcctgcttgagtgtcccaagtgctgggactaaaggtatgtaccaccatgccaggctgagaatgtcttatttattaacaagttatctatttatttctaacagcctctcctcgcccttcctctgaagacctgcctcttcaaggcagccctgattcttctaccagtcccaaacaaaagctctcaagtcctgaggctgacaagggccctgaggaggaggagaacaaggtccttgccaggaagcagaagatgcggactgtgttctctcaggcccagctgtgtgcactcaaggacaggtttcagaagcagaagtacctcagcctccagcagatgcaagaactctcctccattctgaacctgagctataagcaggtggggtccttagaagttgctgtaatgtaacacaatgagactgacttgctaatgaatcgaactaacgtctggacgtctctctaactatcctatcctcctatcctatgcgcctgttaaaatcataattatgtgattgattgattgattgattatgtataagtacactatagctgtcttcagatacaccagaagagggcatcagatctcattacggatggttgtgagccaccatgtggttgctgggatttgaactcaggaccttcggaagagcagtcagtgctcttaaccgctgagccatctctccagccccaattatgtgatttatatatttcccagtttgtttcattggttactttatcttctacttcacctcccacacccatccccaaatcagggtctcactgtagccctgactggtctctgtagaccaggctgggagaggttcacctgcctctgtctcctgggtgctggaaataaaggtgtgcctggcttttttcctttcttttcttttttaagattgtttatttttaaattcctttagttcattggtgttttgcctgcatgtgtttgtctttgtgagagtatcagatctcctggactagagttacagacagtcgtgagctgccatgtggccgctgagaattgaacccaggtcctctggaagagcagccagtgctcttaacagaagagccatttcccccagcacctgtctttttcaagaaagagtttcactttacaggcctggctgtcatgtttaaggtcgggctgtagacctgtctgcattctgtatgtcttagcttgttcgaatgtcctgtcactctgcaggttaagacctggtttcaaaaccaaaggatgaagtgcaagcggtggcagaaaaaccagtggttgaagactagcaatggtctgattcaggtaacaagatgttttctctgctttcctttttccccctccatcttaccatcttattttatgtgtctgtgccgtgtgtgtgtgtgtgtgtgtgtgtgtggctgacctatggctgttgggtatggatcccagatttcctgtaagagcagtcagtggctctgcctttgcttcccagtgtcatcctgatccatctatgtccattagtcctgtccctttcccatccctcttcctccacgcactctttcttgtgatctttggttctttgaggcaggctctctctatgtagccctggcagtcagagatctgcctgcctagtctcaggagtgctggggttaacggcctgtgcggccatgctaatcttttcagtatttctgcagtttacatctttagagtccccttttcactcattgcattaatcacctctttcagaagggctcagcaccagtggagtatcccagcatccattgcagctatccccagggctatctggtgaacgcatctggaagcctttccatgtggggcagccagacttggaccaacccaacttggagcagccagacctggaccaacccaacttggaacaaccagacctggaccaacccaacttggagcagccaggcctggaccgctcagtcctggaacggccagccttggaatgctgctccgctccataacttcggggaggactttctgcagccttacgtacagttgcagcaaaacttctctgccagtgatttggaggtgaatttggaagccactagggaaagccatgcgcattttagcaccccacaagccttggaattattcctgaactactctgtgactccaccaggtgaaatatgagacttacgcaacatctgggcttaaagtcagggcaaagccaggttccttccttcttccaaatattttcatattttttttaaagatttatttattcattatatgtaagtacactgtagctgtcttcagacactccagaagagggcgtcagatcttgttacgtatggttgtgagccaccatgtggttgctgggatttgaactcctgaccttcggaagagcagtcgggtgctcttatccactgagccatctcaccagcccctggtttatttttttaattattatttgctttttgtttatcaagacagggtttctctgcatagctctaattgtctttgaactagctctgcagaccagcctggccttgaactcagagatctgcccacttatctttgcctcctgaatgctgggaccaaaggtggcataccaccacacctggcatatatattgtttatttctatttctatttttattggtgccagagcaaacctaggacttagaacatgctgggcaccaactcaacttctgagctctatttacaacttggtgtgttagtgtatttgtcttagttctgaatttgtcctttttttagtgttaactctaggctttggagacagtgaggtgcatatactctctccttcccaagaataagtgcttgaacacccttacccacgcccacccacccatgctagtcttttttcttagaagcgtgggtcttggtatacactgtgtcattttgaggggtgaggtttaaaagtatatacaaagtataacgatatggtggctactctcgaggatgagacagaaggaccaggagtttgagggtagctcagatatgcaataagttcaaggccaacctgtactatgtttaaatagtaagacagcatctcgataaaataataaaactaaagtctcaacaaaataaaagctttcacctattaaggtgcttgcttgtccttggagtcccccaagagtaactgctatgttaatatctgtagaaagatgtttatatttgactgtaccatgatgaaccgatgccagctggactagtttaaacaaaataaaacactaattttaccttta

SEQ ID NO: 8 - DNA, 6357 bp, Homo sapiens
  source 1..6357: mol_type = genomic DNA
agagaggggttgagtagtcccttcgcaagccctcatttcaccaggcccccggcttggggcgccttccttccccatggcgggacacctggcttcggatttcgccttctcgccccctccaggtggtggaggtgatgggccaggggggccggagccgggctgggttgatcctcggacctggctaagcttccaaggccctcctggagggccaggaatcgggccgggggttgggccaggctctgaggtgtgggggattcccccatgccccccgccgtatgagttctgtggggggatggcgtactgtgggccccaggttggagtggggctagtgccccaaggcggcttggagacctctcagcctgagggcgaagcaggagtcggggtggagagcaactccgatggggcctccccggagccctgcaccgtcacccctggtgccgtgaagctggagaaggagaagctggagcaaaacccggaggaggcaagtgagcttcgacggggttggggtgtggggaggtggtcatgacagggcagcctgatggggaagtggtcacctgcagctgcccagacctggcacccaggagaggagcaggcagggtcagctgccctggccagggaggggtgtgtatcaactgctggcagccctggcaggcaggggccaggtgggaagtggaagctggatttcgaagagacaactgccggtgagggcagagcagcctgggagagtcggaagctggcccaggctggcctttgctctggcccagcccttgtcagggtctctcacatctcctaggcctgcccagggtctggtcactcattactggcccagcaccagacccagcttggggttggtttgagccccttttcccacccttagtcctgcttgaaaatttgacccttatcagacccaagattttggccttagggttaagcatagcctgagggtaaaaacagtgctcattccaggattattgttcctgaaagtctagggtgtgactcgtttctgataggatctcctgtttgggctgtgtgtgtgcgcgttgtgagctgggtttacctccagtcaagtatagggcttgtcttccccggatctctgcctcaggccaatgactggccactgtgttaaggtgcacaccctggcaccccttgtagaaagctggattttgattgacttcagcctcagttccaaagttgtaaacaagaaaaatggtgagagatttctccaggccatttgcaaatatagagctgctgcgggattgaaggcatccagccctgctgaggactattaaagatgtatcttccagtccttcaaggcgacaagtgtaagcaattagagattaaatactaagccttgagacctcacagaaaggtgtgactggtttctggagtgaccgagaagccccaacctcttcgcaggaggtcactgctgagccttgaatgataatggctggcaattgtggtccacttcctaagtgcctggctgtgtgctccgtttatacatcattatctcattaaccagcacaaaatctcctagggggaggtattattatcctatttaacgggttttaactgctaaatgatgaagcgaggatttggaccagtgtttattccaaaaccccaaaacagaatttggaaaatccaagatagcagagggcatttatcagtttgagttattggctgagcagaagttggggatgaaaacagcctatttgaaattgatatgatcaagcaccattgaaacacttccttgaggcttcagaactacaaaaaggccttgtttttttctcactagctgtgcacctctgtctgccggcagcctcatatggcatgccccagggctcagtccttcaacctctgctctatctacccttccttcctctcacccaccctcaaggcttaaatgccatttagacaccagatgactaccgcgttttctgtctcttgtgatggctccctgaactgctccaccctgatcacccagttgctcaaggccaaacccagtcatcctcagtttctttcatgtcctacatcctatccttaagaaacatcctgaatcaatcacaacctaaccctggcctcagccaccatcatctctgctgggattaccgcagtagcttctcaaattatactgcttcctccctactgtctgtggccaacacgtcaactagagtcagtgttttaaaaggtgtggccaggcactttgggaggccgaggcaggcgaatcacctgaggtcgggagttcgagtccagcctgaccaacatggcgaaaccccatctctactaaaaatacaaaattagctgggcgtggtgacgcatgcctgtaatctcagctactcaggaagctgaggcaggagaatcgcttgaacctgggagatggaggttgcggtgagccgagatcgcgccagtgcactccagcctaggcaacaaaagcgaaactctcaaaaaaaaaaaaaaaaaaggtgaggctaggtgcggtggttcacacctgtaatcccagcactttgggaggccaaggtggacagatcacttgaggtctcctgaccagcctggccaacatggtgaaaccccatatctactaaaaatacaaaaattagccgggcatggtggtgggtgcctgtagtcccagctactcaggcggctgaggcagaatagcttgaacccagaaggcggagattgcagtgagccaagatcacgccacagcactccagcctgggcgatagaacgagattccgtcttggtggggagaaaaagggtgagagatcatttcgcttggactaaaacaaagtcactatgtctgcaacaggatctacctagccaccagaccagctttgggctctggaaggcccacttcagggccttgccacattagactcttgtcctttgctcaaacaatcaccttctctgtctttaaaagtgtcaccctcctccataatctccttccctcctttaccctactcctatagactgctttattttttttttaatttttgagatggagtctcactctgtccctcaggctggagtgcagtggtgcgatcttggctcactgcaaactccacctcctaggttcaagcaattctcctgcctcagcctcctgagtagctgggattataggggagcgccatgatgcccagctaatttttgtatttttagtagagacagagtctcactatgttgaccaggctagtcttgaactcctgacctcaagtgatctacccaccttggcctcccaaagtgaagggattacaggcatgaccactgcgcccagactgctttacttttttccataatatatatatatattttaaatagaggcagcaggggtgggagaaggggcggcacgggtctcactatgttacccaggctgctttctaactcttgggctcaagcagtctgcccaccttggcctcccaaagtgctaggatttacagacatgagccactgtgcctggccattttttattttatttacttttttatttttcagagcaggagtggaagtttattattaaaaagttatagggcagggaaaaaaggaaagtgcacttggaagagatccaagtgggcaacttgaagaacaagtgccaaatagcacttctgtcatgctggatgtcagggctctttgtccactttgtatagccgctggcttatagaaggtgctcgataaatctcttgaatttaaaaatcaattaggatgcctctatagtgaaaaagatacagtaaagatgagggataatcaatttaaaaaatgagtaagtacacacaaagcactttatccattcttatgacacctgttacttttttgctgtgtttgtgtgtatgcatgccatgttatagtttgtgggaccctcaaagcaagctggggagagtatatactgaatttagcttctgagacatgatgctcttcctttttaattaacccagaacttagcagcttatctatttctctaatctcaaaacatccttaaactgggggtgatacttgagtgagagaattttgcaggtattaaatgaactatcttcttttttttttttctttgagacagagtcttgctctgtcacccaggctggagtgcagtggcgtgatctcagctcactgcaacctccgcctcccgggttcaagtgattctcctgcctcagcctcctgagtagctgggattacaggtgcgtgccaccgtgcccagctaatttttgtgtttttagtagagacggggtttcaccatgttggccatgctggtcttgaactcctgacctcgtgatctgcccacctcggcctcccaaagtgctggaattataggcgtgagccaccgcgcccagcaaagaacttctaaccttcataacctgacaggtgttctcgaggccagggtctctctttctgtcctttcacgatgctctgcatcccttggatgtgccagtttctgggggaagagtagtcctttgttacatgcatgagtcagtgaacagggaatgggtgaatgacatttgtgggtaggttatttctagaagttaggtgggcagcttggaaggcagaggcacttctacagactattccttggggccacacgtaggttcttgaatcccgaatggaaaggggagattgataactggtgtgtttatgttcttacaagtcttctgccttttaaaatccagtcccaggacatcaaagctctgcagaaagaactcgagcaatttgccaagctcctgaagcagaagaggatcaccctgggatatacacaggccgatgtggggctcaccctgggggttctatttggtgggttcccctctgcagattctgaccgcatctcccctctaaggagtatccctgaacctagtggggaggggcaggggcagactaccctcacccatgaagaggagtagggagagggagaagatgctttgagctccctctgggaagaggtggtaagcttggatctcagggtcacaagggccctgcgtgctccctcactttgcttctcttttgactggcctcccccagggaaggtattcagccaaacgaccatctgccgctttgaggctctgcagcttagcttcaagaacatgtgtaagctgcggcccttgctgcagaagtgggtggaggaagctgacaacaatgaaaatcttcaggaggtaagggtgggagggggatacccggggaccttccctttcttggcctaatttccattgcttccatcactggctcgtagctctccgtctttggtgcagtggttctcagtgggatggagtgaaattcctcagttctgctgggataaggtccagagccaacccttccaggatcctgccttttcacaccaccacctggctctgctgacacatctagtcacagacccctgtgatgctgttactcagcaagtccaaagcttgcccttgtcacccccttcccacctgcacagatatgcaaagcagaaaccctcgtgcaggcccgaaagagaaagcgaaccagtatcgagaaccgagtgagaggcaacctggagaatttgttcctgcagtgcccgaaacccacactgcagcagatcagccacatcgcccagcagcttgggctcgagaaggatgtgagtgccatgtctctctgcgggctccatctctttcccctgtcaccacctcgctttccctagctctggctcctccaactgctctagggctgttggctttggacagaatgtccaagcagtcaggcctgtctcagctcattctctaatgtcctcctctaactgctctagggctgttggctttggatagaatgtccaagcagagtcaggcccgtctcagctcattgtctaatgtcattctcctttctgtcattcacttgcaggtggtccgagtgtggttctgtaaccggcgccagaagggcaagcgatcaagcagcgactatgcacaacgagaggattttgaggctgctgggtctcctttctcagggggaccagtgtcctttcctctggccccagggccccattttggtaccccaggctatgggagccctcacttcactgcactgtactcctcggtccctttccctgagggggaagcctttccccctgtctccgtcaccactctgggctctcccatgcattcaaactgaggtgcctgcccttctaggaatgggggacagggggaggggaggagctagggaaagaaaacctggagtttgtgccagggtttttgggattaagttcttcattcactaaggaaggaattgggaacacaaagggtgggggcaggggagtttggggcaactggttggagggaaggtgaagttcaatgatgctcttgattttaatcccacatcatgtatcacttttttcttaaataaagaagcctgggacacagtagatagacacactta

SEQ ID NO: 9 - DNA, 6243 bp, Pan troglodytes
  variation 3546..3892: note = n is a, c, g, or t
  source 1..6243: mol_type = genomic DNA
cctcatttcaccaggcccccggcttggggcgccttccttccccatggcgggacacctggcttcggatttcgccttctcgccccctccaggtggtggaggtgatgggccaggggggccggagccgggctgggttgatcctcggacctggctaagcttccaaggccctcctggagggccaggaatcgggccgggggttgggccaggctctgaggtgtgggggattcccccatgccccccgccgtatgagttctgtggggggatggcgtactgtgggccccaggttggagtggggctagtgccccaaggcggcttggagacctctcagcctgagggcgaagcaggagtcggggtggagagcaactccgatggggcctccccggagccctgcaccgtcacccctggtgccgtgaagctggagaaggagaagctggagcaaaacccggaggaggcaagtgagcttcgacggggttggggtgtggggaggtggtcatgacagggcagcctgatggggaagtggtcacctgcagctgcccagacctggcacccaggagaggagcaggcagggtcagctgccctggccagggaggggtgtgtatcaactgcaggcagccctggcaggcaggggccaggtgggaactggaagctggatttcgaagagacaactgcaggtgagggcagagcagcctgggagagtcggaagctggcccaggctggcctttgctccggcccagcccttgtcagggtctctcacatctcctaggcctgcccagggtctggtcactcattactggcccagcaccagacccagcttggggttggtttgagcccctttttccacccttagtcctgcttgaaaatttgatccttatcagacccaagattttggccttagggttaagcatagcctgagggcaaaaacagtgctcattccaggattattgttcctgaaagtctagggtgtgactcgtttctgataggatctcctgtttgggctgtgtgtgtgcgcgttgtgagctgggtttacctccagtcaagtatagggcttgtcttccccggatctctgcctcaggccaatgactggccactgtgttaaggtgcacaccctggcaccccttgtagaaagctggattttgattgacttcagcctcagttccaaagttgtaaacaagaaaaacggtgagagatttctccaggccatttgcaaatatagagctgctgcgggattgaaggcatccagccctgctgaggactattaaagatgtatcttccagtcctccaaggcgacaagtgtaagcaattagagattaaatactaagccttgagacctcacagaaaggtgtgactggtttctggagtgaccgagaagccccaacctcttcgcaggaggtcactgctgagccttgaatgataatggcggcaattgtggtccacttcctaagtgcctggctgtgtgctccgtttatacatcattatctcattaaccagcacaaaatctcctagggggaagtattattatcctatttaacgggttttaactgctaaatgatgatgaggatttggaccagtgtttattccaaaaccccaaaacagaatttggaaaatccaagatagcagagggcatttatcagtttgagttattggctgagcagaagttggggatgaaaacagcctatttgaaattggtatgatcaagcaccattgaaacacttccttgaggcttcaggactacaaaaaggccttgtttttttctcactagctgtgcacccggcagcctcatatggcgtgccccagggctcagtccttcaacctctgctctatctacccttccttcctctcacccaccctcaaggcttaaatgccatttagacaccagatgactaccgcgttttctgtctcttgtgatggctccctgaactgctccaccctgatcacccagttgctcaaggccaaacccagtcatcctcagtttctttcacgtcctacatcctatccttaagaaacatcctgaatcaatcacaacctaaccctggcctcagccaccatcatctccgctgggattaccgcagtagcttctcaaattatactgcttccttcctactgtctgtggccaacacgtcaactagagtcagtgttttaaaaggtgtggccaggcactttgggaggccgaggcaggcgaatcacctgaggtcgggagttcgagtccagcctgaccaacatggagaaaccccatctctactaaaaatacaaaattagctgggcgtggtgacgcatgcctgtaatctcagctactcaggaagctgaggcaggagaatcgcttgaacctgggaggtggaggttgcggtgagccgagatcgcgccagtgcactccagcctgggcaacaaaagcgaaactctcaaaaaaaaaaaaaaggtgaggctaggtgcggtggttcacacctgtaatcccagcactttgggaggccaaggtggacagatcacttgaggtctcctgaccagcctggccaacatggtgaaaccccatatctactaaaaatacaaaaattagccgggcatggtggtgggtgcctgtagtcccagctactcaggcggctgaggcagaatagcttgaacccagaaggcggagattgcagtgagccaagtgtcaccctcctccataatctccttccctcctttaccctactcctatagactgctttatttttttttttaatttttgagatggagtctcactctgtccctcaggctggagtgcagtggtgcgatctcggctcactgcaacctccacctcctaggttcaagcaattctcctgcctcagcctcctgagtagctgggattataggggagcgccatgatgcccagctaatttttgtatttttagtagagacagagtctcaccatgttgaccaggctagtcttgaactcctgacctcaagtgatctacccacctcggcctcccaaagtgaagggattataggcgtgaccactgcgcccggactgctttacttttttccataacatttttttttttttaatagaggcagcaggggtgggagaaggggcggcacgggtctcactatgttacccaggctgctttccaactcttgggctcaagcagtctgcccaccttggcctcccaaagtgctaggatttacagacataagccactgtgcctggccattttttattttatttacttttttatttttcagagtaggagtggaagtttattattaaaaagttatagggcagggaaaaaaggaaagtgcacttggaagagatccaagtgggcaacttgaagaacaagtgccaaatagcacttctgtcatgctggatgtcagggctctttgtccactttttatagccgctggcttatagaaggtgctcgataaatctcttgaatttaaaaatcaattaggatgcctctatagtgaaaaagatacagtaaagatgagggataatcaatttaaaaaatgaggagtaagtacacacaaggcactttatccattcttatgacacctgttacttttttgctgtataagtgtgtnnnnnnnnnnnnnnnnnnnnnnnnnnnnnnnnnnnnnnnnnnnnnnnnnnnnnnnnnnnnnnnnnnnnnnnnnnnnnnnnnnnnnnnnnnnnnnnnnnnnnnnnnnnnnnnnnnnnnnnnnnnnnnnnnnnnnnnnnnnnnnnnnnnnnnnnnnnnnnnnnnnnnnnnnnnnnnnnnnnnnnnnnnnnnnnnnnnnnnnnnnnnnnnnnnnnnnnnnnnnnnnnnnnnnnnnnnnnnnnnnnnnnnnnnnnnnnnnnnnnnnnnnnnnnnnnnnnnnnnnnnnnnnnnnnnnnnnnnnnnnnnnnnnnnnnnnnnnnnnnnnnnnnnnnnnnnnnnnnnnnnnnnnnttctctaatctcaaaacatccttaaactgggagcatacttgagtgagagaatttgcagatattaaatgagctatcttcttttttttttttttctttgagacagtcttgctctgtcacccaggctggagtgcagtggcgtgatctcagctcactgcaacctccgcctcccgggttcaagtgattctcctgcctcagcctcctgagtagctgggattacaggtgcgtgccaccgtgcccagctaatttttgtgtttttagtagagacggggtttcaccatgttggccatgctggtcttgaactcctgacctcgtgatctgcccacctcggcctcccaaagtgctggaattataggcgtgagccaccgcgcccagcaaagagcttctaaccttcataacctgacaggtgttctcctcgaggccagggtctctctttctgtcctttcacgatgctctacgtcccttggatgtgccagtttctgggggaagagcagtcctttgttacatgcatgagtcagtgaacagggaatgggtgaatgacatttgtgggtaggttatttctagaagttaggtgggcagcttggaaggcagaggcacttctacagactattccttggggccacacgtaggttcttgaatcccgaatgaaaaggggagattgataactggtgtgtttatgttcttacaagtcttctgccttttaaaatccagtcccaggacatcaaagctctgcagaaagaactcgagcaatttgccaagctcctgaagcagaagaggatcaccctgggatatacacaggccgatgtggggctcaccctgggggttctatttggtgggttcccctctgcagatgctgaccacatctcccctctaaggagtatccctgaacctagtggggaggggcaggggcagactctaccctcacccatgaagaggagtagggagagggagaagatgcttgggctttgagctccctctgggaagaggtgggaagcttggatctcagggtcacaagggccgtgcgtgctccctcactttgcttctcttttgactggcctcccccagggaaggtattcagccaaacgaccatctgccgctttgaggctctgcagcttagcttcaagaacatgtgtaagctgcggcccttgctgcagaagtgggtggaggaagctgacaacaatgaaaatcttcaggaggtgagggtgggagggggatacccggggaccttccctttcttggcctaatttccattgcttccatccctggctcgtagctctccgtctttggtgcagtggttctcagtgggatggagtgaaattcctcagttctgctgggataaggtccagagccaacccttccaggatcctgccttttcacaccaccgcctggctctgctgacacatctagtcacagacccctgtgatgctgttactcagcaagtccaaagcttgcccttgtcactcccttcccacctgcacagatatgcaaagcagaaaccctcgtgcaggcccgaaagagaaagcgaaccagtatcgagaaccgagtgagaggcaacctggagaatttgttcctgcagtgcccgaaacccacactgcagcagatcagccacatcgcccagcagcttgggctcgagaaggatgtgagtgccatgtctctttgcgggctccatctctttcccctgtcaccacctcgctttccctagctctggctcctcctccaactgctctagggctgttggctttggacagaatgtccaagcagagtcaggcccgtctctcagctcattgtctaatgtcattctcctttctgtcattcacttgcaggtggtccgagtgtggttctgtaaccggcgccagaagggcaagcgatcaagcagtgactatgcacaacgagaggattttgaggctgctgggtctcctttctcagggggaccagtgtcctttcctctggccccagggccccattttggtaccccaggctatgggagccctcacttcactgcactgtactcctcggtccctttccctgagggggaagcctttccccctgtctccgtcaccactctgggctctcccatgcattcaaactgaggtgcctgcccttctaggaatgggggacagggggaggggaggagctagggaaagaaaacctggagtttgtgccagggtttttgggattaagttcttcattcactaaggaaggaattgggaacacaaagggtgggggcaggggagtttggggcaactggttggagggaaggtgaagttcaatgatgctcttgattttaatcccacatcatgtatcacttttttcttaaataaagaagcctgggacacagtagatagacacactta

SEQ ID NO: 10 - DNA, 4746 bp, Mus musculus
  source 1..4746: mol_type = genomic DNA
gaggtgaaaccgtccctaggtgagccgtctttccaccaggcccccggctcggggtgcccaccttccccatggctggacacctggcttcagacttcgccttctcacccccaccaggtgggggtgatgggtcagcagggctggagccgggctgggtggatcctcgaacctggctaagcttccaagggcctccaggtgggcctggaatcggaccaggctcagaggtattggggatctccccatgtccgcccgcatacgagttctgcggagggatggcatactgtggacctcaggttggactgggcctagtcccccaagttggcgtggagactttgcagcctgagggccaggcaggagcacgagtggaaagcaactcagagggaacctcctctgagccctgtgccgaccgccccaatgccgtgaagttggagaaggtggaaccaactcccgaggaggtaagtgaagggacttggctgggctggcagaggcagcagtgaagggaattgggaacatgtagggtagccaccctgcctgccaaaggtggtgatggctgccgggcctcctgagaagcacgacgcagtgtggactagaacccagaattgcaagaatcagaaaccggcctggattgtttcggcctggcccttgtcatgtaggtcacctaggcctggcctgtgtcccgacacttgcttcatgccatcactgtctgtacaccagtgatgcgtgaaaatcagcccccccccaaaaaaaaaaacatatcagcccctctggggacttggatcacagtcggacccaggaacttggccttaaggttaggcatggctgggggggtaaaaaatggtgcttatcctggagttattgttactgaagaggttgggtgtgactggctgctgataggagctcttgtttgggccatgtgtggagtagggctcaccttcagtcaagtttacggcctgtctactttagcctcagactccatgagtcacctttacacgagcagacccttgtagtgcctgaggtgcagatctgatcgatttcagcctttctacctttccttgtaaacaagaaagggacacccttgggtaggggagttttatctccaggccatcttaagatcattctgtgagtgcacgggccttgcttagtgtctgatggcctacagccagcactctggagcaagtgtaagcaattagccttaagaacaaggtgcgagtggataccgatgcccgccgggagttccgacagcttagcgattgttgtagcaggagtcccctccctaagtgccagtttctgtgttatctcaggtcctgtatgccgccgggagtcccctaggaaggcattaatagtttatctcacatcttaaatggcccttaatgaagcaagagatttgaaccttagttaagctaatcccaaatcctcaaaataggatttagaaaagccaaagacactgctgagggcgattacaagttttggtcttttgaggagcagttggagatgaaagtctgtctgaagccgagagaatccttttccattgaaatggcattgaggtgtgcctcactggctgctgcttctgtctgtgccctgggttggccagcctttgtggagcacctcagccctccatcctggacctttgctccaacaacctgctcctcttccgccctcaaggctgacttgcatctccccagatgactgcctccatttctgtcttctgttagagacagaaaagcctgagaaaccgacagccattttggggggggggggtccggttcacacgctgcaacttagaaagcacactcaactggccatctgttataccctccccacctggtcccaaccatcactgtgtactactgagaagaaggcagccttagccacaccctcgagtgcccctgccgttctattgctcatacatcgattgatatccctgtttcaactttgaaaaaaaaaaatttttttttttttgtggtgtgtgcatgcctgctactgtacacctgtgggcgtcagaggtggtcctctgcaccctccggccagtaccgcatccagggtgagtcagatgatttcctgtggtttgggcctcaaggcttctcacctccagaggcttctagcctgctgccttgctttctctgtcgcactctagtacagcaggagttttcttcgcactccggagtgttgtcagctcctggggcatggacatttggctacttagagtgtgctgtgtaggttttcatttagagctgaacagagggatggatcttattaccccagcccttgagacactgaggcaggagagcttcctagtgagtccctgtttcaatatcttcactaatactgtgtcatactttgggactttctttcttcctttctttcttttgattttttttttttttatatgagtacagtgtacctgtcttcagacacacaccagaagagggcatcagatcctactacagaaggttgtgagccaccttgtggttgctgggaattgaactccggatctccggaagagaagtccgtataccaacttctgtattagtcagggttctctagagtcacagaacttatggacagtctctagatagtaaaggaatttattgatgacttacagtcggcagcccaattcccaacaatggttcagtcgcagctgtgaatggaagtccaaggatctagcagttacttagtctcacgcagcaagcaggcgaaggagcaagagctagagcttaactgctgagccatgtgtttcttgagtaaagggattacatgctcgttcgtctggtcaattctgcagccttaaaacttcttcagaatagggtgacattttgtcctcagtggggcggttttgagtaatctgtgagcagataggaacttgctggggtactgcacagaactctgggtagtgtggtactgtagatggctaggttctggggggggaaagagccatctatgtcacctaggaatagagtgaataacatttatataatcagaccagcccttgaggaggctgagatcttttcatggggcaccctagggtcacagtcccagctggtgtgactctgacaagtctgcctttctcactacagtcccaggacatgaaagccctgcagaaggagctagaacagtttgccaagctgctgaagcagaagaggatcaccttggggtacacccaggccgacgtggggctcaccctgggcgttctctttggtgggtctcccccagcatgttctgatctcacggctcttaatgtaggcgcaagggggtggggcatcttaggagctgcttctccacaggtaagggaggattagacgcttgtagcttgaactgtcagaggtgggggcttgggctcccttcttgctgcctcactcactctgtttgatcggcctttcaggaaaggtgttcagccagaccaccatctgtcgcttcgaggccttgcagctcagccttaagaacatgtgtaagctgcggcccctgctggagaagtgggtggaggaagccgacaacaatgagaaccttcaggaggtgaggagtggcaggatgtgtgcaatgtctgccaggcacagtcccttctgctgcttccattcctggcttgaaactcctccctctccaaccggagctcgcaggagaagttctgtgtccttattctgctgctatgaattggaatccagagccttaacatttgctaatcaatcaggctctctccttctgagtcaccctctgcccccaccagcctgacaatggtccctccccagaaccccgtctagtgctggtgaaggctcagacctaggtctaccagccccttccagagcccctttcagtaacccctggctctggggccacatccagtcaatgctcccttagcacaatcccttagcggtttgttcttcagtcccatctcaaggtggggctgttgccaagtcaaatactaaagttgctcttgtcgcccccatcttcccctgcccagatatgcaaatcggagaccctggtgcaggcccggaagagaaagcgaactagcattgagaaccgtgtgaggtggagtctggagaccatgtttctgaagtgcccgaagccctccctacagcagatcactcacatcgccaatcagcttgggctagagaaggatgtgagtgccaagatcctgccctgtggtacctggatgtttccctgttcccattccccaccccccccacccccccacccccaccgccgccaccgctgactgcagcatcccagagcttatgatctgatgtccatctctgtgcccatcctaggtggttcgagtatggttctgtaaccggcgccagaagggcaaaagatcaagtattgagtattcccaacgagaagagtatgaggctacagggacacctttcccagggggggctgtatcctttcctctgcccccaggtccccactttggcaccccaggctatggaagcccccacttcaccacactctactcagtcccttttcctgagggcgaggcctttccctctgttcccgtcactgctctgggctctcccatgcattcaaactgaggcaccagccctccctggggatgctgtgagccaaggcaagggaggtagacaagagaacctggagctttggggttaaattcttttactgaggagggattaaaagcacaacaggggtggggggtgggatggggaaagaagctcagtgatgctgttgatcaggagcctggcctgtctgtcactcatcattttgttcttaaataaagactgggacacacagtagatagct

SEQ ID NO: 11 - DNA, 10997 bp, Homo sapiens
  source 1..10997: mol_type = genomic DNA
gagggaagttgagggaagtccttctgactggtaaatcggctttctgaccctcgtctgcaaataatacattctaaggtaaggaactaaggaagctttattgaaatcggatttcaaatggagaggtcctgctatgcctactggaggagatcagggaataataaatatttccttcattgaaaattatatcctattggccaggcgcagtggctcacgcctgtaatcccaacactttgggaggccgagacaggcggatcacctgaggtcggaccagcctgccaacatggagaaaccctgtctctactaaaaatactaaattagccgtgcgtggtggtgcatgcctgtaatcccagctactggggaggctgaggcaggagaatcacttgaaccaaataggcggaggttgcagtgaggtgagacggtgccactgcactccagcctgggggacagagaaagactccgtctcaaaaaagaaaaaaaaagagaaagaaaagaaaggaaggaaggaaggaaggaaggaaggaaggaaggaaggaaggaaggaaggaaggaaaattatattttattggccaacctcaaaattgaagcttattcagaaacagatttaaaaaaagaaaaaagtggagaactgctcccagatatatatgcagaaaagcttcaagtcaacatttaggaggtttttaaatatcgatctgggtttcgttctaatggtctgggtgtacttatacgacctattacatttcactagactgtagccaatagtgagcgttgactgaccattgctttcaaagtgagttgtgttgcctttagcaatacagtcacattaatggccagaaaaagaaaaaagaaaacaaacactgggggtgtttgaaacaactgggggtagggtggggtgggaaaggtgtgggggtttgcgttcgagtcaacctctatttcggggggtaaaaactgcctcctccgcttgatttttttcctcgatctgcaaaagcgtaaatgttttgttttgttctattgagatggagcctcgctctatcacccaggctggagcttagtggcgcgatctcggctcactgcaacctccgcatcccgggttcaagcgattctcctgcctcagcctcctgagtagctgggattacaggcgagcaccaccatgcctggctaatttttgtatttttcggtagagacggggtttcgccatgttggccaggctggtctcgaacgcttgacctcatgtgatccccccgtctcggcctcccaaagtgctgggacgacaggcgtgagccaccgcgtccggcctaaaagggtaaatgtgattacacccacgcgtatttgttcaacagacatttattgagcgctcaccacgtgccaacgccgggcgtctgggctctggaggcgctgccacgtggcggatgcgcagtgcccggcggccgggctgaggggtgaacgcgggggtcagggggccccgggctgagggtttgcgtgcgggccgggtgcctgggggccccgggctgagggtgagcgcgccgcccaggtgccaggcggctccgggcagagagtgaacgcgcgggccaggtggctccagggcggcgccccagggcggggccggccacgccctccctaaccctggcggagctgatgggtggctgtagcctgattagaccgcgtcagtccggagggtgggtcttgggagggggcgcagggcagtccacgtttccactgcagtttctcctttgttttacgtttgggaggaggtggcattggaaatagcagagtgcttcgcggtaacaggggtgagtcttgtttcatggaacttttttcaaatggggagaagggggttgtgttgctcactacttggaatgtgtcggtcaaaggggttagatagtcagggaggggaagcgtgttctcatcctgggaccaggccggagccggcctcgccgggagacttgtagccctcgccctgcggtgacccgtggctggccactggcctcaaatgttgaaaacgggcagatgggcaagtaatacactctcaagaaagcaagtgtctggcggtgatttcctaaattgcattttttattttatttcaaaacttcatgtaaatatgtttccttacaatatctggctaagtcttttctatattaacatgcttacattgtgatcaagacaccagtctcttccctttcttttcctctcctcttatctctggagatggcaatacccccaactcaaattactctagcaaaaaacctaggagactctttcttttcttttttctttttttttggagacagtctcgctctgttgccaggctggagtgcaatggcgcgatctcggctcactgcaacctccgtctcccgggttcaagggattctcctgcctcagcctcccaagtagctgagattacaggcgcccttcactgcgcccggctaatttttgtattttagtagagacggggtttcaccatgttggtcaggctggtctcgaactcgtgacctcagatgatccgcccgcctcagcctcccaaagtgctgagattacaggcgtgagccaccgcgccgggcgagactcattcttgattcctgtttcccttccgctcttcatccaatccaccggcgagctgcagggcgagggggtggttctttctcctgttttcccgctctccctgcatttcatctcctctgccgccatctgctccaaacccctggcagcccttcgcgggattcccaaatctaatagatttttctgttctccccaaatccattctccatgcagctgtccggcccatcttctaacctaaaaaaacttgctgtttgcttgttggaagccctgtaatggtttccttgggacctgggatgaaatgcaaatggtcccggggctcaccgtcagccccgcgcctgggcctcgccccagcccccaccttcctgcccgccatagctgtagggagcatggagcatggagcgtggagcgtggagcatggagcatggagcgtggagcatggagcatggcctgcagcccccggggagcgccggcagcctggaaccagcaggcttcgctcgtctcttcccacccccgtgcacttttcctcctgcccacatctggctccgatggccccctccttgggggccttttccagacattcatgatgaaggtggcgtcctcggttacttcccctctcatattcttttttttttttttttttttttgagacagagttttgctcttgtcgcttgggctggagtgcagtggcacgatctcggctcactgcaacctccgcctcctaggttcaagcgattctcctgcctcggcctcccgagtagctgggactacaggcgcccgccaccacgcccgactaattttttttatttttaatagggtttcaccatgttggccaggatggtctcgatctcctgacctcgtgatccgcccgcctcggcctcccaaagtggtgggattacaagcgtgagccaccgctcccggtcccaccccgccccgaccttttttttaatagcatttttctcaatctgacattttttgtttatttgccctttactgtctgtcccacaccaaactttgtgttaacgaggaactttgcatctttttccctaagttcagcacctagaacgaatactaaatgtatatgaagatttcgtccacatccgcttttaccagtatgttttccatgtacagtcaagttccatataaggccgtttcagtcagtgagcaaccccacgtactatggtggtcccataagattataaaagagctgaaaaatccccatggcctagtgacatcttcatgatcctgaatttgtgtaggcctaggctcatgtgtgtgtttgtctcttcgtttttaacgtaaaagtttttaaacagacaaaattttacagaataagaatataaagaaaaaatatttttgtacaggtgaaaaaatgtttgtgttttaagctaagtgttattacaaaagagtcaggaagtttgcacatttttaagtttataaagttaaaaagagtctgggcgcggtggctcacgcctgtaatcccagcattttgagagcctgaggcaggcggatcgcctgaggtcgggagttggagaccagcctgaccaacgtggagaaacctcatttctactaaaaatacgaaattagctgggcgtggtgacacatgcctgtaatcccagctactcaggaggctgacgcgggagaatcggctgaacctgggaggcggaggttgctgtgagcggagatcacgctgttgcactccagcctgggcaacaagagggaaactctgtctcaaaaaaaaaagtaaataaataaatgaatttaaaaagttacagtaagctaaggttaatttattattcaggaaagacaaatttttaaataagttctaaaatttgcctaagtgtacagtgcttataaagcctacagttgtgtacagtggcgtcccaggccttcattcactcaacactcactcactcactcatccagagccactaccagtactgtgagctccattatgggaatgtgcctacacaggtgtaccattttttatcttttgtacagtatttcttctgtttggatatgtttatatgcaaatacttactgttgtgttacagttgcctacagtactcagaactgtaacatgctgtggagatttatagcctaggagccatgggccctactgtgtaacctgggtgagttgcaggctgtgccattcgggtctgcgtagctacactctgtgatgttcacaggatgacacagcaacctaaagatacatttctcagaacatattcctgtcttcgagtgatgcatgactagttatttctgctaacagaaattggcttgccatataaatagttttcttttagtaaattaataaattaccatttcaatgttatatgtcatcctcacaagcttgtatactgctatgagaaatagcataatgctcggagatctgacaaataagaatttagcttagaaaggtaaggaccatacttgaaccttagtaaattcataaagaaaacacctctcttaggagatgcctttcttttttttctgtcacccaggttggagtgcaatggtgtgatctcagctcactgcaacccctgcctcccaggctccagcgatcctcccacctcagcctcctgaatagctgaccaccagcacactaggcaaacccaccccactcacggcctcccttgggaattcagacctaaccatcgctgagctgaagtgtaggtgtggtctgattagactcattttttcttttttgtagagatggggtttcaccgttttgccgaggctggtcaccaactcctgggctcaagggatccacccacctcagcctcccaaagtgctgggattgcaggcatgagccaccatgcctggccttaggaaattcctttctatgtaacaccctgcatcattaatagccagcttttttgaaacttctacattaaattgtctaaactctcaaataaattcctagtaaagtaattatatagggttgttaaatcagagatcaacagcacaatgactaatgcatactcatgatttcatctcactagacaaatgtactgaggctggagcctgtgtgaacagaacagaagaggccttcactctagtagtgctcacagtccagcaggtaagacagacttgaagcaagggacaccagagctctgatcagtgtgaaatagggagctaggagaacgtttagctttgggactcaactgagctgaagaatccagggaagcctgcctgaagaggtgatgtttgcgcatttgaagtatggatgggaagcaagcctctgtgtgtgtgttggaggataggtggtattttagtgagaaaaaagaacatttgtaatggactgatctgatgctttactggagaaagtttattatggctgaatagtgaaatacaagagctatagatggcaggaggtgagcttggagggaaaagcagcagtcaattaaattgcagttacaggttgagtattttttatccaaagtgcttgggaccagaagtattatggacatcagatttttttgaatgtttgagtatttgcaaaatacccaatatgagcatcccgagtccgaaaattcaaaatccaaaatggtccaatgagaatttcctttaagtgtcatgatggcactcaaaaaggtttcatactttaagcatttcaggtcctagattttcagatttgggatgcacaagctgttttttaaatggactaattggggagagcagctctgtgtttaatcctagtaattaccctccaaaggtgctaatattgtgcttcataaatattttgagatctccctggttaatttcacctctatatttttgttttctttttttttcttttttttccgagaaagtcgctctgttgtccaggctggagtgcagtggcacaatcttggctcactgcctccgcctcccaggctcaagtgatctcctgccagtagctgggattgcaggtgtacgccaccacatccagttaatttcttgtatttttagtagacagggttccgccatattggccaggctggtcttaaactcctgatctcaggtgatccgccagccttgtgctcacaaagggctggcattacaggcacgagccactgcacccagccctaatttcacctttttaaaggacacaggcctggcgcagtggctcacgcctgtaatcccagtactttgagaagccgaggagagcagatcacctgaggtcaggagttcgagaccagcctggccaacatgatgaaatcccgtatctactaaaaaataacacaaattagctgggtgtggtggcggggcgggggggcgcctgcctgtaatcccagctacttggggcctgaggcaggagaatcacttgaaccccagaggcggaggttgcagtgagctgagattgcgccattgtactccagcctgggcaacaagagcgaaactccatctcaaaataaaataaaaggacacaaaaaataacattagtagcatataacatatatgtattacatatttttaaatacattttaagaaatcttaaacttttcccctacagttggaacacattttgtttttattatatgtatttgttttttaccaaaagtaaatgacatgcttctgttgaggtgttttttttttaatgtggttattttaattttcatccaacaacttttacctttgcctcttttttaaaggcatataatttttcttcctacagaaagacatcaggacaataaatagggagatcttttctcaggcacacaattgtaacattaagtaagagacttttatagtcaaagcaataacatattcatgctataacttttataacgtcattgctgttaaatgtttaaggaaatgataggaaagtcttcagggccaagctaccccgtgcctttattttggcatggattcctaaaagtgggagcaccattaatttcatgtgtcttattctctggatccccattttttagaacaatgagtgggcacacgatggcccatgggccagtctccctgttttactggaacacagccaccctcattcctttatgtgttatctgactgcttctgtgccgtgctacaacggcaaagttgaatagtttcaacagacaccacaggacccacaaagctaaaatctggccctttgcagaaatagtttaccaccccagtctagaaagaacctggcgtgtagcaggatgcaacatatacttgtagaatgaataaaaaggtaataaaataacacgagctcacatagcggccagcatttgctgtgcaccataatccgtgctaagcactttgcatgcgttatttaatttgaatttcataacagtattacataagaaaacaatagggccaggcatggtggctcacgcctgtaatcccagcactttgggaggccgaggcaggcggatcacgaagtcgggagctccagaccagcctgaccaacatggtgaaaccccatttctactaaaactagaaaaagtagccaggcgtggtggcgtgcgcctgtaatcccagctacttgggaggctgaggcaggagaattgcttgaacccgggaggtggaggttgcaatgagctaagattgcaccactgcactccagcctgggcgacagagtgagactccgtctccaaaaaaaaagaagaaaaagaaaagacagtattttgctccctcaccgccttcaggcttttaaccaactgccacttaccaccctagtgaaggtttgcccgagtgccctatttaatattgcaggcttctgtttcctaccagcccctttgcttactctttcacacttagtcaccttctaacgtggcatacattgcttattttctatgctcatgagtatgtctactccatggaggcatagatgtttgtatgcctgtttactgatggatcacaaactgtgtagcctaaaatagagctagcacatagtcccacccaacacgtgtcaggtgagcaattagatatagagggttccaataacttgtggggacacccagataagatctgtttatgactcatgtcttacacagagctcattcttggtctcttggttagtttatcagagaagacaaatgtattattggaaaatgtgtcttaggtcattttttgacagtggctctaatactggaatctattttaactaaaggttattatcataaagcaggtgtttgctgaagacagcttactcagatcactactgcctggaggtggttgatatatcctggtgtaaaccttcaagaagggcacaggcaggaaaacatgagccagcaactgaagaaacgggcaaagacaagacaccagaaaggcctgggtggaagagcccccagtggggctaagcccaggcaaggcaagtcaagccaagacctgcaggcggaaatagaacctgtcagcgcggtgtgggccttatgtgatggctatgtgtgctatgagcctggccctcaggctctcggaggggatgatttctcagactgttacatagaatgcgtcataaggggtgagttttctcaacccatcctggaagaggactcactttttgagtccttggaatacctaaagaaaggatcagaacaacagctttctcaaaaggttttcgaagcaagctcccttgaatgttctttggaatacatgaaaaaaggggtaaagaaagagcttccacaaaagatagttggagagaattcgcttgagtattctgagtacatgacaggcaagaagcttccgcctggaggaatacctggcattgacctatcagatcctaaacagctcgcagaatttgctagaaagaagccccccataaataaagaatatgacagtctgagcgcaatcgcttgtcctcagagtggatgcactaggaagttgaggaatagagctgccctgagaaagcatctcctcattcatggtccccgagaccacgtctgtgcggaatgtgggaaagcgttcgttgagagctcaaaactaaagagacatttcctggttcatactggagagaagccgtttcggtgcacttttgaagggtgcggaaagcgcttctctctggactttaatttgcgtacgcacgtgcgcatccacacgggggagaaacgtttcgtgtgtccctttcaaggctgcaacaggaggtttattcagtcaaataacctgaaagcccacatcctaacgcatgcaaatacgaacaagaatgaacaagagggaaagtagtcctccaacaggatgaagcagattaacagaagagtgatcagtgacaaacatgcctcattgattattgtttctaggaaggaatttctaaatcaatattgcaaccccaaaagcggttataatttggtgttactaagatgctcctacactttgtgataccgttttaaggacatggtgcatttttttttcttttatttgttttatttagaactttttttatttgttttatttagaactttgtgtgttcttaaagtgtgcttccaacaggaaggtcagtgataaattttcaaaagcataaccttcaatatattatctgttggattattggatataagacttattttcatgtactataaatatgaaaataactttgatttttaattgtgtagtttccatttcttagcttttgccttttaaatttatacttcagccaggcatagtgactgatgcctgtaatcccaacactttgttgggaggccaaagcaggaggatagcttgaggccaggagttccagaccagcctgggcaacatagtgagatcctgtctctacaaaaaaatttgtttttatttgtatttatatatttttatttttgtttttgttggtaggcgtctcgctctgtcacccaggctggagtctagtgtcgtgatcttggctcactgcaacctccacctcccgggttcaagtgattctctggcctcagcctcccaagtagctgggactacaggtgtgtgtcaccacgcccggctaatttttgtatttttagtagagatggggtttcaccatgttggccaggctagtctcaaactcctgacctccagtgatctgcccacctcggcctcccaaagtgctgggattacaggtgtgagccactgtgcctggccccccacaacatgtttaaacttagctaggcctggttgcatacgcctgtgttcccagctactcaggaggctgaagcaggaggatagcttgagcccaggagtttgaggctacagtgagctgtgattgcaccactgtactccagactggataacagcaagagcccatcttttaaaaaaagtaaaaattaaaaatatacttcatggttcatgtcatagccctagagaatgaaaaatttgcagtagatagtcaataaatgaatcagtagttaaatattccttaaagtcaactgtatttcattgtgatttttgttttctttttatcattgtatcaaactatatggaaatcatatggttagatgtgattatttgataatgttagtccatttgaatccattttagatatttcacaattaaagaatatgaaacttcagaaa

SEQ ID NO: 12 - DNA, 9283 bp, Pan troglodytes
  variation 2906..2915: note = n is a, c, g, or t
  variation 5514..5747: note = n is a, c, g, or t
  source 1..9283: mol_type = genomic DNA
cagggcagtccacgtttccactgcagtttcttctttgttttacgtttgggaggaggtggcattggaaatagcagagtgcttcgcggtagcaggggtgagtcttgtttcatggaacttttttcaaatggggagaagggggttgtgttgctcactacttggaatgtgtcggtcaaaggggttagatagtcagggaggggaagcgtgttctcatcctgggaccaggccggagccggcctcgccgggagacttgtagccttcgccctgcggtgacccgtggctggccactggcctcaaatgttgaaaacgggcagatgggcaagtaatacactctcaagaaagcaagtgtctggcggtgatttcctaaattgtattttttattttatttcaaaacttcatgtaaatatgtttcctggctaagtcttttttatgttaacatgcttacattgtgatcaagacaccagtctcttccctttcttttcctctcctcttatctctggagatggcaataccctccactcaaattactctagcaaaaaacctaggagacttttcttttttcttttctttcttttttttttttggagacagtctcgctctgttgccaggctggagtgcaatggcgcgatctcggctcactgcaacctccgtctcccaggttcaagggattctcctgcctcagcctcccaagtagctgagattacaggcgcccttcactgcgcccggctaatttttgtattttagtagagacggggtttcactatgttggtcaggctggtctcgaactcgtgacctcagatgatccgcccgcctcagcctcccaaagtgctgagattacaggcgtgagccaccgcgccgggcgagactcattcttgattcctgtttcccttccgctcttcatccaatccaccagcgagctgcagggcgagggggtggttctttctcctgttttcccgctctccctgcatttcatctcctctgccgccatctgctccaaacccctagcagcccttcgcgggattcccaaatctaatagatttttctgttctccccaaatccattctccatgcagctgtccggcccatcttctaacctaaaaaagcttgctgtttgcttgttggaagccctgtagtggtttccttgggacctggaatgaaatgcaaatggtcccggggctcaccgtcagccccgcgcctgggcctcgccccagcccccaccttcctgcccgccatagctgtagggagcatggagcatggcctgcagcccccgggagccgccggcagcctggaaccagcaggcttcgctcgtctcttcccaccaccgggcacttttcctcctgcccacatctggctccgatggccccctctttgggggccttttccagacattcatgatgaaggtggcgtcctcggttacttcccctctcatattctttttttttttttttttttgagacagttttgctcttgtcgcttgggctggagtgcagtggcgcgatctcggctcactgcaacctccgcctcctaggttcaagcgattctcctgcctcggcctcccgagtagctgggactacaggcgcccgccaccaagcccgactaattttttttaatagcgtttcaccatgttggccaggatggtctcgatctcctgacctcgtgatccgcccgcctcggcctcccttagtggtgggattacaagcgtgagccaccgctcccggtcccaccccgccccgacctttttttaatagcatgtttctcaatctgacattttttgtttatttgccctttactgtctgtcccacaccaaactttgtgttaacgaggaactttgcatctttttccctaagttcagcacctagaacgaatactaaatgtatatgaagatttcatccacatccgcttttaccagtcagtatgttttccatgtacagtcaagttccatataaggccgtttcagtcagtgagcaaccccacgtactatggtggtcccataagattataaaagagctgaaaaatccccatggcctagtgacatcttcatgatcctgaatttgtgtaggcctaggctcgtgtgtgtgtttgtctcttggtttttaacgtaaaagtttttaaacagacaaaattttacagaataagaatataaagaaaaaatatttttgtacagctgaaaaaatgtttgtgttttaagctaagtgttactacaagagagtcaggaagtttgcacattttaaagtttataaagttaaaaagagtatgggcgcggtgggagtcattcatcaagatagttaattcagaggaagagaagatttagaagagctaaattctggtttgaaaatattgagtttaagatgagtttgaaatggagaaatccactaatcattttgagctcagcaggtagatctgcattaaagacacagatgtggtagttactggctcataaactttaataaaatgtatggatatggatgagtttccacaaggagagtgtagaatggaaaaaagaataaaagcttaggatgctgctgtgtgaaacatgaatagtcacagggtaagcaaaaaggaagactacaatgaacacaggagagcgtcgtggagggaaatccaggaaagaatgatatcacagacttcaaaagaatgaaatctttattttgacaactatgaggagcagctgaatgattttaaaaagttggtcatatgtctattttagaaagctctttctagtagtaatgtggagaaaaggttgtaaaggacaacgaagataagcaggatttgggtgtttcaaagattagaatgtttaaccatgtcaaaggtcacaaagaaaaaaagtgaatgacagtgatggtctagctggatttggctgttctaagattgttcgtgatgccaaaagttgcagtgtatagaagctgaagnnnnnnnnnnacatgcctgtaatcccagctactcaggaggctgaggcaggagaatcggctgaacctgggaggcggaggttgctgtgagcggagatcacgctgttgcactccagcctgggcaacaagagggaaactctgtctcaaaaaaaaaaaagtaaataaataaatgaatttaaaaagttacagtaagctaaggttaatttattattcaggaaagacaaatttttaaatcagttttaaaatttgcctaagtgtacagtgcttataaagcctacagttgtgtacagtggtgtcccaggccttcattcactcaacactcactcactcacccatccagagccactaccagtactgtgagctccattatgggaatgtgcctacacaggtgtaccattttttatcttttgtacagtatttcttctgtttggatatgtttatatgcaaatacttactgttgtgttacagttgcctacagtactcagaactgtaacatgctgtggagatttatagcctaggagcaatgggccctaccgtgtaacctgggtgagttgcaggctgtgtcattcaggtctgcgtagctacactctgtgatgttcacaggatgacacagcaacctaaaggtacatttctcagaacatattcctgtctttgagtgatgcatgactacttatttctgctaacagaaattggcttgccatataaatagttttcttttagtaaattaataaattaccatttcaatgttatatgtcatcctcacaagcttgtatactgctatgagaaatagcataatgctcggagatctgacaaataagaatttagcttagaaaggtaaggaacatacttgaaccttggtaaattcataaagaaaatacctctcttaggagatgcctttcttttttttctgtcacccaggttggagcgcaatggtgtgatctcagctcactgcaacccctgcctcccaggctccagcgatcctcccacctcagcctcctgaatagctgaccaccagcacacttggcaaacccaccccactcaccgcctcccttgggaattcagacctaaccatcgctgagctgaagtgtaggtgtagtctgattagactcattttttcttttttgtagagatggggtttcaccgttttgctgaggctggtcaccaactcctgggctcaagggatccacccacctcagcctcccaaagtgctgggattgcaggcatgagccaccatgcctggccttaggaaattcctttctatgtaacaccctgcatcattaatagccagcttttttgaaacttctacattaagttgtctaaactctcaaataaattcctagtaaagtaattatatagggttgttaaatcagagatcaacagcacaatgactaatgcatactcatgatttcatctcactagacaaatgtactgaggctggagcctgtgtgaacagaacagaagaggccttcactctagtagtgctcacagtccagcaggtaagacagacttgaagcaagggacaccagagctctgatcagtgtgaaatagggagctaggagaacgtttagctttgggactcaactgagccgaagaatccagggaagcctgcctgaggaggtgatgtttgcgcatttgaagtatggatgggaagcaagcctctgtgtgtgtgttggaggataggcggtattttagtgagaaaaaagaacatttgtaatggactgatctgacgctttactggagaaagtttattatggctgaatagtgaaatacaagagctatagatggcaggaggtgagcttggagggaaaagcagcagtcaattaaattgcagttacaggttgagtattttttatccaaagtgtttgggaccagaagtattatggacatcagatttttttgaatgtttgagtatttgcaaaatacccaatatgagcatcccaagtccgaaaattcaaaatccaaaatggtccaatgagaatttcctttaagtgtcatgatggcactcaaaaaggtttcatactttaagcatttcaggtcttggattttcagatttgggatgcacaagctgttttttaaatggactaattggggagagcagctctgtgtttattcctagtaattaccctccaaaggtgctaatattgtgcttcataaatattttgagatctccctggttaatttcacctctatatttttgttttctttttttttctttttttcccgagaaagttgctctgttgtccaggctggagtgcagtggtgcaatcttggctcactgcctccgcctcccaggctcaagtgatctcctgccagtagctgggattgcaggtgtaggccaccacatccagttaatttcttgtatttttagtagacagggttctgccatattggccaggctggtcttaaactcctgatctcaggtgatccgccagccttgtgctcacaaagggctggcattacaggcacgagccactgcacccagccctaatttcacctttttaaaggacacaggcctggcgcagtggctcacgcctgtaatcccagtactttgagaagccgaggagagcagatcacctgaggtcaggagttcgagaccagcctggccaacatgnnnnnnnnnnnnnnnnnnnnnnnnnnnnnnnnnnnnnnnnnnnnnnnnnnnnnnnnnnnnnnnnnnnnnnnnnnnnnnnnnnnnnnnnnnnnnnnnnnnnnnnnnnnnnnnnnnnnnnnnnnnnnnnnnnnnnnnnnnnnnnnnnnnnnnnnnnnnnnnnnnnnnnnnnnnnnnnnnnnnnnnnnnnnnnnnnnnnnnnnnnnnnnnnnnnnnnnnnnnnnnnnnnnnnnnnnnccatagtatgtatataccacattttctttatccagtctaccattgatgggcatttagggttgattccttgtctttgctattgtgaatagtgctgcaatgaaacatacatatgcatgtgtctttataatagaacaatttatattcctttgggtatataaccaataatgggattgctggatagaataatagttctgtttttagttctttgaggaatcaccactgcttttcacaatggttgaattaatttacattcctagctacttggggcctgaggcaggagaatcttcttgacccccggaggcggaggttgcagtgagctgagattgtgccattgtactccagcctgggcaacaagagcgaaactccatctcaaaataaaataaaataaaatgacacaaaaaataataacattagtagcatataacatatatgtattacatatttttaaatacattttaagaaatcttaaacttgtcccctacagttgggacacattttgtttttattatatgtatttgttttttaccaaaagtaaatgacatgcttctgttgaggtgttttttttttttaatgtgattattttaaagtattttcaagctattaattttcatccaacaacttttacttttgcctcttttttaaaagcatataatttttcttcctacagaaagacatcaggacaataaatagggagatcttttctcaggcacacaattgtaatattaagtaagagacttttatagtaaaagcaataatatattcatgctataacttttataacgtcattgctgttagatgtttaaggaaatgataggaaagtcttcagggccaagctaccctgtgcctttattttggcatggattcctaaaaggtgggagcaccattaatttcatgtgtcttattctctggatccccatattttagaacaatgagtgggcacacgatggcccatgggccagtctccctgttttattggaacacagccaccctcattcctttatgtgttatctgactgcttctgtgctgtgctacaacggcaaagttgaatagtttcaacagacaccacaggacccacaaagctaaaatctggccctttgcagaaatagtttaccaccctggtctagaaagaacctggcgtgtagcaggatgcaacgtatacttgtagaatgaataaaaaggtaataaaataacacgagctcacatagcggccagcatttgctgtgtaccacaatccgtgctaagcactttgcatgcattatttaatttgaatttcataacagtattacataagaaaacaatagggccaggcacggtggctcacgcctgtaatcccagcactttaggaggccgaggcaggcggatcacgaagtcgggagttcgagaccagcctgaccaacatggtgaaaccccgtttctactaaaactagaaaaagtagccaggcgtggtggcatgtgcctgtaatcctgtaatcccagctacttgggagggtgaggcaggagaattgcttgaacccgggaggtggaggttgcaatgagctgagatcgcatcactgcactccagcctgggcgacagagtgagactccgtctctaaaaaaaagaagaaaaagaaaagacagtattttgctccctcaccgccttcaggcttttaaccaactgccacttaccaccctagtgaaggtttgcccgagtgccctatttaatattgcaggcttctgtttcctaccagcccctttgcttactctttcacagttagtcaccttctaacacgtggcatacagtgcttattttctatgctcatgagtatgtctactccatggaggcatagatgtttgtatgcctgtttactgatggatcacaaactgtgtagcctaaaatagagctagcacatagtcccacccaacacgtgtcaggtgagcagttagatatagacggttccgacaacttgtggggacacccagataagatctgtttatgactcgtgtcttacacagagctcattcttggtctcttggttagtttatcagagaagacagaaatgtattattggaaaatgtgtcctaggtcattttttgacagtggctctaatactggaatctattttaactaaaggttattatcataaagcaggtgtttgctgaagacagcttactcagatcactactgcctggaggtggttgatatatcctggtgtaaaccttcaagaagggcacaggcaggaaaacatgaaccagcaactgaagaaacgggcaaagacgagacaccagaaaggcctgggtggaagaacccccagtggggctaagcccaggcaaggcaagacaagccaagacctgcaggcggaaatagaacctgtcagcgcggtgtgggccttatgtgatggctatgtgtgctatgagcctggccctcaggctctcggaggggatgatttctcagactgttacatagaatgcgtcataaggggtgagttttctcaacccatcctggaagaggactcactttttgagtctttggaatacctaaagaaaggatcagaacaacagctttctcaaaaggttctcgaaggaagctcccttgaatgttctttggaatacatgaaaaaaggggtaaagaaagagcttccacaaaagatagttggagagaattcgcttgagtattctgagtacatgacaggcaagaagcttccgcctggaggaatacctggcattgacctatcagatcctaaacagctcgcagaatttgctagaaagaagccccccataaataaagaatatgacagtctgagcgcaatcgcttgtcctcagagtggatgcactaggaagttgaggaatagagctgccctgagaaagcatctcctcattcatggtccccgagaccacgtctgtgcggaatgtgggaaagcgttcgttgagagctcaaaactgaaaagacatttcctggttcatactggagagaagccgtttcagtgcacttttgaagggtgcggaaagcgcttctctctggactttaatttgcgtacgcacgtgcgcatccacacgggggagaaacgtttcgtgtgtccctttcaaggctgcaacaggaggtttattcagtcaaataacctgaaagcccacatcctaacgcatgcaaatacgaacaagaatgaacaagagggaaagtagtcctccaacaggatgaagcagattaacagaagagtgatcagtgacaaacatgcctcattgattattgtttctaggaaggaatttttaaatcagtattgcaaccccaaaagcggttatactttggtgttactaagatgctcctacactttgtgataccgttttaaggacatggtgcatttttttttcttttatttgttttatttagaacttttttatttgttttatttagaactttgtgtattcttaaagtgtgcttccaacaggaaggtcagtgataaattgacttcaaaagcataaccttcaatatattatctgttggattattggatataagacttattttcatgtactataaatatgaaaataactttgatttttaa

SEQ ID NO: 13 - DNA, 11943 bp, Mus musculus
  source 1..11943: mol_type = genomic DNA
ccggaacagagttcgtccatctaaaaagggaggggtccaaggagctgaactcctagccgcctagatttccactgtggctctgggtacgagtggcagtttcttcttgggatttcagaaaggaaaccaaggaggaaataggtagagcgcatcgcatcgctgtgggcattaggtaagtcctgtttcatgaaatggctgggatttgtcttttttctcgttatgaggaaagggaggagggaagggtttgaaaaccagcaatttagagttttgactcttccaaattggtgaagatcttggcaaataaatgctggctttcagactgcatcgatcaccagctaccttggtccattggccatcacgttttcaaacatattaaggagcacagtagatgcacattgaggaaagtgggaattcaggttggaatctccttgaaattctgtttcaaattttgttccaagtgttcgtgtgcttttatcttatctcaattccctagatctattttatatgaaaatgtttaaattagcgaggtaacagggcacctaccttttctctccacttacctctataaaattcaatagattattctagaaaaagaaaatcgaagagcatttttttggctttgttttgtttttgtttttgtttgtttgtttgtttgtttgtttttcgagaaagggtatctttgtatacccctggctgtcctggaactcactctgtagaccaggctggctttgaactcagaaatccgcctgcctctgcttcccaagtgctgggattaaaggtgtgcgccaccaccgcccggctagaacagcttttttttaaattactgattttctttacttaattttccagtttcctcactccattttccaatcaagcatccagccggaaagaacttcctcttgcttcctacagtctgcattccaaccttcagattgcttggttctcaaattgcctgaggagttccctgttcactgttgtcctttagtagtagatccagaatagtggtttaacttaacaccctataatggtttcctttggtgttgaactgcaacgcaaatggctttccgtagaattcccaggctcctttgcacttggaccctggccgccatactaccgaccaacttttctaagaattacgacttaacaccgagtggtggcgccggcggcctcacttggcctgtaatctcagcactccgggaggcagaggcaggaggatccctttgagttggaggacagccaagtccagaaagcaacttccaggacggccaggctgcctagagaaaggatccctgtctcgaaaaaccaaagcggggaaagatcgactgcttctgtggtgactatggcttcctcctgtagtaaatatgacggccttctgtagtaacttcggcttctttccctacttaaaacttttatcctaggttccctacagccatgattcagtttcttttttacagtgtctgcatactgcttgctaaagccggggatttgggggatctaatctcacctctccggggacggtatttttggggcgagcacttttgtctgcggagacaggtcctggatggttcttagagtgatggtgtccctctgtacgtcatcgcatactcggaagtttttcgtgagcccttttctctgtctgaaaccattttgttaattcacagtttactagctatgtgccccacatgataaaagcttgactctgtgtgtgataactgggttttttttgggtttttggtttttttcactattgagtgaacaattgtcatgtgattgaagtatttctattcctgtttgagaaatgaaacattagttttatcccaagccattagattttatctttatctgggttgaccagtaagcattttggattattttgactaattagaagttattggctgggaggtggtggcgctcgccagcacttgggaggcagaggcaggcggatttctgagttccagagcagcctggtctacagagtgagttccaggacagctagggctacacagagaaaccctgtctcgaaaaacaaaacaaaaaacaacaaagaaaagttattgggccatgcttgggtagcgcacgtctgtagttccagaatttggaggagttcaagccagttttgaccacatagagtaacaggctaacaagtcacttgaccttttatttgctattctcatgaggttgtatattgggtagaagacagcatattgctcaaacatctgataacctaatgaagaaaagtaaatgctatttctatggctttgattggttaggaaataccattctacctacatagcatttgcaagcaactcttttttttttttttttttttttttttttaaccaagtgtctaaagttctgtataaatgcctggtaagttattgttatttgagatttctgaatcaggtctcaaccaaaactataactaatgcatattcatgacctcatttcactagagaaatggactaagagctgggacacgtggcaaaagaagatagtcttcttctctcaatagagtgagtgtgcagtgcagccagcaggtaagagtaaacggtttcataggcaataaataccaagaattgtgctcttctgtgtaacgcaggctggggaatatttagcatgggatcctaagtatggagggaaactctgaggaagtgatgtccaagcacagatctgaagtatatatgtttgtgcgtactaacagtgacagaaaactgtcggtggtgtattagtgatagagaagaacatgcaaggactagtagggtgccttactctatctaggaggggttgcaaatgctgggagcgtgcctgctgtctatgctcgggttataagtggggaataaccactccaggacccccacaagctagctacaaagtaacattttcttttcttttctttttttttttaatatatgtcccaagacatatgatttatttattatcgtatctaagcacactgtagctgtcttcagacacacaagaagagggtatcagatctcattacccgatggttgtgagccaccatgtggttgctaggatttgaactcatgtcctctggaagagcagtcagtgctcttaaccgctgagccatctctccaggccccaaaggaacattttcagtgtctcttttggaagtttctttgttttgatttttatattttactatttattgtgtgtgtggattcaagtggaatctgagtctacgctttctaccacgtgtcactgggagtgtccttaggtgtggcagcagcaggcgactttctcctgagccatcttgcggtgctgaccaaccacctcagttattgaggttggtgtccttcatgtttgtttgtggtttggttgtttcttaaacacctcaaatgcagagctgaggactgtgtgcatgaggctttattgccagaattctaagaatgactgatcctgagagctcagaggacagcctcagctggatcagcacggctgttttagtcccagctcctacttggaaatttagaaatgccactattcctcgggagtccctgcttgggctgttacccttttccctgagtcacttcctgttctcaagcatccttgggtgtaattgaccttaccacgtgattgctgaacagagttctggcgagtcccattgtgcaagaagttttcaccttttttgtttgtttgtttttttgtttattgcttttcgagacagggtttccctgtgtagccctggctgtcctggaactcactttgtagactaggctagcctcgaactcaagaaatccacctgcctctgcctctcaagtgctgggattaaaggcgtgcgccaccaccgaccggcttaatctatttttttgaagatgcatttatttaatttatatgagtatactgtacagtcagacacaacagaagagggcatcggatcgcattacagatagttttgagccaccgtgtggttgctgcgaattgaactaaggacctctggaagagcagtcagagtgatcttaaccactgagccatctctccagcccttgcttctttttgtttgcttttaagacaggttttctctgtatcctgagctgtcctggaactaactttgcagaccaagctggcctagaactcacagatcttacctgcctctgcctcctgagtgctggaatcaaaggtgtgcatgcgccataactgtcctggtaaacttttttgaatcataggagaactaggagaaaaagaaatgtaaagaaataagctgcagttatattgtagatgaatgtattgagagaggctgcttttgtatagcagcctagacttgatcatggcctaagattttgctggttaaatactcttagatatggccttgataaatcaggtcagtttaaagaataggtaggtgtgtgtgtgtgtgtgtgtgtgtgtgtgtgtgtaatttcttttctccccaggggattcagcctaagccctgggcatcctagataggcatgtcactgtcccacgctaagctatatcccaagcctgtgtgtgtatgttgaaaatttaaactcttgccctagcaactgaaatgtgctttgttttctctttgatatatttatctttttgccagatttccatgttatgtctctgagatgcttttttaaaaatgtggccatttcaaagtactttcaagctgttaattctcaccccacagctttcccatgtgcctttatttaaagagcatttaatttctgttcccacagttaagacatgagaacaatgaagagatcttttatccagcgtggaatttgaacattaagcaaaggcagctagaaacacaatgataacatgtttatgttgcaggtttaaatagtttctagttttggttttgttgttgggttttttttttttttgtgggttttgttctgttttgttttttaaatgaagggaaaatagagagcaagtttaccctgtgtctatattttgcctggaattcataagccattgggattccgtaggtttcatttttttattttttggaccccagagaaactttagaataatgggcaaggaaactacagtccaggatcgcattttgcctctcccttccccgtctggttgtctcagcatcctcggccctcttcctcactggagttgcattgcacttcagaaagagatgggtttagacagagatgggagcctgtcaatcatatcttgctctgtacaaaaaaattaataatgatgataaaagagctactgttcctgcctcagtaaaagaagcaggatccagtttagagtgagttaagaaatgaagtagctgactgtgagcctccacttctgtgtttgctaggccccagcatagcctcacaagagacagctatatctgggtcctttcagcaaaatcttgctagtgtatgcaatggtgtcagcatttggaggctgattatgggatggatccccgggtatgtcagtctctagatggtccatcctttcatctcagctccaaactttgtgtctgtaactccttccatgggtgttttgttcccaattttaagaaggggcaaagtgtccacactttggtcttcgttcttcttgagtttcatgtgttttgcaaattgtgtcttgtaccttgggtattctaagtttctgggttaatatccacttatcagtgagtacatatcatgtgagttcttttgtgggtgggttacctcattcaggatgatgccctccaggtccatccatttgcctaggaatttcataaattcattctttttaatagctgagtagtactccattgtgtaaatgtaccacattttttgtagccattcctctgttgaggtacatctgggttctttccagcttctggctattataaataaggctgctatggacatagtggagcatgtgttcttcttaccagttggaacatcttctggatatatgggatcacagggcccccaatggaggagctagaaaaagtacccaaggacctgaagggatctgcaaccctatataggtggaacaataatatgaactaaccagtacccccagagctcgtgtctctagctgcatatgaatcagaagatggcctagcaggctatcagtggaaagagaggcccattggacttgcaaactttatatgcctcagtacaggggaacgccaggcccaagaagtgggagtgggtgggtaggggaggtggggagggtatgggggacttttgggatagcattggaaatgcaaatgaagaaaatacctaattaaaaaaaaagaaatgaagtagcaccaactcctgcgcatgcccagtgcttgctgtgagccatggaccgtgctgtacacctcaaacaactttttatttcccattcacagctcctgcacacagaagaaagcaggatcgcctcactgtgctgcctccaagtgttgtccccaaataccactgaccaaaaagtaggtttgacctaatactccatttaaaatagcaaattcatactttctgccagtccctttattcctctgtcacactattctttcacaacataatatttggcacgcactgcttattatttatttgaggcagggttccgtatagcccaggctgggctcagactaactgtgttgctgcggatgacctgtaacctctggtgccctgcctcctcatttccagttacaagcctctactgccagtgagttgtaaaccctttatttcctttttattcttttctcatacaatgtatcccatctgctgtttcccctccctccactcctcccagtctccccgctttcccctccctcctcctcccagatccagtgatactctggttcccttcagaaaagagcaggcttcccaggaatatcaaccaaagaactcacaacgaggtgcaaaccctcacacatcaaggctgtaagaggcaagccagtaggaagatctccagagcagacaagtcaaacacagcccacctcccacagttaggagtctcactgaaaccccaggctgaacaagcatggcatgtatgcagaggggcccagcgcagacccatgcaggattcatagttgctgcttccgtctccgtgagccctggttagctgattctgtggctgtgcgctcctggtgttcttgacccctctggctgctgcattagctcctccctgtgctgttccctgagctctgcctaaggttgggcttcgtgtgactctgcatctgttcccatagctgctaggggaagcctttctgatcatgttgggcacagatctatgagcttagcagagtaccatgaggaatcatttcattaagcttttaaattttatttatttatttttgcacctgtcctgtttcgttctaccctagatctatctctaggctagccaatgtctggttcctggcaatgccaggcatggtctccctcaggtgtgggcctcaagttagtccataagtcattagttggctactctcaccagttctgagccacttttgccccagcatgtctttcaggcaggacccgctgtaagtctgaagttaggtagctaggttgatgtcttagtccctccactggaagactagtctggttacagaagatggccagtttcaggctccatagcctcggttactaggtgtccgcactagggttacctggtaggttccagggagttcccagtgtactgtttgtttccacattgttcccaaaaagattccccagctccactcatctcttccaatattctccctcccctctctcctttaccccttcccttccctaccggacccctcctgttctattcctttccaccccagtctgcccacaaataatctctttccctttactagagaggtccacgcaccctccaccccctttttacttagcctccctggatgtgtgaattgtagcatgatcattcttttcttaacaaccactaatcagtgagtacagacctaccgtgcttcctttcttgtgctgggttggctcggggtaattttaatttttttctagtgtcatcaatttgcctgaaattttcatgttatatttttttaacagctgagttttttttttttttagatttatttatttattatatgtaagtacattgtagctgtcttcagacactccagaagagggagtcagatctcgttacggatggttgtgagccaccatgtggttgctgggatttgaactctggaccttcggaagagcagtcgggtgctcttacccactgagccatctcaccagcccctgagtttttttttaatagtaatgctctattgtgtaaaatataccacatatagtttatccattctcctgagggacatctaggttgtgtccaggttttggctattttgaatacagcgactctatgaatgaacataattgaacaagtgcacttgtggtaggatagaaggtcttttgggtatatgcccaagagtggtatagctggatcttgagatagattgatttccaatttcctgagaaactgccatattgatttgcacagcggctgtacaagtttgcacttgcaccagcaggggcggggtgtgctgcttgctcagcatccttgccagcgtgaactgtcacttcccttactgctcttaggcaccctgacaagtgtaaagttgaatcccaaagtagttttaagtgtttctcaccatttaggattcctctgtttaaaagtctctgtttagagctgtacctgtttttaaattggattgtttgggtttttttgtgagatgttgtttcttgagttcagtatatattttggatattagccctctgtcagatgtggagttggtggaaaagttttcccattctataggctgctgctttgtcctattaacgctgttctttgccttacagagaagcctttcagttttatgaagtgccatttactaattgttgaccttactacctgtgttactggtgttcggtttagtaagttaggaagctgtcttctgtgccaatacgttgaaggcgattcccctactttctcttttatcaggttcagtatatctggttttgtgtagaggtctttgagccacttggacttccgttttgtgcagaaatataaatatggatttatttgcattcttctacatttccagttagaccatttgttgacaatgctgtcttttcttgcccattatgtatttctttttgttgttgttgtttttgtttttcctttgagacagggtttctctgtatagccctggctgtcctggaactcactttgtagaccaggctagccttgaacccagaaatccctgcctccctgggattaaagtcatgctccaccaccgcccggctcattatctatttctgtccttatcaaaattcaagtatccatgtgtgtgcagacttacatctgggtctttgattcagctccattgatctgtttgtatttatgccaataccatgcagtttttattactactattgcttagtatgtttttacagcttgagatcagggatggtgatacctccagaagttcttttattgttcaggattgtttgagctatcatcttttttttcccccatatggaattacgtattgtcttttgaaaggctgtaaatttgtgttggaattttaataggaattgtgttgaatctgtatattgcttttggtaagatggccatttcactgttaatcctacggatccatgagcatgagagtgctttccatcttctgatatcttcttcagttcttcaatttctttcttaaaagacttgtagtttttttgtcatacaagtctttcacttgctttgttagggttaacccaaaatattttatgttatttgtggctattgtgaaggacgttgtttccctggtcaccttctcaatctgtcatttatgcataagtaaggctctgactttttcttttgttattaagttaatcctgtatccagacaggtgtttatcagctctagggttgcctagtagaatttttggagtcttttatgtatactgtttattctgtcagctgtaaataagatgctttgacgtcttccttttctaatgtgtatctctgatctcccttagttgtcttaaagctatgtctagaacttcaagtactgtattgaatagataagggagtgagtgagcagccttgccttgttcctgattttagtggagttgctttgagtttctcaccatttaatttgatgttggcttgccgtaaattggctttattataattaggtatgttccagtatccttaatccctccaagacttatgaaggggtgttgggttttgtcaaaggtgttctctctttgtttttggcatctaaatagatggctgtggtaatccattgatttacaggtctacataacgttaatatagtgtgtgcgtgtgtgtgcttgtgtggaggtcaggacaatctgagaatccagtcagtctttcctgccacacgtatcccaggatcaaactgagctgagtggcaggcaagttcctagtgagccatccccctgcctagagacagaccatttactgaagtcactttctcaccatgggctctcgtattggagtatattttaattttgggttattatctaaggcaggtgtttgcggatcagtgccccctggaagtgagtcataggcattgttcaagaaggaagcagctaagacaacatgaatgaacaaaaaatgaatgaacaaatgaagaaaacggcaaagacaagtggccagaaagggccgggcggaagagccctcgacagactgaccctaaagcaagacgaggcaaggccagtccagaataccagagtggaagctccccgtgtaacatacaccatccgggatgaaagtgagattagccccgagactgaggaagatggcttccctgacggatacctagagtgcatcatacgaggtgagttttccgaacccattctggaagaggatttcctttttaaatccttcgaaagcttggaggaagtggagcaaaacctttctcgccaggttctggaagcgagttcccttctcgagtcttctttggagtacatgacaaaggggacgaagcaagagaagagagaggtcacgcaagagacgcctccgctgagggttggggcgagctcattacttgcaggcggccctgcagagaagccagagggcggtgtgtactgtggtgtcttatcgatgctggagtgtcctcaagccgggtgcaagaagaagctgagggataaaaccgccctgaggaagcacatgcttgtccacgggccccggcggcacgtgtgtgcagagtgtggcaaagccttcacggagagctcgaaactaaagcgacattttctggtgcacaccggagagaagccgtatcagtgcacgttcgaaggctgtgggaagcgcttctccctggatttcaacttgcgcacccatatccgcatccacaccggggagaggcgctttgtgtgtccttttgatggctgcgagaagagctttattcagtcaaataaccagaagattcacatcctaacccacgcaaaggccgggaagaaatgctgaaggtggagacagattgtcctcaggctgggtagtcttaatgacagaggcactggggatacacgcattatgtacagattgttatttgtagggatagattctatggctaaaataattttgcaactcttcattatacagttttaaggcctcttttggtattccatggtatagttccaacaggaaagtcaatggtgaaagcagtttcaaaagcataacccttactatatgtgctattgaaggggatggggacttttgcatacgtcggaaaatcagttatttttaactatgcagttcctaattgcctagcttttacctttagaaatatgcttcatggtaaatttgataatcctaaagaatggccaactttggcagtagtcaacaaatgaatacatatttctaaattttatgttttgatttttgtttttctcattgtaccaaactatattaatcatagttaaatgtgaatagttacaaaaaagttgatccatctgaagattttagatgtttcaaaataaaaggaaataaaacacta

SEQ ID NO: 14 - DNA, 69149 bp, Homo sapiens
  source 1..69149: mol_type = genomic DNA
aagagcaaaaagcgaaggcgcaatctggacactgggagattcggagcgcagggagtttgagagaaacttttattttgaagagaccaaggttgagggggggcttatttcctgacagctatttacttagagcaaatgattagttttagaaggatggactataacattgaatcaattacaaaacgcggtttttgagcccattactgttggagctacagggagagaaacagaggaggagactgcaagagatcattggaggccgtgggcacgctctttactccatgtgtgggacattcattgcggaataacatcggaggagaaggtaagggaaaagaaaaaatgattttttgtttataagggaagtccctgatcagactctgggactggagaaagcgaagtaacttcaaactttgggcgacaagaaaaaaaaaaaggagctggattccagttgtgtgtccagagagtaatttttttttttcggaataaacttcacttggggacgggtgggagataaccatagagttagaaagtctaggtattttttttaaacacacattttccagacctatttttaaaaacaatgtttttctaacaaccctatggcctcccaaagaaattgtttaggcttacatttttgaggtttcttttgggagtgggggtggtgttcgtgaatactgggccgaacaccaaggaactgggggtggaggcagaggtgtttgccctcttcttggcagtgggtcctggaaggcgacaggttttaaatgagtgttttcattcctcgcctgcggtttggcgggacagcgctgcagcccatggtgtggagcgcggctgggggaccagggggaggtggggagaggggagcgtggaggggagcgtggaggggggcgcgcgaaggggttgcggggcgcaggaggcgggctgggctcggctggagaccggacctcggtgttggcctacagcacagggagccggccgaatgcgcgtgattactggacggcgctgctctgggagagagtcggggccagatttggcgcggcggtgaggcggctgcgggacaagcagaggcgcgcgggcgtgggcaagggtttggggcgctctggagcggtttgttgggtcagtgaggtgccagggagagcgggtgcctgccgggcagtgtgctcgggttgcacgccctagcgcgggggcgacagcggcggcgcgggcgggcggtctggaataatgacaaacacatttggccctgagtgaagaagtcgtcgtcgcctcgcattccagcaactgggatttgaggaatttcgaaccgcacaccaaggggccctcattgtgctccgtggcccccgcccccgcctgtcttcccgcgccccctcctcggtggaatcatttctgcattgcccgggggctctgctttcgctcagttctggccgcaggcaggaagagaggaaaggtctccaggaaggtgccgaacttcttgtgaggaagttagggacgacttggaactggggaaacttgtttgcaggtaagacagaaaggtgggaggtaaaccatattctccctccgggcacccgagccctggacaccccctacccggcacccttctccgcgcgggggtgcgtggcacttgccgtctgagctcgcccagcgctgctcggtcctctctagttggccttttttccattcctctccctgccggcttcagagccgtctgtgcgtacttctccttcctctgctgtctacccccatggaaaccagatttacacacgaaattaactccgcccggctgcgcccagggagcgggcggcgtccatttggcattgaatatgtgggatcagctgttctattccgggagggtgtcggccaggtcggagcgacgagtgtggcccaacccgagtacgttgccagagggagccaggagcctgggccgggccaggtgtgcgagagctgccgatggcctggcctcgcgtcttggtcgggaaggacttgctggcctggcaggctgtgcgttgtgcatccctcccgcagccagagcgccggtcccgcacttcgctccccgaattgtgctaagacctcaggatgtgcgcaaggagtgcctggaagaacttgccactcactccatcttcctgggtgggaggcaagcatggatggggcccatatcaggtccctaccgccccgcgtccgaaaagccgcgggctgggcggtgtgggaaatggctttttggctccgaggccaaattgctcaatgttttggaccgactcgcctcgccgcggtcgctcctgacaagaactagacagatttttggagcagggagcatccagggcaaacgcacgacagtcctccgcagtgcatctcaccggacaaacatccccggagccacaggaggggaggaaggggctctccgggcgtgcgcacctccccagccgccgcgctgtcccatccccgacccctaatctggtcaacctggaccccggcactgctgaattgcatcccctcttctccctttctcctcggcctcctcctttccacaaccctcaagatgaggaggccctgcctcgactccccgacaggcgcaaggccgaccaggctcgctttgacgccctggtcaggccctgcttcggagcttgcagttttgggttgacccaagtgcagctggacctcgttcacaagagtgaggggaagccaagaatgaacccgtcgttagcccccggtgccctggctcttgtttaaatccttagatcgagaaggacttgaaggagatcccaggctcccagctctgcgcccctgggccagtttcctctcgggacgcggactgaggagggatgcagggggaggggcattgggccgggctttccagctgcaaacacgtctggcgccgaggcgggcccattttgtgcctcctggggacggaccgtgggcggcgcgcagcggcgggacgcgttttggggacgtggtggccagcgccttcctgcagaccccacagggaagtactccctttgacctccggggagctgcgaccaggttatacgttgctggtggaaaagtgacaattctaggaaaagagctaaaagccggatcggtgaccgaaaggtgtgggtctcagggttccccgggtctaactcgccgggtccaaccgcagcatcagccttggggcggcagataatctttcggtctcgcctggggcgcaagatgcaggatcgggggcaaatggcttctcccaacttccccctaattcgggttctgccagatggttgtcgtttgctgaagtggctcggcggcatttccttttgttttaaactgatcaatgagcgaacctgggatgggctgaaaaagtagattgtaggagggaataatgggaaacccgacttggggcgcctccttccctgcctcctactgcagtttctcggcccccgcgaaaggggagcgacaagcgcgggtgggcgcggactcttgagggggcagaggcggctatggcgcgtgtcgggcaaggtggcaccagaaggcacttttgtgtgtgtgtgtgacaagagtctcgctctgtcgcccaggctgaagtgcagtggtgcgatctcggctcactgcaacctctgcctcccaggttcaagcgattctcctgcctcagcctcccgagtaactgggattacaggtgcccgccaccacgccaggctaatttttgtatttttagtagagacggggtttcaccatattggccatgctggtctcgaactcctgacctcaggtgatccgcccacctcggcctcccaaagtgctgggatttacaggcgtaagccaccgcgcccggccaggaacggttcttaaatgccgagagggcgcatgctagctctcctcagcattcccggtgagccgctacccacggccgtgcggctctcgtgcccataggaggcgctggcgagctcctgtaaccctaaacccctcggcccctttccccccacccgcccggattctcttcccgctctcccccctctctccacacccgcccggccccctctcgggtctcagttgaaaacaatgcaaacgcagagcgtcgtgcctggggcgcagcggcctctgcagctctgaggttcagagcgcggcgcgcaggggcgcaggggcgcaggtccccggagcggctgggcatcgccgccaaccccgggacaaccaagccgccgaggacttggtggaggtgggagggagagcggaccgcgcagtgttcctctgggtcccggggtcagaagccggacagtggcgggggctggacagtccgagcgcagagcctcccgggcgaagtctgcgcgcagcactcccggctgcgctgtcggggaccaggagcctgggctgcgggcgagctagctggcgagccgggtaagattcgcggggctgtcgcgccctctagtgggctccggggacgcatcccgctttccccagccccgggcggtcggcgccgctatctcagtggagcgcagcgctggaaccccgggggcccggagcggaggctaatctgggtcacctttcccctcctccgggcagccagtggactcctcgcaggctctgtgtgggcccgggaggcgccgggtggacgagagggggccgaggtctctgggtttggattgagaatgggacgtccttgtaattcaatgtgggagaagcaggggagtgtggaggaggacgggtcccgtgcgttcttggggggcaggcgccgtcttctgcgttccagcccctcgccagctcccttgccccgcgggcggcctgttgctgtttgtttgttttacgaccctgcgttattgtgcaacggtaacagtcgtttccaatcagctgcgcggccgtcgcggccctcgccaggctggtttatgggggcggcggtggcgcgcggacagataggacagcgcggcccgggaacggcgtcgaggtccaggcggtccccctgccccgagggggcggaaatgctgaggtggcgagagcgtgggttgcacagaaccctagtagcgagtccggctgagcctctgcggcctagcccagcagcgtcgtcttcccggctccgaagacgtcttcccgaagccccgctgccccggcgcaccagctcccggtgatggggatgatgatggggatgatggggagatgtccccgaattctcctggggtcccgaggagatttagccattttcaacagcagttttcctatttctgcttaaaccccgcgggctttcaactgaggtcaccacgaaagctaaaagtacaacctaaggaaggaagagactggaaattaacatttggggtagtggagctcagaattcctcgcagcggcgtctgtgtcgcaacccgtggacgcacgtccttggaccaacactgccatctgctggccactcgtaagaactactgcgacccgctgtgagaatgggcttcgcggagaccattaggaaggtgctttattttttattttttatttattttttgctcagtaggaccgtaataggtgactgattttcttttgctgtgaggctacaagaattgctggaagacaacatttttatttcgtggaaatttgtgttgtgtttctccttggttgttaatgctttgcatttacatagtgaacatcttattatcagagctggcctgtgaggagggtagtgggggggcattgatgttcccgtttctgagtgaggagacctatgtcggggccttggtgacctcaagccgaatgctcaaactgctactgctactcctaaggttgtgccattaggagtcacacccgtttggtgatattcaaaaggatatgtcattttattctcccgtggttaaatatatggtgagaggagagcaggcatgtttatgagcccagattgtcccataaaaggctcctgtttaaaaacactccagccccctcccattactggaatgtctgatggagctccgggagatcaaaacaacaaaacaggctctggtagggtgcagaggtcctggtaaacacaccctctgctggaaaacagggagaagtttccaccagtgtagacctgcacttggtttgcctgggctgaagttaggagactgcgtagaaaaaggaaaatgtgtaattttcacagttagaattaacttaggagagctgaaattaactgagcctcggaaatctgaatcttgaagtcaccagtggcttttggggctgtgagagagtctcctgtggtctttaatcatgtgagggtggggtgaaattcaatattcagtggttctgcaatgggatgcactgtgcaattggtgattgagaagccaactctctggctttaggagaagaatgtcttgctgttagtccttctggaaatagagccttgcattgcctactgtctgtttacactacctttgcacattgcctttggttatagagtcatgtccaatggctctttacttctgtttgcagggcaggagatggcaccctgttaaagagaaaggatagtagctgcaaagtcatttgtttctctgtttctgtgactgtatatattggctcatctttgaatggtctttatagccacaccaggctggaggtaacagggtcatgggagtggactgctggtgtgggctgaatcagagttcagatccatgtctccaggaggtaggaggtgcagggcaagtcatgtggcttctggggcatccctcactttcttagttaaggagaagttgaaggagccgatctaaaatatcttgggagtctgcagaaaaagtcgtgaaaatcaaagcactttcaattaaactatataatttagtccttacaagaatgccacagggcaagcaaccagtcaggccttggtagtcgtgcttcctagaagaaaagactgaggttcagagagttggatagagtatcagatttgggatcagtggctagtccaatgtgatttccatcctttcttctgagagaaagcataagaaggccaagaggatggtggaaaagcacaagtcacctgcctgagagtcaacagggcggggggtctctttctcagtttgttcctctaagttatggcaaatgttttttgagctgtgattattgagaatgggggctgaagttcaacatgtagttggcatgagggaagtaattatgattgaagaaaagatttgggtgaaatctagtgttcttccctgcaaagggggttgttctcacggattcttatggtgccatgtttctcagaatttgtagtttcagttacttatatttgcacacctgactttagatgagctccagaatagcagttactaattaaggatgagcatttagagtagataaaagtggcaggaacagcaagactcactcccagagagcctcactacaggtctaataggtgaggaaattccccatgtttcccatttttcttcattacctccctgtggggcaagcactgccattattcatgagtaaactgtctgagttatagataagtaatgacatgaaacttcacaaacacgctgagcacagtggctcacgcctgtaatcccagcactttgggaagccgacgtgggtgaatcacgaggtcaggagttcgagatcagcctgaccaacatggtgaaaccctgtctgtactaaaaatacaagaaattagctggccatgatggtgggcacctgtaataccagctactcgggaggctgagacaggagaatcgcttgaacttgggaggcagaggttgcaatgagctgagatcatgccactgcactccagcccaggcggcagtgcaagactccatctaaaaaaagaaaaagaaagaaagaaaaaagaaaaaaagaaagttcacaaacaggcctgatttctacccagggaaccactgttatcagagattggggtttggaatcttaagcaacaaacacatgtttattctcttccttcctgatggcttgctcagaggacctgtttccattgcccactttttttttgagacagaatcttgctctgtcacccaggctggagtgcagtggcgagatcctggctcactgcaacctctgcctactgggttgaagccattctcctgcctcagcctcccgagtagctgggattataggtacctgccgccatgcctggctaattttttgtatttttagtagagatggggtttcatcatgtcggccaggatggtcttgaactcctgacctcaagtgatctgcccacctcagccttccaaagtgttgggattacagatgtgagccaccacgcccggcctcattggccactttatatgtcagtaaataatctttcctggcagagggtccactgtatctggaggcactgaaggaaatctgggagtgtctggccagggcaaagcactgcttagagcttgcacaggaaaagcagtgagcccttcttttaagctggagaaagctttaaagatgcatctttggcaagtcttgccaaagaaatatgggttctaaatgtgataaaaccaaagacatcaagctggctctggaggccttgtttgaagtttgctgagtggattgtcagtgggaggctgatatttatatgtacaaacacacaagcattactgctaattgtggtaaatcaggctggccagcctggctctggggcccactgtgcctgccaccgcagcagtgtggaagccttgcatcccaggcacatgtcaggatcctcggaggccatcagccagccagcattgtgtgaattgcatttgggttcacagcactgtaattgtgtttctcctgctgtggtgagcaaaggaggaaaatggaaggaggaggtataatttgccctaggaaatagtcaggcaagtaggtggcacacaggggtgggatatggctaaaacactgaccttcccttgagagagaccatatggtgaagtggagagggcatggcgtttgtatcacacgaccttgtgttcaaatcctggctctgtcactggctgtgtgactttgggtcatttgcaaaacctctctgagcctcaactgccacttcttaaaatcagctctaagtaatcacagggttattcttcacaaacacagcatgcacatgcaaactttggcttagtaaataatggtttctccttctcttactttgttttctacataccccactccccttcctgtgaggagccttccacctttttctctgtgttctcttcctctcccattttcctggtagcattcaataaaacagaaatctgatttctgcaaagtaggccaccttacggtagaaatacatgattaggccccaccaaaaactttgattaggctattatcttctggatcctggatcccctccaaccaaaccaaacccaactagggctaaacacagcaatatatgaatacattgaatttctctctcactctttcttttttttaaaccagtttactcaggaatcacatgcacacatattttagcttccaaagccaatgatggaacaaattgtgtcccattaggctcactccattgtatgagttagcatcagaggagttcataccagagtgacttcatcttgaatagggcctaggtaagaagaggatgagacctgctgggctgcattcccaggaggttacacatttgtagtcacaggagagaaaggagttggtataggagttgatagatacaggtcataaagaccccagtgataaaacaggttgcaggccaggtttggtggctcattcctgtaatcatagtactttgggaggccaaggcaggaagattgcttgagcccaggatttcaagatgagcctggacaacatagtgagaccttgtctctacaaacaataattttaaaaacatgagctgggcatgatggtgcaggcctatagtcccagctactggtctgaggggcagttgggtggcaggctgagatgggaggatggaggctgcggtgagctgagatcaggccactgcactccagcctgggtgatggaataagaccctgtctcaaaaatagataaataaataaataaataagccagcaaaaccagaatgcagtgaagaagctggccaaaacccaccaaaacgaagatggtgatgaaagtgacctctggtcatccctactgcttattacacactaattataatgcattagcatgttaaaagacactcccaccagtgccatggcagtttacaaatgccatagcaatgaccagagatactctatatggtctaaaaaggggaggaaccctcagtcctgggaattacctgtccctttcagggaaaactcatgaatcttctaccgcttgttgagcgtataatcaagaaataactataggtatactcactcaagcagccatgcagttgctgtgcccatggagtagccactcttttattcttttactttcttaatatatttgctgtcattttactcttttggcttgctcttgaattccttcctgcatgaagccaagaacctttgtgacctcccaggctgaaccccaattttgagttccaccctatgacatcttttctggtgaccaatgaagggacaatggtaacctcccgttgactttaaattaaaactgattggcactgtttgggcttcaccggtgggtgagtctctccttgcccagattcaacttgctaacatttttttctcttcaattttggctcctttgtccttcctaatgttcttcattttggacagatgggaaagtggctgtgaggcctctggcttagcagcctgatagcagcctcctgttgtctgggtgccccagatgggagcacgcctggctggccacatcttttgcaacccaccttgtcatcccttctctgggaccttttctctttagtttcttttttaaaaaaaattttaaattatttatttatttatttatttttagagatagcatctcgctgtgttgcccaggctggagtgcagtggcataatcatggctcactgaagcctggacctcactggctcaagtgatccttccacctcagcctcctgagtagctgggactataggcatgcaccaccacgcctggctaaattttgtattttttttgtagagacggggttttgccatgctgcctagactggtcttgaactcctgggctcaaatgatctgcctgcctcagcttcccaaggtactgggattataggtgtgagccactgcacctggcctctctttagtttttaatgactggctgtttgacttctctgctcttcaggctgaaattcttatttcatgtttgtagtctttgccttggctatttggcaactgtttaaggcaagacacttggttttgagagttctcccgttgtgttgaccctgggacaccagggtcattgttctgtagctccaattatgttaggtctcatgcttttgggtttcactattggccaccccccagatgctctggggtttttggcatttggtgtggggacccttgttagctgatactctgggcttttcggcatttggatgctccagggtgtttggcactgacattcccctctagcattgtgggttagagtcccacccaggggaaatcttggttttgccttttcttgttttctactctaaagttatcattttctataaaaacattttcttttcttattgtcactttgtttaatgctttgctccaggaggtgggaatttgcaggggaaaataattgggctctccctatacttagaaaaacttctgtgtctagtagagatccttgttagacaaagggacagtggtgagtcccagagaactcgtcactagggtgccttttaggcaattggagcaaattcaaattagcaaactaagtttggccatttggataagtcccagttttgtcagggaaataatttgggtccagctatcttttataaaatagtgcgtttgcgttcctacattatggctagagctcaaagataaaagctattggatctttgtttatgtgtgtgtataaatgtctagatgtgtttatgtgtatgtacatttattatgttatatattgtatctacagggtaccaaattggcttataaataaaagagtgctcataaaaagagtaaataagtccaagcatttctcaagctcatgtaacttaagtttactaaaatttagagttactaaaaattcatatataactctgtataaatgtgccaaagaagatatgctcttagtgaaaataaattctttttggccaattcagatgtcatttatatgtggggtttaaaatatgaatttcgaaagaaaataaaaacaagtagaaagaaataaaaaacaataagcagtggagagagatgtgaggaaagttatgaatatgaagacgtatttttggtaaggaatgttataaagaaattttatgagaaaggatcttatatgataaattcttgtcctaaggtagaatgactgattgtttagaaaagaaggaaatataggacaagtcagaaagtccaagcatgttgtagatgacctatgtaagtcacgataaagtttatacaagagaatttattaaaatttagatgtaattagccataactgaaaggaaatttatttatttatttatttatttatttatttatttatttatgatttattttgagaaggagttttgctcttgttgcccaggctggagtgcaatgtcatgatcttggttcactgcagcctccgcatcctgggttcaggcatttctcctgtctcagcctcctgagtagctaggattacaggcatgcaccaccacacctggctaattttgtatttttagtagagatggggtttcatcatgtttgtcaggctggtctcaaactcctgacctcagttgatccacccaccttggcctcccaaggtgctgggattacaggcatgagccacctcatgcacccagccaggaaatttatatataatactctatctaaattttggtgccctatgttaaaacaagtttttcttcaagtattggtttgctttcagtaagattgcaagaaatattgacttttaattctagaatctgtttcctttgaaggcctctcagatttatatcttttccttttcccttgaaaaggtatagcctttgcaagttcaaaactgacttccctagactccttttaggaaaagcaatacagtggttgtttcaggctgtggctcaatagctaagcctttgttctttcatggtggtggcctgggttcagttcctggcttagagaatgagaggtttccagtttgctacttctgggacttttgtcatttatttattctttttgtctccatcgacagcttctgattttctcacttgaatttttttttctgtgagctaccttaagggtaatgttggatcttgtaaaaattgcttgccatctctttggagatacctcttgtgtccatggttaagttataaccttggttaaggcctgttggtttcactagggaaaatacctttaaaaaaaggcttaaaagccagagatgttggctatttgtcctggctagagtctggtattaagggatttaaaaggattttttaaaggacctctatagttataagtcagcttaattaaaaatggatattccatagtcatatttatatatatatacacacacatatatatgtatgtatgtgtgtatatatatatatttaaaagacctgtatgatttttttcttcttggaacttatttttttgagagaaagtgttttgtgtgtttgttgtttgtttttcttctcagtggactgaattatttctccattctgtctttttaccccctttaatgaccatattagaggacctaagataatttctgacagcctgggactccttgggaggaaacagaaggtgccacagacctcgttttgggagaaacctctgttttcctcatggaaccccaagagctgtaagcagagagttctccctcagaatccaaggctctgctctgtttacgtcacattacctgacctttgtgacttttgggggcatcagaaattactttgcattatgagggaacctttagcattggtgtgtattacctaggtaggatgtgtacttttagggattgcagttgcttacatgagtggttattactacagaccaatacttctttcttctcacatttaaatgaaaaaaaagcatgctcttgggcatccacctatgaatggaggatgggctgatttgctttaggttggccaccagcctttggggaacatcgttgcagtgaaatgcttggtgaaagcattgcactgtctgatcgcatagtgcacttctatgcacttctgcctgatgtcctaggctcaacacctgctacataattaagatcacttacttatcaggtttttaatcaaaatgaaatgttgctaagagttaacattatagcatatgtaattgagattactggagaaagttttacctacaagatatgtaaggaaagcaaaatgtgtttttggtaaaagattataggaaggtgtgccagtatagttttttattttgcttactttaatgggttaaaggattgttttaagtttgataggagaaagctgaagcatgagcaagttgtggaaggtatatgaaagattaacattttaaaagaaattctgtgtgtaaacattggctaaagttaaaggaggaggttggagccaagatggctgaataggaacagctccggtctacagctcccagcatcagcgatgcagaagatgggtgatttctgcatttccatctgaggtatcaggttcctatcactagggagtgccagacagtgggcgcaggacagtgggtgcagcgcaccgtgcgcgaaccgaagcagggcaagccattgcctcactcggaaagtgcaaggagtcagggagttccctttcctagtcaaagaaaggggtgacagacggcacctggaaaatcgggtcactcccaccccaatactgcgcttttccgacgggcttaaaaaaaggcacaccaggagattatatcccgcacatggctcagagggtcctacgcccacagagtctcgctgattgctagcacagcagcctgagatcaaactgcaaggcagcagcgaggctgggggaggggtgcccaccattgcccaggcttgcttaggtaaacaaagcggctgggaagctcgaacagggtggagcccaccacagctcaaggaggcctgcctgcctctgtaggctccatctctgggggtagggcacagacaaacaaaaagacagcagtaacctctgcagacttaaatgtccctgtctgacagctttgaagagagcagtgattctcccagcacacagctggagatctgagaacgggcagactgcctcctcaagtgggtccctgacccctgacccctgagcagcctaactgggaggcaccccctagtaggggcagactgacacctcacacagccgggtactcctctgagacaaaacttccagaggaatgatcagacagcagcatttgcggttcacgaaaatctgctgttctgccgccactgctgctggtacccaggcaaacagggtctggagtggacctttagcaaactccaacagacctgcagctgaggatcctgtctgttagaaggaaaactaacaaacagaaaggacatccacaccaaaaacccatctgtacatcaccatcatcaaagaccgaaagtagataaaaccacaaagatggggaaaaaacagagcagaaaaactggaaactctgaaaagcagagcgcctctcctcctccagaggaacgcagctcctcaccagcaatggaacaaagctggacggagaatgactttgacgagttgagagaagaaggcttcagacgatcaaactactccgagctacaggaggaaattcaaaccaaaggcaaagaagttgaaaactttgaaaaaactttagacgaatctataactagaataaccaatacagagaagtgcttaaaggagcagatggagctgaaagccaaggctcaagaactacatgaagaatgcagaagccttaggagctgatgcgatcaactggaagaaagggtatcagtgatggaagatgaaatgaatgaaatgaaatgagaagggaagtttaaagaaaaaagaataaaaagaaacgaacaaagcctccaagaaatatgggactatgtgaaaagaccaaatctacgtctgattggtgtacctgaaagtgacggggagaatggaaccaagttggaaaacactctgcaggatattatccaggagaacctccccaatctagcaaggcaggccaacattcagattcaggaaatacagagaacgccacaaagatactcctcgagaagagcaactccaagacacataattgtcagattcaccaaagttgaaggaaaaaatgttaagggcagccagagagtaaggtcaggttacccacaaagggaagcccatcagactaacagtggatctctcagcagaaactctacaagccagaagagagtgggggccaatattcaacattcttaaagaaaagaattttcaacccagaatttcatatccagccaaactaagcttcataagtgaaggagaaataaaatactttacagacaagcaaatgctgagagattctgtcaccaccaggcctgccctaaaagagctcctgaaggaagcactaaacatggaaaggaacaaccggtaccagccactgcaaaatcatgccaaattgtaaagaccattgaggctaggaagaaactgcatcaactaacgagcaaaataaccagctaacatcataatgacaggatcaaattcacacataacaatattaactttaaatgtaaatggactaaatgcttcaatcaaaagacacagactggcaaattggataaagagtcaagacccatcagtgtgctgtattcaggaaacccatctcacgtgcagagacacacataggctcaaaataaaaggatggaggaagatctaccaagcaaatggaaaacaaaaaaaggcaggggttgcaatcctagtctctgataaaacagactttaaaccaacaaagatcaaaagagacaaagaaggccattacataatggtaaagggatcaattcaacaggaagagctaactatcctaaatatatatgcacccaacaatacaggagcacccagattcataaagcaagtcctgagtgacctacaaagagacttagactcccacacaataataattggagactttaacaccccactgtcaatattagacagatcaacgagacaaaaagttaacaaagatagccaggaattgaactcagctctgcaccaagcggacctaatagacatctacagaactctccaccccaaatcaacagaatatacatgtttttcagcaccacaccacacctatcccaaaattgaccacatagttggaagtaaagcactcctcagcaaatgtaaaagaacagaaattataacaaactgtctctcagaccacagtgcaatcaaaccagaactcaggattaagaaactcactgaaaactgctcaactacatggaaactgaacaacctgctcctgaatgactactgggtacataacgaaatgaaggcagaaataaagatgttctttgaaccgacgagaacaaagacacaacataccagaatctctgggacacattcaaagcagtgtgtagagggaaatttatagcactaaatgcccacaagagaaagcaggaaagatccaaaattgtcaccctaacatcacaattaaaagaactagaaaagcaagagcaaacacattcaaaagctagcagaaggcaagaaataactaaaatcagagcagaactgaaggaaatagagacacaaaaaacccttcaaaaaattaatgaatccaggagctggttttttgaaaggatcaacaaaattgatagactgctagcaagactaataaagaagaaaagagagaagaatcaaatagacgcaaaaaaaaaaatgataaaggggatatcaccaccgatcccacagaaatgcaaactaccatcagagaataccacaaacacctctatgcaaataaactagaaaatctagaagaagtggataaattcctcgacacatacaccctcccaagactaaaccaggaagaagttgattctctgaatagaccaataacaggctctgaaattgtggcaataatcagtagcttaccaaccaaaaagagtccaggaccagatggattcacagccgaattctaccagaggtacaaggaggaactggtaccattccttctgaaactattccaatcaatagaaaaagagggaatcctccctaactcattttatgagggcagcatcatcctgataccaaagccaggcagagacacaaccaaaaaagagaattttagaccaatatccttggtgaacattgatgcaaaaatcctcaataaaatactggcaaacagaatccagcagcacatcaaaaagcttatccaccatgatcaagttggcttcatgcctgggatgcaaggctggttcaatatacccaaatcaataaatgtaatccagcatgtaaacagaaccaaagacaaaaaccacatgattatctcaatagatgcagaaaaggcctttgacaaaattcaacaacccttcatgctaaaaactctcaataaattaggtatgtaaatgggacgtatctcaaaataataagagctatctatgacaaacccacagccaatatcatactgaatgggcaaaaactggaagcattccctttgaaaactggcacaagacagggatgcgctctctcaccactcctattcaacatagtgttggacgttctggccagggcaattaggcaggagaaggaaataaagagtattcagttaggaaaagaggaagtcaaattgtccctgtttgcggatgacatgattgtatatctagaaaaccccattgtctcagcccaaaatctcctgaagctgataagcaacttcagcaaagtctcaggatacaaaatcaatgtacaaaaatcacaagcattcttatacaccaataacagacaaacagccaaatcgtgagtgaactcccattcacaattgcttcaaagagaataaaatacctaggaatccaacttacaagggacgtgaaggacctcttcaagaactacaaaccactgctcaatgaaataaaagaggatacaaacaaatggaagaccattccatgctcatgtgtaggaagaatcaatatcatgaaaatggccatactgcctaaagtaatttatagattcaatgccatccccatcaagctaccaatgactttcttcacagaattggaaaaaactactttaaagttcatgtggaaccaaaaaagagcccgcatcgccaagtcagtcctaagccaaaagaacaaagctggaggcatcacgctacctgacttcaaactatactacaaagctacagtaaccaaaacagcatggtactggtaccaaaacagagatatagatcaatggaacagaacagaaccctcagaaataacgccgcatatctacaactatctgatctttgacaaacctgagaaaaacaagcaatggggaaaggattctttatttaataaatggtgctgggaaaactggctagccatatgtagaaagctgaaactggatcccttccttacaccttatacaaaaattaattcaagatggattaaagacttaaacgttagacctaaaaccataaaaaccctagaagaaaacctaggcattaccattcaggacatagggcatgggcaaggacttcatgtctaaaacaccaaaagcaatggcaacaaaagccaaaattgacaaatgggatctaattaaactaaagagcttctgcacagtgaaagaaactaccatcagagtgaataggcaacctacaaaatgggagaaaatttttgcaacctactcatctgacaaagggctaatatccagactctacaatgaactttaacaaatttacaggaaaaaaacaaacaaccccatcaaaaagtgggcaaaggacatgaacagacacttctcaaaagaagacatttaagcagccaaaaaaacacatgaaaaaatgctcaccatcactggccatcagagaaatgcaaatcaaaaccacaatgagatagcatctcacaccagttagaatggcaatcattaaaaagtcaggaaacaacaggtgctggagaggatgtggagaaataggaacacttttacactgttggtgtaaaagtgttggtgggactgtaaactagttcaacccttgtgggactgtaaactatttggttggtgggactgtaaactagttcaacccttgtggaagtcagtgtggtgattcctcagggatctagaactagaaataccatttgacccagcaatcccattactgggtatatacccgaaggattataaatcatgctgctataaagacacatgcacacgtatgtttattgcggcactattcacaatagcaaagacttggaaccaacccaaatatccaacgatgatagactggattaagaaaatgtggcacatatacaccatggaatagtatgcagccataaaaaatgatgagttcaggtcctttgtagggacatggatgaaattggaaatcatcattctcagtaaactatcgcaagaagaaaaaaccaaatgccgcatattctcactcataggtgggaattgaacaatgagaacaacacggacacaggaaggggaacatcacactctggggactgttgtggggtgggggtagtggggagggatacctttaggagatatacctcgtgctaaatgacgagttaatgggtgcagcacaccagcatggcacatgtatacatatgtaactaacctgcacattgtgcgcatgtaccctaaaacttaaagtataataataataaaataaaaaaatttttaaaaaataaagttaaagggatattattattattatttttgtaagttaaacattaggattaaaaagcacaacagagttttctagagcactgatctactctgtaacagaaaattgtaaagggtttaaaaggtttatgagaatcttaccttatggtcaaactggttaagattgggaagatttgtctataaagttttattaagaattgggtttgacattaatactacactaatgcaaacgtgaaatgtggctttctctcttgaataagattttcatgtattattacaagataatgaaagatttttatttgctttttaaataaactataggaaaaataagggagagaaaagtgacagatcatttggaaacccaagtctcccctatatcaatgagtaaaagtttttacctttttgaaatctttgagttatcattttggctaaataaatgctttatggtgacctgggattctattttgtaatatcaactgtttaaaccttttgtatttgacaaacgttccaaactgaaattctaatgtaagtctttttctgacctgattagtccttctagatattaggtcccctaaagtccaaaagtgacatatttggcttattagatatattaaaatcatacaggaagcactttcaaatataaaatgctatttggctttctttggactatacttatataaatgtgttattggtatatgttccaaaattatgcaaaactcctataattctgatatgacttagtgtacattatcagtcataattatagttcttatgttacattattgtgtgctacagagttaaccaaatttctttgtcaattgcatctttaatcagctgtcctaagacttttgtcacccacagacaattgtcttgttttaatccttttcaaaaggtggtttataatcagctataggactctgatgggtactctaaaatgcaagcctctgataactttgaaaattgtgccattggctgggcatgatggctcacaactgtaatcccagcactttgggaggctgaggcaggcagatcacgtggggtcaggagttcaagactagcttggccagcatggtgaaatgccatctctactaaaaatacaaaaatcagtcaggcatggtggcatgcacctgtaatcccagttactcgggaggctgaggcaggagaatcacttgaacctgggaggcagaggttgcagtgagctgagatcgcaccattgcattccagcctgggcaacaagagggaaactccgtctcaaaaaaaaaaaaaaaaaaaaattgaaaaagaatattgtgccattgaaacagaaaagaaaacacaaataaacttccaggattctcatagaaacttaatatattcataaggaatgtggcccaatatcaggcaaaacaagagttaacagcatggactaaactaataaaagaccaaaacaatcttttaatgactttttgcttaaaacattgcatatcctttctgttttgcttttcagagtcaagaaaacttttcctttggaaagtatttactgcttttaacaattgaaaaaagtatactactatggacaaaatttggagcatatgtctttctttttacctgatttctccagaatttgaaaactatttgggagtattcttaactaatagcaatatagttatttgcctaagtgcagtaagaatcttttcttttgtaataggacacaattaaagaaactgcttattttatgaaggctttgactagaatggtgtgctttcagatacaaacagactgctttaagggatcaaagttgacttatagagccaataaaagccactatggaaaactggccttattctttgtctatgcagtctctgtatggggttcctgacctgtggtaagtgaagaatgtcactttctgacaggcccaggagccccaagttatcttgggacatcaagaagaaaggaatgcacccaacttatacaggtatttgcaggcacagataaatctgtggctggctcaaggctttaagaagcctaatgtgagattctttttaaattaaatttccatcgaaaccaattttaacaagagcctatgtggcaaataattatttttgctgcactttatacaaataatcaggccaaatttcataagattaaaactttatggcaaacaaatttgtcccactatgatttgtctttggtaaaaatggaagctagagagagaatttgtttcaaaaactatgatacaccagttattagattctagtctcgtctgttgtttttgagtttcttctgcaatttaggcagaccctgcttattcctgagaatcaaccagtgatctatggctgttgctcagaagaaataagagggatggctaacgtaaagatctggattagtattctaattctaggcatgtattagaattggctagtgaccccatatcagcttggttttaacaattacccagttcatggaaagccttcttatttagtttacttgggataattgtgctgattttgttttactgttgtggaatatattgctgttgtcctctttgtgtaggaatgcaggaaaagcttacttaacattttcttaaattgaacacttattaatcttccagatttcaccttttgtcagaactcagagttatgatttgtcctcactgtactgacaacaggctctggtagggtgcagaggtcctggtaaacacaccctctgctggaaaacagggagaagtttccatcagtgtaagcctgcacttgggttgtctgggctgaagttaggagactgagtagaacatttgctgcagaaaaaaaagaagatgtgtaattttcacagttagaattaacttaggagagctgaaattaactgagcctcggaaatctgaatcttgaagtcaccagtggcttttgggactgtgagagagtctcttgtggtctttaatcatgtgagggtggggtgaaattcaatattcagtggttctgcaatgggatgcactgtgcaattggtgattgagaagccaactctctggctttaggagaagaatgtcttgctgttagtccttctggaaatagagccttgcattgcctactgtccgtttacactacctttgcacattgcctttggttatagagtcatgtccaatggctctttacttctgtttgcagggcaggagatggcaccctgttaaagagaaaggatagtagctgcaaagtcatttgtttctctgtttctgtgactgtatatattggctcatctttgaatggtctttatagccacaccaggctggaggtaacagggtcatgggagtggactgctggtgtgggctaaatcagagttcagatccatgtctccaagaggtaggaagtgcagggcaagttatgtggcttctggggcatccctcactttcttagttaaagagaagttgaagtaatcattctgaaatattatgggagtctgcagaaaaagtaatgaaaaccaaagcactttccattaatctccataatttagtccttacgataatgtcacagggcaagcaaccaatcagaccttactagtcgtgcttcctagaagagactgaggttcagagatttggacagagtgtcagatatgggatcagtggctagtccaatgtgatttccatcctttcttctgagagaaagcataagaaggctaagaggatgggggtaaagcacaagtcacctgcctgagagtcaacagagcaggggtctctttctcagtttgtttctctaagttatggcaaaagctttttgagctgtgattattgagaatgggggctgaagttcaacacatagttggcatgagagaagtaattatgattgaagaaatctagatgaaatccattgttcttttctgtaaaggggttgttatccctgattctttttttcttttttcttttttagatggagccttgctctgttgcccaggctggagtgcagtggtgtgatcttggctcactgcaacctctgcctcctgggttcaagtgattctcatgcctcagcctttccagtagctggaactacaggagtgtgccaccatgcccggctaatgtttttatttttagtagaggtggagtttcaccatgttggccaggctggtcttgaactcctgacctcaagtgattcacccaccttggcctcccaaagtgctggaattacaggagtgagccattgtgcctggcctgttctcactgattcttatagtgccatgtttctcagaatttgtggcttcaattacttatatttgtgcacctgacttttaggtgagctccagaatagcattactaattaagaatgagcatttagagtagaaaaagtgacaggaacagcaagactcacttccagaaagcctcactacaggtctaataggtgaggaaagtccccatctttcccatttttcttcattacctccctgtggggcaagcactgccattatgcatgagtaaactgtctgagttatagataagtaatgacatgaaacttcacaaacaggcctagatttctacccagggaaccgctgttatcagagaagggagtttggaatcttaagcaacaaacacatgttgattctcagtatttgcctcctgatggcttgctcagagagcctgttttcattgcccactttatatgtcagtaaataatcttccctggcagtgggtccaccatgtctggatgcacacagggaaatctggtggggtctggccagtgaaaaacactcctcaggttttgcaggaaaagcagtgaacccttcttttaagctcgagaatgctttaaagatgcatcattggcaagccttgccaaagaaatacgggatctaaatgtgataaaagccacgacgacatcaagctggctctggaggtctcctttgaagtttgctgagtggattgtcagtgggaggctgatatttacatgtagaagcacacaagtgttactgctaattgtggtaaatcaggctggccagcctggctctggatcccactgtgcctaacaccagccctgcatcccaggcacatgccgggctcctcagaagcgatcagccagccagcattgtgtgaattgcatttgggttcacagcactgtaattgtccttctcctgctatgaggagcagagagggaaaagggaagggagggttgtgtaatttgccctaggaaattgtgggggagggacaggcactgggccgggtggggggcggtgcgacatggctaaaacactgaccttcccttgagagagaccatatggtgaagtggagagggcacagcttttgcatcacacaggccttgtattagaattttggctctgacaccagctgtgtgaccttgggtcatttgcgaaacctctctgagcctcaactgccccttcttaaaatcagctctaagtaaccacagggttattcttcagaaacacagcatgcacatgcaaactttggcttagtaaataatgatttctttttgttctatctactccacctccctttcccattagaagcttgctacctttcactctgtgttttcttcctctcccattttcctggtggcattcaataaagcagaattctgatttctgcaatgtaggccaccttagagcaaaatacatgatcaggcaccaccaaattaggctattatctactggatcctgtttaaccaacccaaacccaactcaggctaaatacaggaatacaagaaaacgctgaatttctcccctttctttttttttttttttttgagacagagtcttgctctgtcacccaggctggagtgcagtggcgcgatcttggctcactgcaagctccacctcctgggttcacgccattctcctgcctcagcctcctgagtagcggggactacaggtgcctgccaccacgcccggctaattttttgtatttttagtagagacagggtttcaccgtgttagccaggatggtctccatctcctgatctcatgatctgcccgcctcagcctcccaaagtgctgggattacaggcgtgagccactgcgcccttccctccttttttttttaaaacaacaacaacaacaacaacaaacagtttattcagtaattatgtatacgtattttagcttccaaagtcagtgatggaacaaattgagtcctattaggcccactccattgcatgagttagcatcagaggaggtcaaactagagtgacttcatcttgaatatgggctaggtaagaagaggatgaggcctgctgggctgcattcccaggaggttaggcatttgtagtcacaggatgagataggagttgggtaggaatggtttcataaagaccacaggatgcaagctgggtgtggtgccttatgcctgtaatcccagtactttgggaggccaacgcaggaggattgcttaatcctaggagttcaagaccagcttgggcaacatagtgagacctcatctctacagataatttttattttattttattttatttttttgtgatggagtcttgctctgccgcccaggctggcgtgcagtggcatgaccttggctcactgcaacttctacctcaggggttcaagcgattctcctgtctcagcctcctgagtagctggaattagaggcgcacaccaccacgcctggctaatttttttgtgtttttagtagagatggggtttcaccatgttggccaggctggtctcgaactcctgacctcaggtgatccacctgccttggcctcccaaagtgctgcgattacaggcatgaaccaccgtgcccagcctctacaaataattttttttttttttgaaatggaatctcagtctgtcgcccacactggagtgcaatggtgcgatctcagctcactgcagcctctgcctccctggttcaagcgatttgccttacaaatgatttttaaaaaatgagctgggtgtggtggtttcacaagatacgggtgataaagaccccaggatgcgggccgggtgtggtggtttatgcctgtaatcccagcactttgggaggccaaggcaggaggattgcttaagcctaggagttcaagactagcctggacaacatagtgagacctcatctctacaaataattttttaaaaatgagctgagtgtggtggtgcaggcctgtagtcccagctcttgggctaggcatgggggtcagctcaggtgggaggattgcttgagcccaggagttcaaggatacagtgaactatgattgtgccagtacactccagcctgggcaacagtgcaagaccctgtttcataaacaaattaaaaaaccccaaaaacctaggatgcaatgaagaaggaagccgaaacccaccaaaaccaagacggtgatgaaagtgacctctggtcatcctcactacccattatatgctaattataatgcattagcatgctaaaagataccaccagcaccatgacagtttacaaatgttgtattaatgacaggaagttaccctatatggtggaaaaaggaaggaaccttcagttctgggaatttcctccctgtttctgggaaaatcatgaataatgcacccttagtttagcatataatcaagaaataaccataagtatactcagttaagcagcgtggctgttctgcctatggagtagccacccttttttattcctttattttcttaataaatttgcttgaattccttcctgggtaaagccaagaacccatgtggcctcccatggtgatctccaattttgggattcaccatgtgacattaggagcaacttagggatctggtgcatcccaggccaagactaacatggtgatttttggggggttatgttaaaactgggggctctgcccaggcccctcagtgtggcttcttgagtcaatacctgggtacttactggccctagcacctacaagttcattcacagttccttctcactgacttcaccagtgaccactatcagtgacttcaagggagaaatgaggggggagataaaataaagtgaatggggaagagataaagaagagaggtcttttcacagtttgccagaatagtcccttcagtggttttaccccagggcaacaggagcccccttttagtttctttctcttttaattttcttttcccttcccactttttgcccactttttgccttatttgtgtctgactcaatttccgtctctttctctacttcttcattcccagatttggctgtagaaaattagaaagttcttgaacttggtttgcacgggtgcttttactttaacatgaaaatgaatgatcagcctccttctaatttcatcctagagtctactgcatccctcctaccccctgcacaggaatttagtcacacttatctctcccactttctctcccttcttcactttctctattgctcctcctttcatgcttgtacctgcttttccatgccctgtttagcctggcttgggatccagcaggttctccaagggttcctgcaagaaccccggctgggtgcccaggtctgagcctggtatgtgcctcagtatcacaaaggcctcctgtaaatgacacacattgttggaagtttcagaaattctaggtcaaaatggcactgaaatattaaggtatttaccccaacccaagcaacttttctaaaagttgtagagagtgtgacctctttattaattgaaacgtgaaaatcagctctagtttggaagctgagaaaaaatatatatatatgtatttatttctttgttgtttgaattcttaatataaatggtttaaaggaccattgaaaactgcatgcaatcacagaaggttttggcttcaggcagctcccgccatgatcttggggccccattgattctttcatctttcaggcgtcttactgtttgaaccttgaattttaacctgggacatgtttgactaaaatgatgctgttaatattttctgttgtgcaaaacacaaagagaactaggctccagggttgtttctatttgctaatgctgtttctgttgacttttgacttttctagtttcccagagctatggggacttcccatccggcgttcctggtcttaggctgtcttctcacaggtacggagcccagtcctctctgagttccttgtttgggtgtcttgtttttttaagctttgtgctgcatgggtttattaccagtactctgcatacacagtccaaaagagtgaaaagaaatagaaaactataggacgttatccagaatgaccacaaaccttcagttccctttgctgtattgcacttactccatttcaaaaggaatgctctccagtggcagttttagtacatatataatgttggcattgaaatgttgttagtaataatgtctaaatttacttactactctcttccttttcctaggacaaggcttctattagagctggattagataaattcaggaatggtcagctgtgggaggtggcacatctgttgtcccagccccttgagcagctgaggtgggatgatcccttaaggccaggagttcaaggttgcagtgcactgtgattatgcctgtgactagccaccacactccagcaacatagcaagacctcatttaaaaaaaatgttcaaaggaaataaataatagaaaattcttgcccaagaaatcatacttgtcttaaatcataactctcttgaggaaagatgcttacattgcttctaaatctcagagtcacctttatcttctctaggaatcaaattgatagatgaatgtttggctcttggaaaatcttaaaaactttcccaccaaaaggatcattggggtaatttgttgaagtgtgtattggactgtcttagttttcctccagatatttatgcactgcagatgttcgccatgaaaccagtgctcttctattctgaggagttagctcagcccgttagtgtctttgtcttacccatttggatatggtagaattgagcaagaccagagattcaacagttctaagctccactaagtataccccatctacagagtaataggtgatccagatgtacttacaaatcctatcttaacaagctttaggaattatagtggtcatatattgaagttgggtgggagtctcacaccaggttccaagggagattacaaatcactaattaataattaagtcataatatctcttctatcagtctcgggtttcttgttttctaagttctgtgctccatgggtttattatctgtactctgcttacacagtccaaaagagtgaaaagaaatagaaaactacaggacgttatccagaatgaccacaaaccttcagttcctttgctgcattgcacttactctattgcaaaaggagtaagtgcaatttcagtctaaataagcgagactgaaatttgagcttcgaagatgaacttagagttttcactcttgggttttacttaccaattgtgaattaaaatccgtatcatctggcaccactgcactccagcctgggtgacagagcaagactccatctcataaaaataaagaaataaataaacaaataaatccacatcatcctgctttggccctggaagtcatgagggagagacggcatgcccgagggctataagaaatggaagatgtggaattcttgagcacagatgtgctttgtgttttcttcagtctgtgtccttgcctccattcttattccatgtgggtttttttttttttttttttttttttttttgagacagggtctctcgctctattgcccaggttggagtgcagaggctgactgcaacctcaatcccctgggctccagtgatcctcccacctcagcctccagagtagctaggactacaggtgtacaccagcacacctggctaatttttttatttttttattttttgtggagaccaggtctcactacgttgcccaggctggtctcgaactcctgagctcaagcgatcctcccacttccacctcacaaagtgctgggattatagacatgagcctctgcgccccagcctcatctcattttaactaaaggaaacctttgcagtgattgtgaaccataaagaacccatatgtgcttgagcccgtgccatcttgggatattttatggttacacataagagtctgaaatatggaattggaatcagacatcctctgtctatttgagtgtttggaggggtgaatctagtggggcttggtggagctatttggaacatttgctgctctcagcagatgcagtggctgttataatgggggagctttcatgggcatccaggctaacggatttttgtgtagaaatggtcattgttcatctaagctgctactgttgcttctctcagttgtcgggatgagactgtcctttctgactgcatcctattcagagcgtgcttccttttgcagggctgagcctaatcctctgccagctttcattaccctctatccttccaaatgaaaatgaaaaggttgtgcagctgaattcatccttttctctgagatgctttggggagagtgaagtgagctggcagtaccccatgtctgaagaagagagctccgatgtggaaatcagaaatgaagaaaacaacagcggcctttttgtgacggtcttggaagtgagcagtgcctcggcggcccacacagggttgtacacttgctattacaaccacactcagacagaagagaatgagcttgaaggcaggcacatttacatctatgtgccaggtgagttggctgggtctccaggaccaagcttcttctcttcctgtctctcctgttaaatgtactaaggttttaaacatatatataaataattaatatttattgcgggaagtttgaaaaatgtaagcgaacacacacaaaaatcatttgtaatattatcaagaaatattcattgttagcatttcagagctgtattaagtttggaaagtcatctttgttatgacatgtcctgtattgatactgtataaacaatctgaaatatactcatctctattcagttcattcaagttgcacacatactcacagtgtgtccagcactgggctaagtgttgagtacacaaaaattaataggtaagccctgtcttggagttgctgatagttcattataatatcttccaaataaacactcgatttttcagattcactatcaacatacatttattcttggagagttggaaggaattttctttttccttttaaaaaagttacatatatatatatatatatatatatatatatatattttttttttttttggtaacagggtctcactctgttgcccaggctggaatgcagtggcatgatcatcatagcttactgcaatctcaactcccttggttcaagcgattctcccacttcagcctccccagtagctgggattacaggcatgcaccaccacgcccagctaatttttatattagttgagacgggggtttcaccatattgaccaggctggtcttgaactcctgaccttaagtgatctgcctgcttcggcctcccaaaatgctgggattacaggcgtgagccactgtgccctaatttttatttttatttttgtagagatagggtttcactgtgttgcccaggctggtctcaaactcctgggctcaagtgatccacagccacctcagcctcccaaagttctgggattacaggcacgagccactgggcctggcctactcctgcattttaattaaaaggacaaaagggtcgagcacaagtgatggcaatttcagtatgcagttgggtaaattaaaaaggactatggctagaatccttggttttagaacaaaacctaaactgtttatgattcttgccatccttgctgttttggcataggtgtgtcttcctacctttctgccttttctttttcagtttttaatgggctcctcttcctaccctctataactacgagtgtccccagggatctagaccctctttactttttcatgatactcttattcatatgaaccttccttcttaacaattaaaaaaaaccaaaaactttgttttgaaaagggaaggtatttagaatgtcactccaacttcattcacacttagattccttcaggaaaatcctctaggtgtggagggattttcccctgctgtgaagagaatggtaggaacgtgaatgtgttaaaggcacacgagtccctgaagttttaatccgtgtaagattgtccaaaaattcttcttgttccagcacagatgccatccaagtagcccctgcatcgctgtctgactgagatctttttattcgcaatcatgcagacgtaggggccctttctgcagctgatgtttgagactgttagaacttcttaccaccgtagcttaagtagctgtttttcttttggaaaggaaattctcaggctccttctccttctttaaattttatgtatttctcaaaggattactttttaataaacagatttctatgctatttttgaatcatactgactataggtggtaagagtttttaaaagcatttcataataaaactcgaaatattttttcctgttttaaacagagttggactgtattattttattgttaatttttgtttttagttgtttaaattttgatttagattcctggttagtatttatttatttatttgtagagacagggtctctctatgttgcccaggctggtctcaaactcctgaacacaagcaaccctcccaccttggcttcccaaagtgctgggattacaggcatgagccacaactcctgtccagtattgatatttatcatcagtattatccatcaggagacaggcaatttggtattattcatacttaaaaatcactttgtagctgtcatgataactaatgccagtggggcaattcttctggatatatgtgtaaaggtgaacttcatacctaatatcaataatgccagtgggatagtttttctggatttatgtgtaaaggtgaaattaatgtctaatagagtcttcattcttttttaaaccacagacccagatgtagcctttgtacctctaggaatgacggattatttagtcatcgtggaggatgatgattctgccattataccttgtcgcacaactgatcccgagactcctgtaaccttacacaacagtgagggggtggtacctgcctcctacgacagcagacagggctttaatgggaccttcactgtagggccctatatctgtgaggccaccgtcaaaggaaagaagttccagaccatcccatttaatgtttatgctttaaaaggtacttgtatcatctccttccttctttaaataagagtaacaggcaaaatcataaggtgcgtgtaggatttttttttttttttaaatcatcatcactggtgatcctaaattctgatttggggatttaggaccccagctaatacaatgtctgtggctataataataagcttaaaattactaaaggccaaagcttgattacccatgcaagatttcatgtttcatcagttgacttcaaaatactgtaaggaattcttttcttacataagcctcttactttcattcacattcctgactatggcggccctaaaaacaaacatacacccagggggttagatgcctagattaattttagtaacttaagaaaagtgatttgaagaaagtagtttagacttcaaccctttgatgtccacagttagtacgcttggggaagtataatacatgctgaggtcaacagatatttcctgaacactatattacatggaggaatgggtagcagcaagagtacactgttttaaaatcagagcacagctaattttgtgccaggcactgtgctaggttctgggaaagtactgagaataactgaggagcagagtggaagagaagaagagaagaaacaattggatagaaacaaagtgtctagagcagtgtggatcagcaaatgttggttgattaaatgaataaatttattagtcaaggagattgtggacgagtataaccataactaacccactgctgaggaatgcggtgttctgtttgattggaatttatttttattgttattattttgtaattctgtattataactatatgcctaattgttgtacaccatctcacaatcaagccttgtgagattttccaaattttatcttgatcaaactggtttgcaaattatttttcagggttttcttaaaaaaaaaaaaaaaaacccaaactttataagatcctggctatcctgtggatttttaggcccttgtatttgttcttttttatagcaacatcagagctggatctagaaatggaagctcttaaaaccgtgtataagtcaggggaaacgattgtggtcacctgtgctgtttttaacaatgaggtggttgaccttcaatggacttaccctggagaagtggtaggtaccctcaaaacgtgcaatggcttggagcagagcaacagggctcagaagacctgcatttgagctcggtctgtcactgatgggcacatcactgagtttctctagaccttagcttcccacctctgggatgaacacatttgattaaatggcctttaggactccttgatcaatgggagagtttgaaatgatagttcctggaccaggcccttcagaatacataaagagtgtgccgtaagccttctttttcagaagtcagacagaaataggaaggttctctggctacaagatatcaaccaaaaaattagaagagcaaaaaaaccactggattttactattgcggagacagtgattgattctcatcgtcttggcttctgtgccctgaggtttgattcatctgatagtgttgattgcccgcaccccttcctcttctgccttgttggcacccaggacaatgtgtcttcctgttccacctcctatgtgcctgacctttgcatggctcaccttcagtgaaccgttatgatgtaatcattcagcaaaggtttaatgaagtttgctcaatcccaagcactgtaccagaagctggttcagtattgcaggaagaagggaggaggggagatggaagtggggaaggggagccaccatgctgcctcttggtcactggagatttacagagtctcagtcattctaatgcattgtcactaagtgtgtaagacagccatgtgtaagaggctatgaatgcccaaatgcaggaatgactaatattcttatggagaacaaaaacgagatatatatatttcttgcctccactcctgacttgtaaatttctgctccctgttcttttaggcatttgacagctttctgtccttctatccattgatctccctccttttatccgtttctctctcccatgcatttgccgctgcttttcatttgtcctggggcatctgataggaagttgggcattttcactattgcctcacaaacttcacacagtgaagggacatttacagtccaacaaatgtacatcttccctgaaatatgaagtgatttggttcttctgttcatacttgattgactttaatccttaacacataaacactgctttctatttataggagacagcaatttttttttccaaaccgaagtacatgctatttggcttacaaatatataatcaaagtattgtttcatacagtatgttttttccgattataaaagtaatgcaggtttattgcagaaactttgtaaaatatggagagacaaaggaaaggctacttcccagagcatcactgtttatattttagggagataaagcttttatttttcatttgtatttctttcttttttttttcttttttcttttttttttttgttgtggagatgaggatctcactacattgcccaggctggtctcaaactcctgggcttaagtgatcctcccaccttggcctttcaaagtgttgggattgattacacatgtgagcctctgagcttgactgagataaagctcttaagtatttcttatccatagataaacattgaataataggtgttattctttaaatggtaatttattacattctttatccttcagcagtatagcacaaacaccttatatgtgtcattaactgtccttttaaaaaatgggctgggtgtggtggctcatgcctgtaatcccagtactttgggaggctgaggcaggagagtcacttgaggccaggagtttgagatcagcctgggcaatgtatcaagactccgtctctacaaaaatttttaaaaattagccaggtgtggtggcatgagcctgtagccccagctactcaggagactgaggtgggaggatcacttgaacccaggaggttggggctgcagtgagccatgattgtgccactgcactccagcctgggcagcagagtgagattctgtctctaaaaaaattaaaaacaaaataaaaaatctcatgattttctaagcagctagcttttattctttaggttttatcttttagagcagttttaggtttacagcaaaattgagaggtacagagatttcccatgtgttccctacacccacacatgtgtagcctcccaccttgtcaacatccctaccatccatttgttataactgctgaacctccattgacacatccatatcatccagagtccatagtttatcttagagttcactcctaggagcgagctttttaaaagtcggttttcttccccttttgctgtagaaaggcaaaggcatcacaatgctggaagaaatcaaagtcccatccatcaaattggtgtacactttgacggtccccgaggccacggtgaaagacagtggagattacgaatgtgctgcccgccaggctaccagggaggtcaaagaaatgaagaaagtcactatttctgtccatggtacattccgctttctaaaatgtcagttgtccatgctgctcgggatccatatgtggtaatcattatttaatggaaactcttccctgtacagagaaaggtttcattgaaatcaaacccaccttcagccagttggaagctgtcaacctgcatgaagtcaaacattttgttgtagaggtgcgggcctacccacctcccaggatatcctggctgaaaaacaatctgactctgattgaaaatctcactgagatcaccactgatgtggaaaagattcaggaaataaggtaaagaaactctctgcccaagtatgcctttttttagtgtgcatcagaggcggactgaggtttgtgtgtgtcttacaacccagacccaaagtcagtctagaaaatgtaacaatctgagttaagagatgcttgaaatcacatccctttaatgataacattgcaaagtggtattagtatgctggtaagtatttaatgagaagatgagaagaaagaactaaaagctctggcccctggggaaagacaggtcactggattcagctagggtggaagaaaggaagtaaaattggactcaccaggattgaatagattgaatatattccctgatgttcatcatccatatcgcaagtagacagatatggtgattacacccatgaggcagttatcacatcaccttacgtgaaagttaacgtcataggcttaatctggaacccatttgccctaattgaggactccacaggaaagaagagtagagcctggctaatcaggagagagatgtgcagtgagttgcttggatccctaccttttaatcagaatggtagattgctctcatctcttaattggtggtggagttttgaatgagtcacccctcagccacagtttcctcatctacaatgtaggataaacaataccttatgtccttcaaggcaaggaattggatcagatgatatcatgaggcctcttaaggttttaagctgtgattagaacccaagagtcagaagatacatctcacagcacccagctaaccagccctatacttttgtcagaaatcatctcagaaagacaaagtcagtcctgtatttcaagccttcaggaggaagaacagagcctttctcatcagttccattcacctcaggatttgctttcttctttgtgaactaaattccacgtgtaattgagaagcaatgtctgagaaaatggaattttacagcctctatagaatagtaaaggaaaaatgaagtgggatactgaatctggaaggctttctgttgacacaaaatgaaggtgtacaacaaggagggcagctttccacgaggaacttccatgaggctgtgcagccagagaggaatagggtaacaaccctggtacagctaacacctccaacacgtgtgtgagcactgtctgcaagccataatccatagcagtggcaggacaggctcgccaactgagtggttctggaaagctgccttttccttttagtgattcaaggatgcttcaacgtggattttttagttcctgttatgagccagtgaatacaaagatgaacatggtagatgggggatctggcttcctggagcttaaaactccaggatgggggatctggctttcctggagcaagaaaaccagtggttttcttggccgaagaagtgaagagaacaaacagcagaggataatttggtaatcagcatcctagtgtgccccagggtactctcttaaggaaatccagtcctggagcacacccagtatggtccagcctgctgtcttcgtaggtctgagtgccccagtatttgcaaagtgttttggagcctatgaaatgctttcacacatacaatctcctttaattaactctcacaatgactctgtgctatgtgtacaattatcacgttttacacacaaggaaactgaggcatggagcattgtaataatacccgagatcttctcactccatgaccaatgcttttcttctccattccagttgctttttcaactgtgatgatttataaaggacaatcaaatgggcacatactatatttatgcacatacatacacacacacacacacacacacacacacacaaccagatgtcatttataatccatgtaaaatatttttggggaagtttctctttaataaagtttgaagagacatatattttttttttttgaagaggcatattttttctaacttttttttttttttttgagatggagtcttgctctgtcacccaggctggagtgcagcggtacgatcacggctcactgcaacctccgcctcctgggttcaagcgattcttcagcttcagcctcctgagtagctgggattacaggcatgtgccaccatgcctggctaatttttttttttttgtatttttagtagagatgggggtttcaccatgtttgtgaggctggtctcgaactcctgacctcaagtgattcacctaccttggcctcccaaagtgctgggattacaggtgtgagtcatcacacccagcctataacttttttttaataggtgatagaatcccgtgcttgaaaaataatcaaacaaaaagagaatgcattgtaagaagcctcactgtactcctgtccccagctgcccagttctcccctcctccccacagggaaacatcttcattagtttcattaggttcttatgaaaccttccagagtttctttaagcaaaatacaagcaagtaggactgtcatatcctgcagaccgctacatacaaatacatagaaagtgtcctcattctatcctccagtgatattccattttttggctgaaccacctaaatgatggatatttaggggaagcaagtattttttaaaaaaggtaaaaatcaaaggtttttattttttatttttttaaagaaaagttggtaggctgtgtttattcattcagaagtcaggccgtggctgaactgatagctcttggagatggccattgctcatctctgaatgtctggttttctcttgtaagaattgtgtgtatgatccagaccttcagtgtgtgcactatatattgagaattccagaagagatgatatggacaagaaaaaaagatgactttactttttacagtaaaaataaaacttaaattgaagagtacaattgtttaaacaattggaacttacttagctactgcttgttgaaacaaaatcctttttttaaaaggtatcgaagcaaattaaagctgatccgtgctaaggaagaagacagtggccattatactattgtagctcaaaatgaagatgctgtgaagagctatacttttgaactgttaactcaaggtatgtaaagggagtataaagataatgctagctctgtagatgagtgtcttccaaggaaagcctggcacttttctccccggtcatggaagaaaagcagcacttaggggagaagcagtgtctgcatatgtcacatatcgggaatacctctgctggactcatgaattcaggtatttctgggaggttctgggttactctagagtaggcgaggaatccctaggctccaccagctagctttatttttgtagagatggagtcttgccatgttgctcaggctggtctcctgggttcaagctatcttcccaccttggcctctcaaagtactgggattacaggtgtgagccactgcacctggcctccaccagcttacttagcacctgcttctcaatctgagaagagagaagcagatgaccttagattgttctggagagttttgctacaagttttccttatagacattgtacagtggtccttaccagaagggagtgcccaagtctgtttacattcaggctcagcacctatccagagtcccagccatgagccaggtgctgtctgaggtgcgctcatgtgatcctcacagtaaaacctgtgatacaagcaacaccgtatatctaatttatttgaccacagatttagaaaagaatctttaaaacctaataacataccacagatgcattttggtaaatgctgctttagattatactttagctgaatccattagttgaatcctaagctataatataattttaagaacctccttgcctttcaagccaaataaccaagggactttctctctctctttccctccctcccttccttccttccttccttcttctctccctcccttgttatctcttttcctttcctttctctccttccttccctcttccctttttcctttctctccttccttccttccttgcttccttcttccctccctcctttgttctctcttttcctttcctttctctttttctttccttccttccttcctcactcactcttttcttttcctttctctccttccttccttccttcctccctccctcactctctcttttctttgcctttctctccttccttccttccttttcctccctccctccctcccttgttctcccttttccttccttccttctttcctttcttccttccttccctcttccctcactctctcttttcctttctctccttccttccttccttcattctcccctcccctcccccctcccctccccctcccctcccccctccccccctcccctccccttcccttcccttcccatttttcttctcaccatgttgcccaggcttgcctcaaactcctgggctcaagtgtttctcttccacctcagcctcccaagtagctggggctacatgtgtgaggcatcacaaccatggacttttcactttcttcactccaggttaaaaacatcacagggataaatctcaaaacaccaaaactgtgaaaatgctgctaaccatgtgggtctgtctaaactggagtgttacttgtacaactggtttcagcccctccggagtgttttgaatgccatgtagatgagttgtgaactcatattccactttgtagtctcatatgttctgggacacgagctattccattctgacttctttctgcctcttgcagttccttcatccattctggacttggtcgatgatcaccatggctcaactgggggacagacggtgaggtgcacagctgaaggcacgccgcttcctgatattgagtggatgatatgcaaagatattaagaagtatggaaaacagatgtgtcttcttctttcgtggtcagaatatttctcccttgacacaaatgatgtcaaatacattttacttattgactataagatagggttttgggtgtgatagcttcagggtgtgtatcttttgtcatgaatagctgtgagaagaaggtccagggctctcattagaccttcaaaatgtctccaatctaaaaacaagagtgaattttaagaaccactgttctaagaagatttttactaccctggctcacatatcttatttggtgaactttgtttggtagtcggactgcatgtaaacataaatgtgactgcttagtcccttatctgcccacctgctgtttggtgggttaattcgccattccctcctccctcccccgagtcctcagccttcttaaatgggcacatgagcaatgtgtttacacttcatccatggtaactggttgtgttcagaagcctcagttgtttcttcctctagacagagactcctcatcttaacttctagggctaagaacagacttggatgttgactggggtttctagtagattccagtgtggagcaggattctaggtcttataactcaatctgaggatcatcgcaaccctagtgacaccctaggggctcttcccagtgtgagtgttgagaagggagggctccaggcctttttgaaggggtgggagattgagatcattaaatatggttgaagttgaactgttcagtttgctcataggttcaagattggggaatggtagtcatattttattaaacttgattatctctgcctgctatgtaaacacttagctttcagttgttcatgtgtgagttattccctcttcagcacatgcagacaagttttaatgttcatctgcatgtaaaataaatcagtgtgtattgccccgaaatgcagacaaggtcccaactccttgccatcttagagtgttcccgtggctccactcattgccatgactctcaggaattggccctatacttaggccctttttctctctagatgtaataatgaaacttcctggactattttggccaacaatgtctcaaacatcatcacggagatccactcccgagacaggagtaccgtggagggccgtgtgactttcgccaaagtggaggagaccatcgccgtgcgatgcctggctaagaatctccttggagctgagaaccgagagctgaagctggtggctcccagtgagttcctcaacagtcaggacaactcatcagctgagccgcatctgccccaggcggaactttgaatcccagataggggttatatagaaatgaaggtcccaaggcagaaattcagttatgaatgctcttaaagtcatgtgggactttgttttattttgttttgttttttgagacagagttttgctctgtggcccaggctggagtgcaatggcacaatattggctcactgcaacctctacctaggacgttgttttagattcagatccaaaactgcatttttgcagaggcccctcaacattttgcttgtctaataatatagctacagtctctactttgaatgtctgtgtatgtggatggagtgtggggaaggatcttctgtctcattgctccttaaaagatagatgaagccaaaagcaatataagcaaaatgcaacttacaaaataagctttataataaagcatatgaagtagaggtgtctgcccatatagtagctgtcaattgcatttatcctattcaaattctgtccacaaggttactgttggagcaactttggagaaaatactgagttctcctgattgaattttgtccccttcttgtataaggaaagagttgatgtagtttcctgggtgtagatggtttgagagatggtactgcctatccctaaaatgaaccaggcagccctcacacttccccaccagcagtgagagattcctggctcagacacagccacactaccttgctgcccctgtgcatgtctgccaggaaacttttcattgtgcctctctctcttgtcacgtagccctgcgttctgaactcacggtggctgctgcagtcctggtgctgttggtgattgtgatcatctcacttattgtcctggttgtcatttggaaacaggtagatattttctcataaaactaaagatctttgaagccaatgagaacaagcatagcaacctagttcagtgcttggcacagagaaggagctcagcaattacatgtggagtgaacgttgttggactctactgtgtccagtcactgtgctgcttcagtgaagctctggtgcactgggactttggtaattcaccagttacctgtcctggtcatttatagaaaccgaggtatgaaattcgctggagggtcattgaatcaatcagcccagatggacatgaatatatttatgtggacccgatgcagctgccttatgactcaagatgggagtttccaagagatggactagtgcttggtaagttccatggggtaacctcccaagactcccttttcccttgcacacaactttacaatttataggccttggcagaatagagatctgagcttgtgcttagtaagaactaggcaatggaaatttgctttcagaaatacatttctgtcttgacagtaagttaattggatcattgcaatgatttttttaaatctctttccataacaaattatagttaaggaaaattttacaaagggagaagagaatatgaagagggctggcaaagatacccaccaaaattgcttttctttagaaatgacacaaattgaaaatgaatttctgtgactaaaaatgagcagatgagaaatgaatgaggacaaccacaaaatgtattttgattcagtacattctgaagatgcattagatactcctttttacatatttggaatatggaatataaaaatataggtacattttgaggcaaaatatgtaaaaataagcaagccaacttatcacaagcatttcaagtatttcaatcctgggctgagaccaagtatatgaagctttagtccaagggagtatttcttttttaaatcacattcctaatgaatgaaagcaagacaaaggcaaatgaaagtagaggtagaggttgtgttatgatgaatgatctaacagtatatatgttaaagaatgccaaatgcaggttttaattatccaccggtctcattgcaaaatacagaagagtttaagtcttcttagagagttaggtaaactgaaatcaagcaaggcaccagagtgaaatcacctttgcaaaaattgtaactgaggaaattatgacagtgaatgagatatgacctaaccaactccattttgctttagcctccaagttgtccttgttccttcctgggcataggccgaactaactttgagaggaacttagtttatagtttgactttgaaaaaaagacaataatagccctttgccaaaacaaaccctctttttccctgggaactagactgcctttgcgggactaacgaattagctacaagattagaaagtatggtttaggggtcactgttgtaaaacctgaggtcagtgcttgagatattttggagaccctgtatttcgatgcaccagctgacaccacccaggtcaataaactggctcatctgatcttggggcccctacctaggaactgactcagtgcaagaggacagcatcagctccctataatttcatctttgacccaaccaatcagcactccccttttcaccccctacccaccaaatcatccttaaaaaccccattcccccagtttcagagacactgatttgagtaatagcagaatagtagaaattcccccagtttcagagacactgattcgagtaatagtagtaatagtagaataggtctcccgtacagctggctctgtgtgaattaaaccctttttctattgcaattcccctgtcttggtaaatcggctctgtctaggcagcggacaaggagaatccatggggcggttataagagctgccccccaatttcaaatatttatatctaagctttctttattttcctgcctatttcccaacaagggatgaggagcttagggagttaaaaagtagtaaaatatggggaaaagggcataattcccattataccaagaggcattgctggtgaagcaatacctttccaggtacgattttcagtaacacagacgtgcagtaagaggcagtgttggctgttagtgtcttttatgagccaagtcttttcctggcttggctatccgtggtgagactgacaccccgggaaatgtttctctcagggtgagctctttcagggtgggacaacagcttcagtgtctttacgtatgtctcctcccaacatgaagctaattgctgtgctctcgggcatgtttagctcttggtagagtggctttcctaacaaatagggagcagtgagcccagcctgaagtttttatttagtcactccttagaatcagtgatattttgaatactgaagtatttccagtggctagtaatttactaagacaaaagatgcccctgtttgcatatggaaaacagaaggggagagagccaggaggtgtgggtgagagccccgaaggcaagaggatcccaggggctggcccagcacggagctggtagacagcgcgctcacaccagggagggctgcaccctcctttctcccgtctgtgttttctttcccttgcaagtgttattcgacaaaagcaattatgctaatttccttccctgtgggctcaattccttttttgacacgatgacttggaggagtcattatgattactccaaacaggaaagacactcgcccagctgtccgcccgcagagagctggctacggtgcagaaagctgaggaggcgtctggagtttttgggtgttaatgattctgcctgcccacaggtcgggtcttggggtctggagcgtttgggaaggtggttgaaggaacagcctatggattaagccggtcccaacctgtcatgaaagttgcagtgaagatgctaaaacgtaagtgctccttcctggggattttttgagcacggggattttttgagcatggggatattaagggaatttctcaaaatcatgcagctagtaaataagacatttaggactaggtcctgattattttgactccaggttttatgtgtatttagattaggtttatttagattgctcttgctgcctgtatgttggaaaattaagagcttgttatttccagtgacttctttttactagaaagaccaggaattagttattagcactgaggccaagtagctatctgcttcttttagacttctggtaaatagaatgatatccaatcacaggattagtcatattcttggtttttttctgagaacaggaagttggtagctcagctggactgatatgtgatttattctttcaacagccacggccagatccagtgaaaaacaagctctcatgtctgaactgaagataatgactcacctggggccacatttgaacattgtaaacttgctgggagcctgcaccaagtcaggtgggctcactgacctggagtgaggattttcactggacacatgtggttgtgaaaactgttcaatcaggcttaaatcctccactctccatccccacacatggcagggaatagaagtcccttgaatggagctgactggtcccttgaattgatggaagctcattggtttttgagcaaaatctgttgccagtccagtcatagccattcatggctctttattaaaaaaaaaaaaaaaaaaaaaaaaaaaaaacttttttggtatcttatttttttctgtgccatatggtctgcaggacaattcatggcttttctgttcttcattttcatacccatctcctaacggcttttgtccccataggccccatttacatcatcacagagtattgcttctatggagatttggtcaactatttgcataagaatagggatagcttcctgagccaccacccagagaagccaaagaaagagctggatatctttggattgaaccctgctgatgaaagcacacggaggtgggtgcaaagagagatgttgctgtctatcattatcttacaggcatcacaaatggaaagacccatgtcctgatagatatcatgtctgcagattcagtgcccaaggtagcaagacttagagtcaaaccaccctgtccagtctttccatggtcatgcagagagatgcatgatgtctaaaggtgttttggactggggtgtcacatgggaaggccttgctgataggtttgaatgagagtgagttagaatgactctgggagctcttctgctatttacatgtgatccacttagacctataaaatgcagctctggccagggatgcttgagttctggaaccttgcaagaactgtctgtggatctccaagctcgaggtccttgctgaacctggacctataaatgacgtcaatgatagtgatccctactgcagaaatctacaagtggctataaagaactctgtaggtaagaaattctgtaagatcagaaagtacaatgaattcacttcataataaattacttggtggacaccaaatgggtgctaaattgattgggtagaaggaattgtatgcccaagccacatggccacacggctcaagttccaaccaaggcttgtgagttgaaaaactgagaaagaataatgacagacttaacgtagtgaattcttcaaactttaagtgtaatggacttacaggtccatgggagcacagccccactgtcttagatgtggctcttcaggatgtgcgggctcctgctaaggatgtgcagggaactggctctgaaaacaagtgaacagtagtcatcatggcagctgacatttgtggagtcctttgtatgtgccaggtgccatgacaaatattccgctagtctttcccatctttgtcagtgggatccattctacgtcttctgaaaagtgcttccttgacccccagatcaagtcattttccttacaagctattgaaacctttcttccttcacaacacagctgagtttgagttgatctgtgtatttattttgttttttacatttctttttttccctatttaaaaaatttttttatttccataggtttttggggaacaagtggtatttggttacatgagtaaattcttcagtggtgatttgtgagattttggtgcacccatcactggagcagtatacactgaacccagtttgtagtcttttatccctcacctgcctctcaatttttccccgagtccccaagtccattgtgtcattcttatgcctttgcatcctcatagcttagctctcacttatgagtgagaacgtacgatgtttggtttccatttctgagttacttcacttagaataatagtctctaatcccatccaggttgctgcaaaagccattaattcattcctttttatagctgagttacatatatatatatatatatgcacacctacacatacatatgtatagatacactgcagtttctttatccactccttgattgatgggcatttggggttggttccacattttttcaatatgtgaattgtgctgctataaacatgtgtgtgcaagtatctttttagtatgacttcctttcctctggtagatacccagtagtggaattgctgtgatgcatgtatttgtgcgactatttgattaatgctcatttccttgactagatcacctcatgtgaaaggtatggattggttttgcttttacccagttagctcccatgcctacctcagtacctggcacataatcatcatctactgaaagtggaatgaccacttcagaagggcaccctgggtaagatttctctttctgtttttacagctatgttattttatcttttgaaaacaatggtgactacatggacatgaagcaggctgatactacacagtatgtccccatgctagaaaggaaagaggtttctaaatattccgacatccagagatcactctatgatcgtccagcctcatataagaagaaatctatgttaggtaaaagtgtctatactcactctgggtgttgggactttccagtggtttaatatgatacttaaagtatttagagggaagtgtatagggatggtaagtgaacctggcagcccacgtggtctctaaatgcaggtctgcacaaccagttctgtgacatgtttccaggtttgtggcctgtaaattgaaaagaataaaagctgacaatgtaacaaattttttaaactttaaatttaatagttttaaagaattttcttggtgtgttcctgcagtaaacattttttaaaaaaaataattatttattctgatataatgaacttccttttttattgctgtctttttcttttttaatgaaaatatggtgattgattttttttaatgcccttacttggcagaattacaagttggctgtcttatgttggttcctcaccttgctttttttcccttaagttttagaagtctctgatgtctatgagttcagtaacccttgcttttacttttcctaacattcaatttgtgataggaactctagagtagataatttgcagttatattttctggaccagtgtttctgttgaatgtattttgaaggtgggtctatctgtttttcaagtacatgaatatgtggcagggttaaattgatttataaactccagggagtccagctgatgcccagaccagatggatcacttcacatctgctcagggtggttcctccagagccctgaactggtcacagacatgaagctggaagtctgacattggcttgtcctgtgagcttgcctttttgggtctgagccttcccattagtcaatgcaaaaaagtgttgagctgccctggacattgttttggaaattattgatgtgctctgaatgttttcaggttcttaagtgaaaggtacaatccatttaaaaaagaatgtgtttgttttgcaaagctcagtacacaatattttccatttctgcggttccaagttccattcacttctcattgccaaatgggtgaacttccaagcgcttttaaaagattagccagtgagagttatcggaaccagtacttcctctcccctcccatattgttaaaaatagtttacattgcttcccaggctgggctggtggagttggcacgagatgtcagaggaacctgagtcatgctcaggcccaagccctgttggcaggcagaccactgctttctggccttccgtgactatctgaaaaaaatcgtgaatggctagagctactcttcacttgctgaacattttcaaaaagaattgagaacttctggattaaattgccttcttcctcgaaaaccctgggacccttccagatgggactaactggggaaagtggacaagttacaaacaaagaaactcaaaggaaagtcattggcactgatctctaagatgctatcacatgtgattggtggttgattttattaacaaattataagcaaagtactacaaaggtggctttaaaaagaaaataaagcaattcacagaaactactttttcatgtagcttgtatgtgtgctccatgtatttcatcatggaagattttagtgtgtgtttatgtgtatgtgtgttttaaaggtagctgagatgatttgctaattatggttgaaaaaaagaaatttaggaggtaaacaaaataattatgtgtaagattggtccttgtggctgtgtgtgtgttttgtgtgtgcgtgtatgtctctgtgtgttttaggctgttcttttattgctataaataaatacttgagactgggtaatttataagggaaagaggtttaattagttcatgattctgcaggctttacaggaatcaagatactggtagatctgctcagtttttggagaggcctcatgaagccatgaagtcatggcagaaggcaaagcagtgcaggcacatcacatggccagagcaagagcaagcgagagagagaaagagagaggtgccacacacttctaaacagtcagatcttacaagaagtcacttactattgcgaggacagcaccagaaggatggtgctaaattgttcgtaagaaatctgtccccatgatccattcatctgccaccagtccccacctccaatactggagattacaattcaacatgagatttgggtggggacacatattcaaactatatcatactgaccctggaccctcccaaatctcatgtccttctcacatttcaaaatacaatcatccctccacaatagtcccctcaagccttaactcattccagcatcaactcaaagtccaaagtcttatctgacacaaggcaggtcccttccacctatgagcctgtaaaataaagaacaagttatttactttcaagatacaatggggttataggcattgggtcaacattcccattcccaaagggagaaatcggccaaaagaaaggggctacaagccccacagaagttcagaacccagcagggctgaaaactccaaataaactccattgactccatatcccatgtccagagcacactgatgcaaggggtggagctcttgggagggatggaacaccctgtggctttgcagggtttagcccctgcagctgctctcaggggctgttgtcgagtgcctgtggtttttcctggtgcagagtgcaggctgttggtggatatattattcatggaggatggtggccctcccctcgtagcttcacgaggcagtgccccagtggagactctgtgtggggacttcaaccccacatttcccctctgcagtgccctagtagaggttctctgtgagggctccaatcctgcagcatgcttctgtctggacaccctggttttttaatatatcctccgaaatctaggcagaggctcccaagcctcaactcttaacactctgtgcacccacaggctaacaccacatggaagcggccaaggtttatggctgtcacaagctgaagcagcagcccaagctgcacctgaactcctttgagccacagctggagctggagtcatagggatgcagggagcagtgtctcgaggctgcacagggcagtggaccctggggctggcccatgagaccattcttccctcctaggcctctgggcctgtgatgggaggggctgccatgaaggtgtctgaaatgccttaaaggcctttttcccattgttttggcaatcagcctttgcctcctttttagttatgcaaatttctctagcaagtggttgcccagcagccctctttaattctctcccaaaaaagcttttactttctctgtcacatggccaagctacaaattttccaaccttttatgctctgcttcccttttactttttttttattttaaagagatggggtctcactatgttgtccaggctagtttgaactcttggactcaagcaatcctctcactcatcctcccaaagtgttgggattataggtgtgagccactgcgcccagcctctgcttctcttttaaatataagtttcaacttcaagtcatttctttgcttctgcatctgactgtaggctattggaagcagccaggccatatcgtgaacactttgctgcttagaaatttcttccaccagatatcctaggtcatcactctcaagttcaaacttccacatattcctagggcatggacataatgtggccaagttctttgctgaagcttaacaagggtgacctttactccagttcccaataagttcttcattttcatccgagaccttggcagcctggatttcattgtccatatcattatcagcattttggtcacaagcatttaaccagtctctaagaagttccaaactttccttcatcttcctgtcttcttctgagccctccaaactcttcttatctctgcctgttacccagttatctttacagcaattccccattccttgataccaattttctctattaggctgtttttgcattgctataaagaaatacctgagactgagtaatttataaagaaaagaggtttcattggcacatggattctgcaggctatacaggcatttgcttctggagaggcctcaggaagcttccaatcatggtggaaggtaaagggggagcaggcatatcacatggccagagcaggagcaagtgagagagagacagagagagagagagagagagagagagagagagaggtgccatacagttttaaacaggcagatcttgtaagaagtcactcacttttgcaaggatagcaccaaggggatggtgctaaaccatttgtgagaaattcacccccatgatccagtcacctcccaccaggccccacctccaatactggggattacacttcaacatgagatttgggtggggacacatatccaaactatatcattgcgtgtgtgtgtgtgtgtataatttttaaaccagatatatgtttctgcatatctctttcctttctttcattctttctatcttttttttttttttttttttttgagacagagtctcactctgtcacccaggctgcagtgcagtggtgtgatcttggctcactgcaactcattgcaacctcctcctccctgattcaagcaattcccctgcctcagcctcctgagtagctgggattacaggcacatgccaccatgcctggctaatttttttgtattattagtagagatagggttttaccatgttggccagactggtctcaaacttctgacctcaggcaatccacccacctcggcctcccaaagtgctgggattataggcataagccaccatgcctggcctatatatctattttctaagatagaatctttgcatagtgatattcatctgtgagatctaaacattctacaaaaaaattaagaaaatatttttggatgtgttctttgggcatgcctctgcaacctgatgatttcctgctgcctgccagcaccaatacatttaatttcttttctgcagactcagaagtcaaaaacctcctttcagatgataactcagaaggccttactttattggatttgttgagcttcacctatcaagttgcccgaggaatggagtttttggcttcaaaaaatgtaagttcaaggaacacagacctttttagacccagatttcagtgagtggagtgtggacggagatgctaggagatagatgttggaaaggccattaataacaggggcctcttacttacctgtctctctccttcatcccctacgcaggtcagggagtctgaaatcatcaggcatctactcttctctagagctttctctctgttgggagtgggtggagtgagaacctgggagaaggccagccctttatatccaggcagacagctccaagtgccaccatggatcagccagtcttgcaggggtgatgctattcagctacagatggcttgatcctgagtcatttcttccttttccatgcagtgtgtccaccgtgatctggctgctcgcaacgtcctcctggcacaaggaaaaattgtgaagatctgtgactttggcctggccagagacatcatgcatgattcgaactatgtgtcgaaaggcagtgtacgtcctcacttccctcactggtcaggctcatcctccttcactttaatctctaaagtcaggtgttgcttctagagattcggtgcctgttttttaaaacatcaatagatttcaaggggtcagtacactgccttggcagcagattgcccaggtttgagtgccagctccaccacttacttaatttggatttggggctagatacttgactgttctgcccctctgtctccctgattgtagtgggaggtgataatagtacctatttgctgagttgctatggggattaaatcaatgaattcatgtaaagtgcttaggacagtgcctggcatatagaaacagcactcaataatgttagctattttatttatttatttatttatttatttatttatttatttattttctttttttttgagacagagtctcactctgtcacccaggctggagtgcagtggcgcaatcttggctcactgcaaacttctgcctcccaggttgaagcaattctcctgccttagcctcccgagtaggtgggattacaggcatgcaccaccatgttcagctaatttttgtatttttagtagagacagggtttcaccatgttgcccagactggtctcgaactcctggcctcaagtgatctacctgcctcagcctcccaaagtgctgggatgacaggtgtgagccactgcatctggcaagtgttagctattaatatgtcaattgcgtgtatgcatggacaagcatgcattcccaaggatggtgtctttacattttaagcttttatcagattttcaaaagccatctgtgacccctaaaatagattggaaccatttgggtttatgtatcttggaggcacagtttccttaaagatactcattttgttgtctacttgaaccattcttcccatcccttccacttctcagcagatgacatagctccctgtggggatatatctgctccctgtaggtacaattccaaatcacctcactgcactggatgtgagacagcttatggcagctgctgcttccacctagagaaagacatgggcctgcatccatgctgtgtgtgattcatgtactcatgtggccgtgatagctgtaatcggctcatagatcattggatctgttcttagttttgttcccaggaatatctaaaaataggaaactggtccattcagggcttacaccttttgggtgaaaattcaggattaatgtttttggatattattcctttggaggacataaaaggcaatattgaccattcatcattcatctagtatttattgagcacctactatgtgccagggactgagagttcagtaatgaacaaaacacatgtaaaagacactcaaatgggacaagataattagcacaagttattaagagcccaaggggaacccttttctatttccactgctgtggatcatcagtgagtagacatgggtttaactgtctccctccttccttgcagacctttctgcccgtgaagtggatggctcctgagagcatctttgacaacctctacaccacactgagtgatgtctggtcttatggcattctgctctgggagatcttttcccttggtatgggcctgacattgctgcttatttgggctgttctgaaacaccactggaaggaaaatgtgttctttcaagccccaggatgtagacagtgttaagataacctggtgtgaggccagtatgctgcagccacctcaaaccacatgttgtgccttattgtgtctgagataggcccatgcaggtggagatgggggtttttgttgggggttgcgtcttactcctggcctctgcccctcctctcctttgggctatgccagagtgacttcctcccactggaagtggtcccaatgacattcgcatcccagctgctttttcattttgggctttgggtcacatgggttcacccatggagagtgggccctccctcacctggtggcgattgatgctcaggtgaaaaggggtacgtggcgggaagggcagggctctcattcctggttgtcattggccagtcttgacaacccaggtgctgaacaacccaggtgccctgggctatccggtgaggtccctaagagaaggatgagccataaccctgacatctggatggttcatctggggagatgagacttacacacttagggataaacagtgtgctgctgatttaaaattgtaatttgagtcttgagtaaagagaaaggagtcctggaatagtgtgggaaggcttcagagagggaacttaacttgacctggccttggctttgaaagtgtgaaatgtttcatgaatttatctgtgatcaggatgtaatagtaaagtgtgtcttcctgccccgtctcctttttcatcctagttctccctccatggatgatcacaatggatcatcccccagtggcttaatggagtcctgtactcccttaaaagcagagaggccacaactttgatttttgctttagctatttgaacatacctggtgaaaaagactctctgggttttaatgattcagaatttctccttgcttttctagttcattttgtctgtgttgatccagtagtcatacacattgaaaaacacttgaacgcttatttctaaagatgtagaatttttgtgatggtacttggacttgaccaacctggagtcctaattaaacttaaggtttgagctggtctctgaagtcaaggagatgatgacactgaattttcttgaaaaaaccagtgcttcaaggctataggatctgaaaggttttctaacagtgttctatcatgccaagtgtttcagcaatgcactgagcgtttgttagtcctggtgttttattgtttggcttttaggtggcaccccttaccccggcatgatggtggattctactttctacaataagatcaagagtgggtaccggatggccaagcctgaccacgctaccagtgaagtgtgagctccttccccatcccgggggcctgtgttcacagtctgtgggtctagggggagggaggggccctgagacttccccctgtgcccactcttgagttctgtccccacagctacgagatcatggtgaaatgctggaacagtgagccggagaagagaccctccttttaccacctgagtgagattgtggagaatctgctgcctggacaatataaaaaggtgtgtttggatctgtgggtggaaaggtctggataaagctggaagttataccagtgagctgtgctgttccgcagttctagaggagcattttcaaaagaggcaaaagactgtgtgatccagtggctgggcttcatggcggtgctccacgagaccctagtagcaatgatgaatgaaaaccctccccttcccgtggggctttcctttcatcttatatgtacagtacctgtaagcactattctccagatgtttgagtatcagaagttagtgtgcagttagaagactcagggcatccatggccattacatcactaatttgagtgcacttaaatccatgcgaaattggcttttaccagcggactggaaggaacaacctcagctgttatctgtggcaccagctggttttttgtggaatgggaagcattgttcaaaggaacaaatgtaatttcttggaaccaggcaggatatgtaaatgaatgaaacaactttctgctgaggtgttgagaggaaaactcagacataacctcagtttcttagattgagattagtccctgtgtagactttttatacttatcatttttcttccttcttctcaaggaggaatagtgttaggagattgtgtgccgaactggaagttaaatgcttctgtctgttaattatctcactgcccactacaactttcacaggtgaggcagtgaggaggcagaaggaaattaaccctcagttggtcaaagatgctctgactggtggaaatgtgttggtgggaagagattgaagttattgttgaaaatagggtcttttcacatccaatgttagacctctccaatgtttaaggatcatgaaggctttgggtattatccacccaatagaaggcctcactgcctctctatgggacccatccaagccctggaaaggcaacgtgatggggaccagaaggattctcagttgtagctactgacttggagaaggggctactggtatcttagcacctaatggcagaagctctttaccattggtggccccttcttcatgttctatgtctctggggatagttgacatgactctccttcaactaagtcccacatcttccaggtagtttggagatatgtacagttaaataatagtaagttctgagtgtctctattcatttttgaggtttggttgttaacacttgattaaatatgttcaatgaatgtttatagagttatgaaaaaattcacctggacttcctgaagagtgaccatcctgctgtggcacgcatgcgtgtggactcagacaatgcatacattggtgtcacctacaaaaacgaggaagacaagctgaaggactgggagggtggtctggatgagcagagactgagcgctgacagtggctacatcattcctctgcctgacattgaccctgtccctgaggaggaggacctgggcaagaggaacagacacaggtagctgtgggggcagcctcggtgtctcacctttcccctcccctataggccctgaaggagaggacccattttcccgataatggtgcactcccggttggtaaatatgtactcagggacaagttgcagaatcctcaggaggtccacgtggttttgaaaatgcttcccagatgattctaatatgttccccctggggctgggagagggatgtgcatgttgtggggagagggacatgcttccctggtggagaatctttgagctaaattctcaggtaatttgatcaaattgatacagaactgtgattactgagatcatataagcctctcctgccattgtcttaaatagtcattgaactggggaaaaagtgaagagaggcgggactgggtcctttgacgctataccctacctgtgaattggaatcacctgcagagatttaaaaactgctgatctacaagcctcacccaaaacaacaaattagaatccctgggggtggtggccaactgctccctggctgatttgtttcttctttcttttaaattttgtattatggaagatttctaacgtgtgcacaattcacatagtatagtgagctgttcagtattcgtcacccagcttcaatgactatgccctctgccagcctggatgcacacatggccatgtctgtctctcctcagcctcctctggattgtttggaagcaaatcctagacaccttatcatttcacccataaatattccagtgtgtgtctcttaaagataagggctctattttaaagaagaacaacagttattaaaaataactacaatgccgttatctcacccaaaacagggacaataaatcgttaaggcatcaggcagccagttaaagttcaaattatctcacaaatattatcatactccattaaaaagtgggcagaggacataagcagacacttttcaaaagaagacatacctgcagccaacaagcatatgaaaaaatgctcaacatcactgatcactagagaaatgcaaatcagaaccgtgatgagataccatctcacaccagacagaatggttattattaaaaagtcaaaaaataacagatgctggtgaggttgtggagaaaaggggaagcgtatacactgcttgttgaagtgcaaattagttcagctattgtggaaagcagtgtggtgatttctcaaagaacttttaacagaattaccattggatccagcaatcccattactgggtatataaccaaaggaatataaatcattctaccataaagacatgcatacgtatgttcactgcagcactattcacgatagcaaagacatggaatcatcctaaatgcccattgacagtagactggataaagaacatctggcacatatacaccatggaatactatgtgttgataaaaaagaacaagatctgagataccatctcccaccagtcagaatggctattatttaaaagtcaaaaagcaacagattgtggcgaggttgtggagaaaaagaaacacttttacaatgttggttggagtgtaaattagttcaaccattgtggaagacagtgtggcgattccccaaagacctagaggcagaaatactgtttgacccatcaatcccattactgagtatatacccagagtgatgtaaatcattctattataaaggcacatgaatgtgtatgttcactgctgcactgttcacaatagcaaaatcatggaatcaacctaaatgcccatcaatgatagactggataaagaaaatgtgatacatatacaccatggaatacgatgcagccgtaaaaaggaatgagatcatgtcctttgcagggacatggatggagctggaagccgttaccgtcagcaaactaacacaggaacagaaaaccaaacaccacatgttctcacttataagtgggagctgaacgatgaggacacatggacacatggagggaaacaacacacactggagcctttcaggggttggggattgggtggaacatcaggaagaatagctaatggatactgggcataatacctgggtgatgggatgatctgtgcggcaaaccaccatgacgcatgtttacccatgtaacaaacctgcacatcctgcatatgtacccctgaacttaaaaagtggaaaatacaaaaatgaaattaaaaaaagaacaagatcatgtcctttgcagcaacgtggatggagccggaggtcactatccttagcaaactaatacgggaacagaagaccagataccgcatgttctcacttataagtgggagctaaaactacgagaacacatggacacaaagaggggaacaacagacaccagggcatagttgagggtgcagggtgggagaaggaagaggatcagaaaaaatacctatcggatactgtgcttattatttgggtgatgaaataatctgtacatcaaaccgccatgacatgtgatttatccatgtaacctgcacacgtgcccttgaacataaaataaaagttaaaaaaaaattatcatacacttgttttgttctgtctgagatccagataagagtcacacattgcacttggttgctatgtctctgtaagttcactatgtctctattttttgccctcttacatattatttgtgaagaaaccatagtgtttgcctgtggagttcccacaatcggcattttgctgattacatccttgaagtgtccttctcaggtgcttctgtcttctctatgtgttgtaaactggtagttagtctaggaacttaacctgactcaggttagatctttggcaaacatgcttcatagatggttctgtgtgcttctgtcaagaggtatgcactgtccagttgtctgccttttgtaacattatcagtcattgggtgatcattacctagaatttctttttttttttttttttttgagatggagtctcgctctgtcacccaggctggagtgcagtggtgtgatctcagcttactgtaacctccacctcctgagttcaagccattctcatacctccgcctcctgagtagctgggattacaggcacatgccaccatgcccagctaatttttgtatttttagtagaaatggggtttcagcatgttggccaggctggttttgaactcctgacctcaagtgatctgccggtctcggcctcccaagatgctgggattataggcatgaaccacctcacccggcctagattctttaactcagcaccaaggtggagctaatgcccaggcaggactgagaatcactggctgacgtggtcagatggaggagaccatgccccagttctccgctgtctttgcatggcccttggacagaggtaggagaaggtgatgatagtggcccctagttcaaggtccaagttgcttgtgtgtgtgtgtgtgtgtgtgtgtgtgtgtgtgttttcctcttctttcccatcagaacattattttggaggcttatgactgtgacctttgttaaccaatttaggtataatatgtagacagcccttgtttatttgtatggactgggtaattttgaaagtatggcttttctattttgttttagaatatgttatgtgatttgaagatgggacacagtggcccatcagtcttcggttttttattatgctttgctcaggccagtttttataacgtgtttatatctcttgagcatacggtgttcctccaagttttgggggtctgcgatggaacttcacgggggtcggggaaggctgggcagtgaatctagggctctctgtctcagatcctttctcaatttggttactttgtgtttgtgggctctgaataatatttgagttgtaagagggttctgcttttatataaagttagaaagtcacattggaataaataacatgagaaaggtgcccagaagttttctagggctacaacaggctgagctgcagaatttgacacgccaggaattgaactttctcagttgaagttcacgttcaagttaagtaacttgtgtggcatcacacagctagtaagtggggggaccattccagacctaaggctttctgactccagaactcccctttcagccacttctctagtacgtaaggagccgtcacctgggccctcaagttgggggttggtgggggggcatttgatgtcaagagagaggggaagagggcattccaggcaagtggcaggagatcctgagaacacagtttggatgctcaggaggcttccgggagagcacctgatgggcctggctgcagcttgcaccctgatgggcctgacttcaccccctgctctgccttcccaggcctttggatcaggcattgcttatgttctcttccactaggattgagtagggaaagtagaaattcttgcagcttgtcagtaactttgatgaaagacccagcagaaaagcaggaaagctgaagagtaaaaatgatgggtggaccttggttttccacgtggcctaccacagcatgtcaggcctgggggcagaatcttgccatactgtgcagcccaaatttgaatgccaaaggctttcgtttgtctctggggggccacagtctaggtctagttctgtgcaggagttgtaatatttgctcttctctccctcctccagctcgcagacctctgaagagagtgccattgagacgggttccagcagttccaccttcatcaagagagaggacgagaccattgaagacatcgacatgatggatgacatcggcatagactcttcagacctggtggaagacagcttcctgtaactggcggattcgaggggttccttccacttctggggccacctctggatcccgttcagaaaaccactttattgcaatgcagaggttgagaggaggacttggttgatgtttaaagagaagttcccagccaagggcctcggggagcgttctaaatatgaatgaatgggatattttgaaatgaactttgtcagtgttgcctcttgcaatgcctcagtagcatctcagtggtgtgtgaagtttggagatagatggataagggaataataggccacagaaggtgaactttgtgcttcaaggacattggtgagagtccaacagacacaatttatactgcgacagaacttcagcattgtaattatgtaaataactctaaccaaggctgtgtttagattgtattaactatcttctttggacttctgaagagaccactcaatccatccatgtacttccctcttgaaacctgatgtcagctgctgttgaactttttaaagaagtgcatgaaaaaccatttttgaaccttaaaaggtactggtactatagcattttgctatcttttttagtgttaaagagataaagaataataattaaccaaccttgtttaatagatttgggtcatttagaagcctgacaactcattttcatattgtaatctatgtttataatactactactgttatcagtaatgctaaatgtgtaataatgtaacatgatttccctccagagaaagcacaatttaaaacaatccttactaagtaggtgatgagtttgacagtttttgacatttatattaaataacatgtttctctataaagtatggtaatagctttagtgaattaaatttagttgagcatagagaacaaagtaaaagtagtgttgtccaggaagtcagaatttttaactgtactgaataggttccccaatccatcgtattaaaaaacaattaactgccctctgaaataatgggattagaaacaaacaaaactcttaagtcctaaaagttctcaatgtagaggcataaacctgtgctgaacataacttctcatgtatattacccaatggaaaatataatgatcagcaaaaagactggatttgcagaagttttttttttttttttcttcatgcctgatgaaagctttggcgaccccaatatatgtattttttgaatctatgaacctgaaaagggtcagaaggatgcccagacatcagcctccttctttcaccccttaccccaaagagaaagagtttgaaactcgagaccataaagatattctttagtggaggctggatgtgcattagcctggatcctcagttctcaaatgtgtgtggcagccaggatgactagatcctgggtttccatccttgagattctgaagtatgaagtctgagggaaaccagagtctgtatttttctaaactccctggctgttctgatcggccagttttcggaaacactgacttaggtttcaggaagttgccatgggaaacaaataatttgaactttggaacagggttggcattcaaccacgcaggaagcctactatttaaatccttggcttcaggttagtgacatttaatgccatctagctagcaattgcgaccttaatttaactttccagtcttagctgaggctgagaaagctaaagtttggttttgacaggttttccaaaagtaaagatgctacttcccactgtatgggggagattgaactttccccgtctcccgtcttctgcctcccactccataccccgccaaggaaaggcatgtacaaaaattatgcaattcagtgttccaagtctctgtgtaaccagctcagtgttttggtggaaaaaacattttaagttttactgataatttgaggttagatgggaggatgaattgtcacatctatccacactgtcaaacaggttggtgtgggttcattggcattctttgcaatactgcttaattgctgataccatatgaatgaaacatgggctgtgattactgcaatcactgtgctatcggcagatgatgctttggaagatgcagaagcaataataaagtacttgactacctactggtgtaatctcaatgcaagccccaactttcttatccaactttttcatagtaagtgcgaagactgagccagattggccaattaaaaacgaaaacctgactaggttctgtagagccaattagacttgaaatacgtttgtgtttctagaatcacagctcaagcattctgtttatcgctcactctcccttgtacagccttattttgttggtgctttgcattttgatattgctgtgagccttgcatgacatcatgaggccggatgaaacttctcagtccagcagtttccagtcctaacaaatgctcccacctgaatttgtatatgactgcatttgtgtgtgtgtgtgtgttttcagcaaattccagatttgtttccttttggcctcctgcaaagtctccagaagaaaatttgccaatctttcctactttctatttttatgatgacaatcaaagccggcctgagaaacactatttgtgactttttaaacgattagtgatgtccttaaaatgtggtctgccaatctgtacaaaatggtcctatttttgtgaagagggacataagataaaatgatgttatacatcaatatgtatatatgtatttctatatagacttggagaatactgccaaaacatttatgacaagctgtatcactgccttcgtttatatttttttaactgtgataatccccacaggcacattaactgttgcacttttgaatgtccaaaatttatattttagaaataataaaaagaaagatacttacatgttcccaaaacaatggtgtggtgaatgtgtgagaaaaactaacttgatagggtctaccaatacaaaatgtattacgaatgcccctgttcatgtttttgttttaaaacgtgtaaatgaagatctttatatttcaataaatgatatataatttaaagtta

SEQ ID NO: 15 - DNA, 70616 bp, Pan troglodytes
  variation 537..976: note = n is a, c, g, or t
  variation 40932..42507: note = n is a, c, g, or t
  variation 45574..46359: note = n is a, c, g, or t
  variation 64665: note = n is a, c, g, or t
  source 1..70616: mol_type = genomic DNA
caaaaagcgaaggcgcaatctggacactgggagattcggagcgcagggagtttgagagaaacttttattttgaagagaccaaggttgaggggggggcttatttcctgacagctatttacttagagcaaatgattagttttagaaggatggactataacattgaatcaattacaaaacgcggtttttgagcccattactgttggagctacagggagagaaacagaggaggagactgcaagagatcattggaggccgtgggcacgctctttactccatgtgtgggacattcattgcggaataacatcggaggagaaggtaagggaaaagaaaaaatgattttttgtttataagggaaatccctgatcagactctgggactggagaaagcgaagtaacttcaaactttgggcgacaagaaaaaaaaaaggagctggattccagttgtgtgtccagagagtaatttttttttttttcggaataaacttcacttggggacgggtgggagataaccatagagttataaagtctaggtattttnnnnnnnnnnnnnnnnnnnnnnnnnnnnnnnnnnnnnnnnnnnnnnnnnnnnnnnnnnnnnnnnnnnnnnnnnnnnnnnnnnnnnnnnnnnnnnnnnnnnnnnnnnnnnnnnnnnnnnnnnnnnnnnnnnnnnnnnnnnnnnnnnnnnnnnnnnnnnnnnnnnnnnnnnnnnnnnnnnnnnnnnnnnnnnnnnnnnnnnnnnnnnnnnnnnnnnnnnnnnnnnnnnnnnnnnnnnnnnnnnnnnnnnnnnnnnnnnnnnnnnnnnnnnnnnnnnnnnnnnnnnnnnnnnnnnnnnnnnnnnnnnnnnnnnnnnnnnnnnnnnnnnnnnnnnnnnnnnnnnnnnnnnnnnnnnnnnnnnnnnnnnnnnnnnnnnnnnnnnnnnnnnnnnnnnnnnnnnnnnnnnnnnnnnnnnnnnnnnnnnnnnnnnnnnnnnnnnnnnnaacccacattttccagacctatttttaaaaacaatgtttttctaacaaccctatggcctcccaaagaaattgtttaggcttacatttttgaggtttcttttgggagtgggggtggtgttcgtgaatactgggccgaacaccaaggaactgggggtggaggcagaggtgtttgccctcttcttggcagtgggtcctggaaggcgacaggttttaaatgagtgttttcattcctcgcctgcggtttggcgggacagcgctgcagcccatggtgtggagcgcggctgggggaccaggggaggtggggagaggggagcgtggaggggggcgcaggaggcgggcagggctcggctggagaccggacctcggtgttggcctacagcacagggagccggccgaatgcgcgtgattactggacggcgctgctctgggtgagagtcggggccagatttggcgcggcggtgaggcggctgcgggacaagcagaggcgcgcgggcgtgggcaagggtttggggcgctctggagcggtttgttgggtcagtgaggtgccagggagagcgggtgcctgccgggcagtgtgctcgggttgcacgccctagcgcgggggcgacagcggcggcgcgggcgggcggtctggaataatgacaaacacatttggccctgagtgaagaagtcgtcgtcgcctcgcattccagcaactgggatttgaggaatttcgaaccgcacaccaaggggccctcattgtgcgccgtggcccccgcccccgcccgtcttcccgcgcctcctcctcggtagaatcatttctgcattgcccgggggctctactttcgctcagttctggccgcaggcaggaagagaggaaaggtctccaggaaggtgccgaacttcttgtgaggaagttagggacgacttggaactggggaaacttgtttgcaggtaagacagaaaggtgggaggtaagccatattctccctccgggcacccgagccctggacaccccctacccggcgcccttctccgcgcgggggtgcgtggcacttgccgtctgagctcgcccagcgctgctcggtcctctctagttgcccttttttccattcctctccctgcccgcttcagagccttctgtgcgtacttctccttcctctgctgtctacccccatggaaaccagatttacacacgaaattaactccgcccggctgcgcccagggagcgggcggcgtccatttggcattgaatatgtgggatcagctgttctattccgggagggtgtcggccaggtcggagcgacgagtgtggcccaacccgagtacggttgccagagggagccaggagccggggccgggccaggtgtgcgagagctgccgatggcctggcctcgcgtcttggtcgggaaggacttgctggcccggcaggctgtgcgttgtgcatccctcccgcagccagagcgccggtccggcacttcgctccccgaattgtgctaagacctcaggatgtgcgcaaggagtgcctggaagaacttgccactcactccatctccctgggtgggaggcaagcatggatggggcccctatcaggtccctaccgccccgcgtccgaaaagccccgggctgggcggtgtgggaaatggctttttggctccgaggccaaattgctcaatgttttggaccgactcgcctcgccgcggtcgctcctgacaagaactagacagatttttggagcagggagcatccagggcaaacgcacgacagtcctccgcagtgcatctcaccggacaaacatccccggagccacaggaggggaggaaggggctctccgggcgtgcgcacctccccagccgccgcgctgtcccatccccgacccctaatctggtcaacctggaccccggcactgctgaattgcatccccctccctcttctccctttctcctcggcctcctcctttccaaaaccctcacgatgaggaggccctgcctcgactccccgacaggcgcaaggccgaccagcctcgctttgatgccctggtcaggccctgcttcggagcttgcagttttgggttgacccaagtgcagctggacctcgttcacaagagtgaggggacgccaagaatgaacccgtcgttagcccccggtgccctggctcttgtttaaatccttagatcgagaaggacttgaaggagatcccaggctcccagctctccgcccctgggccagtttcctctcgggacgcggactgaggagggatgcagggggaggggcattgggccgggctttccagctgcaaacacgtctggcgccgaggcgggcccattttgtgcctcctggggacggaccgtgggcggcgcgcagcggcgggacgcgttttggggacgtggtggccagcgccttcctgcagaccccacagggaaggactccctttgacctccggggagctgcgaccaggttatacgttgctggtggaaaagtgacaattctaggaaaagagctaaaagccggatcggtgaccgaaaggtgtgggtctcaggattccccgggtctaactcgccgggtccaaccgcagcatcagccttggggcggcagataatctttcggtctcgcctggggcgcaagatgcaggatcgggggcaaatggcttctcccaacttccccctaattcgggttctgccagatggttgtcgtttgctgaagtggctcggcggcatttccttttgttttaaactgatcaatgagcgaacctgggatgggctgaaaaagtagattgtaggagggaataatgggaaacccgacttggggcgcctccttccctgcctcctactgcagtttctcggcccccgcgaaaggggagcgacaagcgcgggtggccgcggactcttgagggggcagaggcggctatggcgcgtgtcgggcaaggtggcaccagaaggcacttttgtgtgtgtgtgtgacaagagtctcgctctgtcgcccaggctgaagtgcagtggtgcgatctcggctcactgcaacctctgcctcccaggttcaagcgattctcctgcctcagcctcccgagtaactgggattacaggtgcccgccaccacgccaggctaatttttgtatttttagtagagacggggtttcaccatgttggccatgctggtctcgaactcctgacctcaggtgatccgcccacctcggcctcccaaagtgctgggatttacaggcgtaagccaccgcgcccggccaggaaccgttcttaaatgccgagagggcgcatgctagctctccccagcattcccggtgagccgctacccacggccgtgcggctctcgtgcccataggaggcgctggctagcgcctgtaaccctaaacccctcggcccctttccccccatccgcccggactctcttcccgctctcccccctctctccacaccccgcccggccccctctcgggtctcagttcaaaacaatgcaaacgcagagcgtcgtgcctggggcgcagcggcctctgcagctctgaggttcagagcgcggcgcgcaggggctcaggggcgcaggtccccggagcggctgggcatcgccaccaaccccgggacaaccgagccgccgaggacttggtggaggtgggagggagagcggaccgcgcagtgttcctctgggtcccggggtcagaaaccggacagtggcgggggctggaccgtccgagcgcagagcctcccgggcgaagtctgcgcgcagcactcccggctgcgctgtcggggaccaggagcctgggctgcgggcgagctagctggcgagccgggtaagattcgcggggctgtcgcgccctctagtgggctccggggacgcatcccgctttccccagccccgggcggtcggcgccgctatctcagtggagcgcagcgctggaaccccgggggcccggagcggaggctaatctgggtcacctttcccctcctccgggcagccagtggacgcctcgcaggctctgtgtgggcccgggaggcgccgggtggacgagcgggggccgaggtctctgggtttggattgagaatgggacgtccttgtaattcaatgtgggagaagcaggggagtgtggaggaggacgggtcccgtgcgttcttggggggcaggcgccgtcttctgcgttccagcccctcgccagctcccttgccccgcgggcggcctgttgctgtttgttttacgaccctgcgttattgtgcaacgggaacagtcgtttccaatcagctgcgcggccgtcgcggccctctccaggctggtttatgggggcggcggtggcgcgcggacagataggacagcgcggcccgggaacggcgtcgaggtccaggcggtccccctgccccgagggggcggaaatgctgaggtggcgagagcgtgggttccacagaaccctagtagcgagtccggctgagcctctgcggcctagcccagcagcgtcgtcttcccggctccgaagacgtcttcccgaagccccgctgccccggcgcaccagctcccggtgatggggatgatgatggggatgatggggatgatgatggggatgatggggagatgtccccgaattctcgtggggtcccgaggagatttagccattttcaacatcagttttcctatttctgcttaaaccccgcgggctttcaactgaggtcaccacgaaagctaaaagtacaacctaaggaaggaagagactggaaattaacatttggggtagtggagctcagaattcctcgcagcggcgtctgtgtcgcaacccgtggacgcacgtccttggaccaacactgccatctgctggccactcgcaagaactactgcgacccgctgtgagaatgggcttcgcggagaccattaggaaggtgctttttttttttttttttttttttttttttttttttattttttgctcagtaggaccgtaataggtgactgattttcttttgctgtgaggctacaagaatcgctggaagacaacatttttatttcgtggaaatttgtgttgtgtttcgccttggttgttaatgctttgcatttacatagtgaacatcttattatcagagctggcctgtgaggagggtagtggggggcattgatgttcccgtttctgagtgaggagacctatgtcggggccttggtgacctcaagccgaatgctcaaactgctactgctactcttaaggttgtgccattaggagtcacacccgtttggtgatattcaaaaggatatgtcattttattctcccgtggttaaatatatggtgagaggagagcaggcatgtttatgagcccagattgtcccataaaacgctcctgtgtaaaaacactccagccccctcccattactggaatgtctgatggagctccgggagatcaaaacaacaaaacaggctctggtagggtgcagaggtcctggtaaacacaccctctgctggaaaacagggagaagtttccaccagtgtagacctgcacttgggttgcctgggctgaagttaggagactgcgtagaaaaaggaagatgtgtaattttcacagttagaattaacttaggagagctgaaattaactgagcctcggaaatctgaatcttgaagtcaccagtggcttttggggctgtgagagagtctcctgtggtctttaatcatgtgagggtggggtgaaattcaatattcagtggttctgcaacgggatgcactgtgcaattggtgattgagaagccaactctctggctttaggagaagaatgtcttgctgttagtccttctggaaatagagccttgcattgcctgctgtctgtttacactagctttgcacattgcctttggttatagagtcatgtccaatggctctttacttctgtttgcagggcaggagatggcaccctgttaaagagaaaggatagtagctgcaaaatcatttgtttctctgtttctgtgactgtatatattggctcatctttgaatggtctttatagccacaccaggctggaggtaacagggtcatgggagtggactgctggtgtgggctgaatcagagttcagatccatgtctccaggaggtaggaggtgcagggcaagtcatgtggcttctggggcatccctcactttcttagttaaggagaagttgaaggagccgatctaaaataccttgggagtctgcagaaaaagtcgtgaaaatcaaagcactttcaattaaactatataatttagtccttacaagaatgccacagggcaagcaaccagtcaggccttgctagtcgtgcttcctagaagaaaagactgaggttcagagagttggacagagtgtcagatttgggatcagtggctagtccaatgtgatttccatcctttcttctgagagaaagcataagaaggccaagaggatggcggaaaagcacaagtcacctgcctgagagtcaacagggcagggggtctctttctcagtttgtttctctaagttacggcaaatgttttttgagctgtgattattgagaatgggggctgaagttcaacatgtagttggcatgagggaagtaattataattgaagaaaagatgtgggtgaaatctattgttcttccctgcaaaggggattgttctcacggattcttatggtgccatgtttctcagaatttgtagcttcagttacttatatttgcacacctgactttagatgagctccagaatagcagttactaattaaggatgagcatttagagtagataaaagtggcaggaacagcaagactcactcccagagagcctcactacaggtctaataggtgaggaaattccccatgtttcccatttttcttcattacctccctgtggggcaagcactgccattatgcatgagtaaactgtctgagttatagataagtaatgacatgaaacttcacaaacacgctgagcacagtggctcacgcctgtaatcccagcactttgggaagctgacgcgggtgaatcacgaggtcaggagttcaagatcagcctggccaacatggtgaaaccctgtctgtactaaaaatacaagaaattagctggccatgatggtgggcacctgtaataccagctacttgggaggctgagacaggagaatcgcttgaacttgggaggcagaggttgcaatgagctgagatcatgccactgcacttcagcccaggcggcagtgcaagactccatctaaaaaaagaaaaagaaagaaagaaaaaaagaaacttcacaaacaggcctgatttctacccagggaaccactgttatcagagatgggagtttggaatcttaagcaacaaacacatgtttattctcttctctcctgatggcttgctcaaagggctgtttccattgcccactttttttttgagacggaatcttgctctgtcacccaggctggagtgcagtggcgagatcctggctcactgcaacctctgcctactgggttgaagccattctcctgcctcagcctcccgagtagctgggattataggtacctgccgccatgcctggctaattttttgtatttttagtagagatggggtttcatcatgtcggccaggatggtcttgaactcctgacctcaagtgatctgcccacctcagccttccaaagtgttgggattacagacgtaagccaccacgcccggcctcattggccactttatatgtcagtaaataatctttcctggcagagggtccactgtatctggaggcactgaaggaaatctgggagtgtctggccagggcaaagcactgcttagagcttgcacaggaaaagcagtgagcccttcttttaagctggagaatgctttaaagatgcatctttggcaagtcttgccaaagaaatatgggatctaaatgtgataaaaccaaagacatcaagctggctctggaggccttctttgaagtttgctgagtggattgtcagtgggaggctgatatttatatgtacaaacacacaagcattactgctaattgtggtaaatcagtctggccagcctggctctggggcccactgtgcctgccaccgcagcagtgtggaagccttgcatcccaggcacatgtcaggatcctcggaggccatcagccagccagcattgtgtgaattgcatttgggttcacagcactgtaattgtgtttctcctgctgtggtgagcaaaggaggaaaatggaaggaggaggtgtaatttgccctaggaaatagtcaggcaggtggcacacaggggtgggatatggctaaaacactgaccttcccttgagagagaccatatggtgaagtggagagggcatggcatttgtatcacacgaccttgtgttcgaatcctggctctgtcactggctgtgtgactttgggtcatttgcaaaacctctctgagcctcaactgccacttcttaaaatcagctctaagtaatcacagggttattcttcacaaacacagcatgcacatgcaaactttggcttagtaaataatggtttctccttctcttactttgttttctacgtaccccactccccttcctgtaaggagccttccaccgttttctctgtgttctcttcctctcccattttcctggtagcattcaataaaacagaaatctgatttctgcaaagtaggccaccttacggtagaaatacatgattaggccccaccaaaaactttgtttaggctattatcttctggatcctagatcccctccaaccaaaccaaacccaactagggctaaacacagcaatatatgaatacattgaatttctctctcactctttctttttttaaaccagtttactcaggaatcacatgcacacatattttagcttccaaagtcaatgatggaacaaatcgtgtcccattaggctcgctccattgtatgagttagcgtcagaggagttcataccagagtgacttcatcttgaatagggcctaggtaagaagaggatgagacctgctgggctgcattcccaggaggttacacatttgtagtcacaggagagaaaggagttggtataggagttgatagatacaggtcataaagaccccagtgataaaacaggttgcaggccaggtttggtggcttattcctgtaatcatagtactttgggaggccaaggcaggaagattgcttgagcccaggatttcaagatgagcctggacaacatagtgagaccttgtctccacaaacaataattttaaaaacatgagctgggcatgatggtgcaggcctatagtcccagctactggtctgaggggcagttgggtggcaggctgagatgggaggatggaggctgcagtgagctgagatcaggccactgcactccagcctggatgacggaataagaccctgtctcaaaaatagataaataagcaaataaatgagccagcaaaaccaggatgcagtgaagaagctggccaaaacccaccaaaacgaagatggtgatgaaagtgacctctggtcatccctactgcttattacacactaattataatgcattagcatgttaaaagacactcccaccagtgccatggcagtttacaaatgccatagcaatgaccagagatactctatatggtctaaaaaggggaggaaccctcagtcctgggaattacctgtccctttcagggaaaactcatgaatcttctaccgcttgttgagcatataatcaagaaataactataggtatactcactcaagcagccatgcagttgctgtgcccatggagtagccactcttttattcttttactttcttaatatatttgctgtcattttactcttttggcttgttcttgaattccttcctgcatgaagtcaagaacctttgtgacctcccaggccgaaccccaattttgaggttcaccctatgacatcttttctgtgtccaatcaccctatgacatcaccctatgaccaatgaagggacaatggtaacctcccgttgactttaaattagaactgattggcactgtttgggcttcaccagtgggtgagtctctccttgcccagattcaacttgctaacatttttttcccttcaattttggctcctttgtcctttctaatgttctttattttggacagatgggaaagtggctgtgaggcctctggcttagcagcctgatagcagcctcctgttgtctgggtgccccagatgggagcacgcctggctggccacatcttttgcaacccaccttgtcatcccttctctgggaccttttctctttagtttctttttttaaaattttttaaagtatttatttatttattatttatttttagagatagcatctcgctgtgttgcccaggctggagtgcagtggcataatcatggctcactgaagcctggacctcactggctcaagtgatccttccacctcagcctcctgagtagctgggactataggcatgcaccaccacgcctggctaaattttgtattttttttgtagagacggggttttgccatgctgcctagactggtcttgaactcctgggctcaaacgatctgcctgcctcagcttcccaaagtactgggattataggcgtgagccactgcacctggcctctctttagtttttaatgactggctgtttgacttctctgctcttcaggctgaaattcttatttcatgtttgtagtctttgccttggctatttggcaactgtttaaggcaagatacttggttttgagagttctcccattgtgttgaccctgggacaccagggtcattgttctgtagctccaattatgttaggtctcatgcttttgggtttcactattggccaccctccagatgctctggggtttttggcatttggtgtggggacccttgttagctgatactctgggtttttcggcatttggatgctccagggtgtttggcactgacattcccctctagcattgtgggttagagtcccacccaggggaaatcttggtcttgcctttccttgttttctactctaaagttatcattttctgtaaaaacattttcttttcttattgtcactttgtttaatgctttgctccaggaggtgggaatttgcaggggaaaataattgggctctccctatacttagaaaaacttctgtgtctagtagagatccttgttagacaaagggacagtggtgagtcccagagaactcgtcactagggtgccttttaggcaattggagcaaattcaaattagcaaactaagtttggccatttggataagtcccaattttgtcagggaaataatttgggtccagctatcttttataaaatagtgcgtttgcgttcctacattatggctagacctcaaagataaaagctattggatctttgtttatgtgtgtgtataaatgtctagatgtgtttatgtgtatgtacatttattatgttatatattttgtctacagggtaccaaattggcttataaataaaagagtgctcataaaaagagtaaataagtccaagcatttctcaagctcatgtaacttaagtttactaaaatttagagttactaaaaattcatatataactctgtataaatgtgccaaagaagatatgctcttagtgaaaataaattctttttggccaattcagatgtcatttatatgtggggtttaaaatatgaatttcgaaagaaaataaaaacaagtagaaagaaataaaaaacaataagcagtggagagagatgtgaggaaagttatgaatataaagatgtatttttggtaaggaatgttataaagaaattttatgagaaaggatcttatatgataaattcttgtcctaaggtagaatgactgattgtttagaaaagaaggaaatataggacaagtcagaaagtccaagcatgttgtagatgacttatgtaagtcacgataaagtttatacaagagaatttattaaaatttagctgtaattagccataactgaaaggaaatttatttatttatttatttatttatttatttatttattatttattttgagaaggagttttgctcttgttgcccaggctggagtgcaatggcatgatcttggttcactgcaacctctgcctcctgggttcaggcatttctcctgtctcagcctcctgagtagctaggattacaggcatgcaccaccacacctggctaattttgtatttttagtagagatggggtttcatcatgttggtcaggctggtctcaaactcctgacctcagttgatccacccacctcggcctcccaaggtgctgggattacaggcatgagccatctcatgcgcccagccaggaaatttatttataacactctatctaaattttggtgccctatgttaaaacaagtttttcttcaagtattggtttgctttcagtaagattgcaagaaatattgacttttaattctagaatctgtttcctttgaaggcctctcagatttatatcttttccttttcccttgaaaaggtatagcctttgcaagttcaaaactgacttccctagactccttttaggaaaagcaatacagtgcttgtttcaggctgtggctcaatagccaagcctttgttctttcatggtggtggcccgggttcagttcctggcttagagaatgagaggtttccagtttgctacttctgggacttttgtcatttatttattctttttgtctccatcgacagcttctgattttctcacttgaatttttttttctgtgagctaccttaagggtaatgctggatcttgtaaaaattgcttgccatctctttggagatacctcttgtgtccatggttaagttataaccttggttaaggcctgttggtttcactagggaaaatacctttaaaaaaaggcttaaaagccagagatgttggctatttgtcctggctagagtctggtattaagggatttaaaaggagtttttaaaggacctctatagttataagtcagcttaattaaaaatggatattccatattcatatttatatatatatacacacacatatatatgtatgtatgtgtatgtgtatatatatatatatatatatttaaaatgacctgtatgatttgttcttcttggaacttatttttttgagagaaagtgttttgtgtgtttgttgtttgtttttcttctcagtggactgaattatttctccattctgtctttttaccccctttaatgcccatattagaggacctaagataatttctgacagtctgggactccttgggaggaaacagaaggtgccacagacctcgttttgggagaaacctctgttttcttcatggaaccccaagaactgtaagcagacaggtctccctcagaatccaaggctctgctctgtttacgtcacattacctgacctttgtgacttttgggggcatcagaaattactttgcattatgagggaacctttagcattggtgtgtattacctaggtaggatgtgtgcttttagggattgcagttgcttccatgagtggttattactacagaccaatacttctttcttctcacatttaaatgaaaaaaaaagcatgctcttgggcatccacctatgaatggagggtgggctgatttgctttaggttggccaccagcctttggggaacatccttgcagtgaaatgcttggtgaaagcattgcactgtcttattgcatagtgcatttctatgcacttctgtctgatgtcctaggcttaacacctgctacataattaagatcacttacttatcaggtttttaatcaaaatgaaatgttgctaagagttaacattgtagcatatgtaattgagattactggagaaacagttttacctacaagatatgtaaggaaagcaaaatgtatttttggtaaaagattataggaaggtgtgccagtatagttttttattttgcttactttagtgggttaaaggattgttttaagtttgataggagaaagctgaagcatgagcaagttgtggaaggtatatgaaagatgaacattttaaaagaaattctgtgtgtaaacattggctgaagttaaagggggaggctggagccaagatggctgaataggaacagctccggtctacagctcccagcatcagcgacgcagaagatgggtaatttctgcatttccatctgaggtaccaggttcctatcactagggagtgccagacagtgggcgcaagacagtgggtgcagcgcactgtgcacgagccgaagcagggtgagccattgcctcactcgggaagcgcaaggagtcagggagttcccttccctagtcaaagaaaggggtgacagacggcacctggaaaatcgggtcactcccaccccaatactgcacttttccgacaggcttaaaaaacggcgcaccaggagattatatcctacacatggctcagagggtcctacgcccatggagtctcgctgattgctagcacagcagtctgagatcaaactgcaaggcagcagcgaggctgggggaggggtgcccaccattgcccaggcttgcttaggtaaacaaagcggccgggaagctcaaactgggtggagcccaccacagctcaaggaggcctgcctgcctctgtaggctccacctctgggggcagggcacagacaaacaaaaagacagcagtaacctctgcagacttaaatgtccctgtctgacagctttgaagagagcagtggttctcccagcacacagctggagatctgagaacgggcagactgcctcctcaagtgggtccctgacccctgacccctgagcagcctaactggaaggcaccccgtagtaggggcagactgacacctcacacagccgggtactcctctgagacaaaacttccagaggaacgatcagacagcagcatttgcggttcacgaaaatccgctggtctgccgccaccgctgctggtacccaggcaaacagggtctggagtggacctctagcaaactccaacagacctgcagctgagggtcctgtctgttagaaggaaaactaacaaacagaaaggacatccacaccaaaaacccatctgtacatcaccatcatcaaagaccgaaagtagataaaaccacaaagatggggaaaaaacagagcggaaaaactggaaactctaaaaagcagagtgcctctcctcctccaaaggaacgcagctcctcaccagcaatggaacaaagctagacggagaatgactttgatgagttgagagaagaaggcttcagacgatctaactactccgagctacaggaggaaattcaaaccaaaggcaaagaagttgaaaactttgaaaaaaatttagatgaatctataagtagaataaccaatacagagaagcgcttaaaggagctgatggagctgaaagccaaggctcaagaactacgtgaagaatgcagaagactcaggagctgatgcgatcaactggaagaaagggtatcagtgatggaagatgaaatgaatgaaatgaaacgagaagggaagtttaaagaaaaaagaatgaaaagaaacgaacaaagcctccaagaaatatgggactatgtgaaaagaccaaatctacatctgattggtatacctgaaagtgacggggagaatggaaccaagttggaaaacactctgcaggatattatccaggagaacctccccagtgtagcaaggcaggccaacattcagattcaggaaatacagagaacgcctcaaagatactcctcgagatgagcaactccaagacacataattgtcagtttcaccaaagttgaaggaaaaaatgttcagggcagccagagagaaaggtcaggttacccacaaagggaagcccatcagactaacagcggatctcttggcagaaactctacaagccagaagagagtgggggccaatattcaacattcttaaagaaaagaattttcaatccagaatttcatatccagccaaactaagcttcataagtgaaggagaaataaaatactttatagacaagcaaatgctgagagattctgtcaccaccaggcctgccctaaaagagctcctgaaggaagcactaaacatggaaaggaacaaacggtaccagccactgcaaaatcatgccaaattgtaaagaccattgaggctaggaagaaactgcatcaactaacgagcaaaataagcagctaacatcatactgacaggatcaaattcacacataacaatattaactttaaatgtaaatggactaaatgctccaatcaaaagacacagactggcaaattggataaagagtcaagacccatcagtgtgctgtattcaggaaacccatctcatgtgcagagacacacataggctcaaaataaaaggatggaggaagatctaccaagcaaatggaaaacaaaaaaaggcaggggctgcaatcctagtctctgataaaacagactttaaaccaacaaagatcaaaagagacaaggccattacataatggtaaagggatcaattcaacaagaaaagctaactatcctaaatatatatgcacccaacaatacaggagcacccagattcataaagcaagtcctgagtgacctacaaagagacttagactcccacacaataataatgggagactttaacaccccactgtcaacattagacagatcaatgagacagaaagttaacaaggatacccaggaattgaactcagctctgcaccaagcggacctaatagacatctacagaactctccaccccaaatcaacagaatatacattttttcagcaccacaccacacctattccaaaattgaccacatagttggaagtaaagcactcctcagcaaatgtaaaataacagaaattataacaaactgtctctcagaccacagtgcaatcaaactagaactcaggattaagaaactcactgaaaactgctcaactacatggaaactgaacaacctgctcctgaatgactactgggtacataacgaaatgaaggcagaaataaagatgttctttgaaaccgacgagaacaaagacacaacataccagaatctctgggacacattcaaagcagtgtgtagagggaaatttatagcactaaatgcccaccagagaaagcaggaaagatccaaaattgacaccctaacatcacaattaaaagaactagaaaagcaagagcaaacacattcaaaagctagcagaaggcaagaaataactaaaatcagagcagaactgaaggaaatagagacacaaaaaacccttcaaaaaattaatgaatccaggagctggttttttgaaaggatcaacaaaattgatagaccgctagcaagactaataaagaagaaaagagagaagaatcaaatagacgcaaaaaaaaaaaaaaatgataaaggggatatcaccaccaatcccacagaaatgcaaactaccatcagagaataccacaaacacctctacgcaaataaactagaaaatctagaagaagtggataaattcctcaacacatacaccctcccaagactaaaccaggaagaagttgattctctgaatagaccaataacaggctctgaaattgtggcaataatcagtagcttaccaaccaaaaagagtccaggaccagatggattcacagccgaattctaccagaggtacaaggaggaactggtaccattccttctgaaactattccaatcaatagaaaaagagggaatcctccctaactcattttatgaggccagcatcatcctgataccaaagccgggcagagacacaaccaaaaacgagaattttagaccaatatccttggtgaacattgatgcaaaaatcctcagtaaaatactggcaaaccgaatccagcagcacatcaaaaagcttatccaccatgatcaagttggcttcatgcctgggatgcaaggctggttcaatatacccaaatcaataaatgtaatccagcatgtaaacagaaccaaagacaaaaaccacatgattatctcaatagatgcagaaaaggcctttgacaaaattcaacaacccttcatgctaaaaactctcaataaattatgtatgtaaatgggacgtatctcaaaataataagagctatctatggcaaacccacagccaatatcatactgaatgggcaaaaactggaagcattcactttgaaaactggcacaagacagggatgccctctctcaccactcctcttcaacatagtgttggaggttctggccacggcaattaggcaggagaaggaaataaagggtattcaattaggaaaagagaaagtcaaattgtccctgtttgcagatgacatgattgtatatctagaaaaccccattgtctcagcccaaaatctccttaagtgataagcaacttcagcaaggtctcaggatacaaaatcaatgtacaaaaatcacaagcattcttatacaccaataacagacaaacagagagccaaatcgtgagtgaactcccgttcacagttgcttcaaagagaataaaatacttaggaatgcaacttacaagggacgtgaaggacctcttcaagaactacaaaccactgctcaatgaaataaaagaggatacaaacaaatggaagaacattccatgctcatgggtaggaagaatcaatatcatgaaaatggccatactgcctaaagtaatttatagattcaatgccatccccatcaagctaccaatgactttcttcacagaattggaaaaaactactttaaagttcatatggaaccaaaaaagcgcccgcatcgccaagtcaatcctaagccaaaagaacaaagctggaggcatcacgctacctgacttcaaactatactacaaggctacagtaaccaaaacagcatggtactggtaccaaaacagagatatagatcaatggaacacaacagaaccctcagaaataacgctgcatatctacaactatctgatctttgacaaacctgagaaaaacaagcaatggggaaaggattctctatttaataaatggtgctgggaaaactggctagccatatgtagaaagctgaaattggatcccttccttacaccttatacaaaaattaattcaagatagattaaagacttaaacgttagacctaaaaccataaaaaccctagaagaaaacctagacattaccattcaggacataggcatgggcaaggacttcatgtctaaaacaccaaaagcaatggcaacaaaagccaaaattgacaaatgggatctaattaaactaaagagcttctgcacagcaaaagaaactaccatcagagtgaacaggcaacctacaaaatgggagaaaatttttgcaacctactcatctgacaaagggctaatatccagactctacaatgaactcaaacaaatttacaagaaaaaaaacaaacaaccccatcaaaaagtgggcaaaggacatgaacagacacttctcaaaagaagacatttaagcagccaaaaaacacatgaaaaaatgctcaccatcactggccatcagagaaatgcaaatcaaaaccacaatgagatagcatctcacaccagttagaatggcaatcattaaaaagtcaggaaacaacaggtgctggagaggatgtggagaaatgggaacacttttacactgttggtgtaaaagtgttggtgggactgtaaactagttcaacccttgtgggactgtaaactatttggttgttgggactgtaaactagttcaacccttgtggaagtcagtgtggtgattcctcagggatctagaactagaaataccatttgacccagccatcccattactggctatatacccaaaggattataaatcatgctgctataaagacacatgcacacgtatgtttattgcggcactattcacaatagcaaagacttggaaccaacccaaatgtccaacaatgatggactggattaagaaaatgtggcacatatacaccatggaatagtatgcagccataaaaaatgatgagttcatgtcctttgtagggacatggatgaaattggaaatcatcattctcagtaaactatcgcaagaacaaaaaaccaaacgccgcatattctcactcatagatgggaattgaacaatgagaacacatggacacaggaaggggaacatcacactctggggactgttgtggggtgggggtaatggggagggataggtttaggagatatacctaatgctaaatgacgagttaatgggtgcagcacaccagcatggcatatgtatacatatgtaactaacctgcacattgtgcacatgtaccctaaaacttaaagtataataataataaaataaaataaatttaaaaaaataaagttaaagggatattattattattatttttgtaagttaaacattaggattaaaaagcacaacagagttttctagagcactgatctactctgtaacagaaaattgtaaagggttataaaaggtttatgagaatcttaccttatggtcaaactgattaagattgggaagatttgtctataaagttttattaagaattgggtttgacattaatactacactaatgcaaaggtgaaatttggctttctctcttgaataagattttcatgtattattacaaggtaaagaaagatttttatttgctttttaaataaactataggaaaaataagggagagaaaagtgacagattgtttggaaacccaagtctcccctatatcaatgagtaaaagtttttacctttttgaatctttgagttatcattttggctaaataaatgctttatggtgacctgggattctattttgtaatatcaaccgtttaaaccttttgtatttgacaaacgttccaaactgaaattctaaagtaagtctttttctgacctgattagtccttctagatattaggtcccctaaagtccaaaagtgacatatttgacttacttgatatattaaaatcatacaggaagcactttcaaatataaaatactatttggctttctttggactatacttatataaatgtgttattggtatgtgttccaaaattatgcaaaactcctataattctgatatgacttagtgtacgttatcagtcataattatagttcttatgttacattattgtgtgctacagagttaaccaaatttctttgtcaattgcatctttaatcggctgtcctaagacttttgtcacccacagacaattgttgtcttgttttaatccttttcaaaaggtggtttataatcagctataggactctgatgggtactctaaaatgcaagcctctgataactttgaaaattgtgccattggctgggcatgatggctcacaactgtaatcccagcactttgggaggctgaggcaggcagatcacgtggggtcaggagttcaagactagcctggccagcatggtgaaatgccatctctactaaaaatacaaaaatcagtcaggcatggtggcatgcacctgtaatcccagttacttgggaggctgaggcaggagaatcacttgaacctgggaggcagaggttgcagtgagctgagatcgcaccattgcattccagcctgggcaacaagagggaaactctgtctcaaaaaaaaaaaaaaaatagaaaaagaatattgtgccattgaaacagaaaagaaaacacaaataaacttccaggattctcatagaaacttaatatattcataaggaatgtggcccaatatcaggcaaaacaagagttaacagcatggactaaactaataaaagaccaaaacaatcttttaatgactttttgcttaaaacattgcatatcctttctgttttgcttttcagagtcaagaaaacttttcctttggaaagtatttactgcttttaacaattgaaaaaagtatactactatggacaaaatttggagcatatgtctttctttttacctgatttctccagaatttgaaaactatttgggagtattcttaactaatgacaatatagttatttgcataagtgcagtaagaatcctttcttttgtaacaggacacaattaaagaaactgcttattttatgaaggctttgactagaatggtgtgctttcagatacaaacagactgctttaagggatcaaagttgacttatagagccaataaaagccactatggaaaactggcctcattccttgtctatgcagtctctgtatggggttcctgacctgtggtaagtgaagaatgtcactttctgaccagcccaggagccccaagttatcttgggacatcaagaagaaaggaatgcacccaacttatacaggtatttgcaggcacagataaatctgtggctggctcaaggctttaagaagcctaatgtgagattctttataaattaaatttccatcgaaaccaattttaaaaagagcctatgtggcagataattatttttgctgcactttatacaaataatcaggccaaatataataagattaaaactttatggcaaacaaatttgtcccactgtgatttgtctttggtaaaaatggaagctagagagagaatttgtttcaaaaactatgatacaccagttattagattctaggctcatctgttgtttttgagtttcttctgcaatttaggcagaccctgcttattcctgagaatcaaccagtgatctatggctgttgctcagaagaaataagagggatggctaacataaagatatggattagtattctaattctgggcatgtattagaattggctagtggccccatatcagcttggttttaacaattacccagttcatggaaagccttcttatttagtttacttgggataattgtgctgattttgttttactgttgtggaatatattgctgttgtcctctttgtgtaggaatgcaggaaaagcatacttaacattttcttaaattgaacacttattaatcttccagatttcaccttttgtcagaactcagagttatgatttgccctcactgtactgacaacaggctttggtagggtgcagaggtcctggtaaacacaccctctgctggaaaacagggagaagtttccgtcagtgtaaacctgcctgggctgaagttaggagactgagtagaacatttgctgcagaaaaaaaagatgtgtaattttcacagttagaattaacacttaggagagctgaaattaactgagcctcggaaatctgaatcttgaagtcaccagtggcttttggggctgtgagagagtctcttgtggtctttaatcaggtgagggtggggtgaaattcaatattcagtggttctgcaatgggatgcactgtgcaattggcgattgagaagccaactctctggctttaggagaagaatgtcttgctgttagtccttctggaaatagagccttgcattgcctgctgtctgtttacactacctttgcacattgcctttggttatagagtcatgtccaatggctttttacttctgtttgcagggcaggagatggcaccctgttaaagagaaaggatagtagctgcaaaatcatttgtttctctgtttctgtgactgtatatattggctcatctttgaatggtctttatagccacaccaggctggaggtaacagggtcatgggagtggactgctggtgtgggctgaatcagagttcagatccatgtctccaagaggtaggaagtgcagggcaagtcatgtggcttctggggcatccctcactttcttagttaaggagaagttgaagtagtcattctgaaatattatgggagtctgcagaaaaagtaatgaaaaccaaagcactttccattaaactccataatttagtccttacaataatgccacagggcaagcaaccagtcagaccttactagtcgtgcttcctagaagagactgaggttcagagagtgggacagagtgtcagatttgggatcagtggctagtccaatgtgatttccatcctttcttctgagagaaagcataagaaggctaagaggatgggggaaaagcacaagtcacctgcctgagagtcaacagagcaggggtctctttctcagtttgtttctctaagttatggcaaatgctttttgagctgtgattattgagaatgggggctgaagttcaacacatagttggcatgagagaagtaattatgattgaagaaatctagatgaaatccattgttcttttctgtaaaggggttgttatccctgattctttttttcttttttcttttttagatggagccttgctctgttgcccaggctggagtgcagtggtgtgatcttggctcactgcaacctctgcctcctgggttcaagtgattctcatgcctcagcctttccagtagctggaactacaggagtgtgccaccatgcccggctaatgtttgtatttttagtagaggtggagtttcaccatgttggccaggctggtcttgaactcctgacctcaagtgattcacccaccttggcctcccaaagtgctggaattacaggagtgagccattgtgcctggcctgttctcactgattcttatagtgccatgtttctcagaatttgtagcttcaattacttatatttgtgcacctgacttttaggtgagctccagaatagtattactaattaagaatgagcatttagactagaaaaagtgggaggaacagcaagactcacttccagaaagcctcactacaggtctaataggtgaggaaagtccccatctttcccatttttcttcattacctccctgtggggcaagcactgccattatgcatgagtaaactgtctgagttatagataagtaatgacatgaaacttcacaaacaggcctagatttctacccagggaaccactgttatcagagaagggagtttggaatcttaagcaacaaacacatgttgattctcagtatttgcctcctgatggcttgctcagagggcctgttttcattgcccactttatatgtcagtaaataatcttccctggcagtgggtccaccatgtctggatgcacacagggaaatctggtggggtctggccagggaaaaacactcctcaggttttgcaggaaaagcagtgaacccttcttttaagctcgagaatgctttaaagatgcatcattggcaagccttgccaaagaaatacgggatctaaacgtgataaaagccacgacgacatcaagctggctctggaggtctcctttgaagtttgctgagtggattgtcagtgggaggctgatatttacatgtagaagcacacaagtgttactgctaattgtggtaaatcaggctggccagcctggctctggatcccactgtgcctaataccagccctgcatcccaggcacatgccgggctcctcagaagagatcagccagccagcattgtgtgaattgcatttgggttcacagcactgtaattgtccttctcctgctatgaggagcagagagggaaaaggggagggagggttgtgtaatttgccctaggaaattgtgggggagggacaggcacggggggtggggggcgggcggcacgacgtggctaaaacactgaccttcccttgagagagaccatatggtgaagtggagagggcacagcttttgcatcacacaggccttgtattagaattttggctctgacaccagctgtgtgaccttgggtcatttgcaaaacctctctgagcctcaactgccccttcttaaaatcagctctaagtaaccacaggattattcttcagaaacacagcatgcacatgcaaactttggcttagtaaataatgatttctttttgttccatctactccacccccctttcccattagaagcttgctacctttcactctgtgttttcttcctctcccattttcctggtggcattcaataaagcagaattttgatttttgcaatgtaggccaccttagagcaaaatacatgatcaggcaccaccaaattaggctattatctactggatcctgtttaaccaacccaaacccaactcaggctaaatacaggaatacatgaaaacgctgaatttctcttttttttttttttttttttttttgagatggagtcttgctctgtcacccaggctggagtgcagtggtgcgatcttggctcactgcaagctccacctcttgggttcatgccattcttctgcctcagcctcctgagtagcggggactacaggtgcctgccaccacgcctggctaattttttgtatttttagtagagacagggtttcaccgtgttagccaggatggtctccatctcctgacctcatgatctgcccgcctcagcctcccaaagtgctgggattaccgccgtgagccactgcgccctttcctcctttttttttttaaaacaacaacaacaacaacaacaacaaacagtttattcagtaattatgtatacgtattttagcttccaaagtcagtgatggaacaaattgagtcctattaggcccactccattgcatgagttagcatcagaggaggtcaaactagagtgacttcatcttgaatatgggctaggtaagaagaggatgaggcctgctgggctgcattcccgggaggttaggcatttgtagtcacaggatgagataggagttgggtaggaatggtttcacgagatacaggtcataaagaccacaggatgcaggctgggtgtggtgccttatgcctgtaatcccagtactttgggaggccaaagcaggaggattgcttaatcctaggagttcaagaccagcttgggcaacatagtgagacctcatctctacagataatttttattttattttattttattttttgtgatggagtcttgctctgccgcccaggctggagtgcagtggcatgaccttggctcactgcaacctccacctcgtgggttcaagcgattctcctgtctcagcctcctgagtagctggaattacaggcgcacaccaccatgcctggctaatttttttgtgtttttagtagagatggggtttcgccatgttggccaggctggtctcgaactcctgacctcaggtgatccgcctgccttggcctcccaaagtgctgcgattacaggcatgagccaccgtgcccagcctctacaaataattttttttttttttgaaatggagtctcagtctgtcgcccacactggagtgcaatggtgcgatctcagctcactgcagcctctgcctccctggttcaagcgattcgccttacaaataatttttaaaaaatgagctgggtgtggtggtttcacaagatacgggtgataaagaccccaggatgcgggccaggtgtggtggtttatgcctgtaacccagcactttgggaggccaaggcaggaggattgcgtaagcctaggagttcaagactagcctggacaacatagtgagacctcatctccacaaataattttttaaaaatgagctgagtgtgatggtgcaggcctgtagtcccagctcttgggctaggcgtgggggtcagctcaggtgggaggattgcttgagcccaggagttcaaggatacagtgaactatgattgtgccagtacactccagcctgggcaacagtgcaagaccctgtttcataaataaattaaaaaaccccaaaaacccaggatgcaatgaagaaggaagcccaaacccaccaaaaccaagacggtgatgaaagtgacctctggtcatcctcactacccattatatgctaattataatgcattagcatgctaaaagataccaccagcaccatgacagtttgcaaatgttgtattaatgacaggaagttaccctatatggtggaaaaaggaaggaaccttcagttctgggaatttcctccctgtttctgggaaaatcatgaataatgcaccctttgtttagcatataatcaagaaataaccataagtatactcagttaagcagcgtggctgttctgcctatggagtagccacccttttttattcctttattttcttaataaatttgcttgaattccttcctgggtaaagccaagaacccatgtggcctcccatggtgatctccaattttgggattcaccttgtgacattaggagcaacttagggatctggtgcatcccaggccaagactaacgtggtgatttttggggggttatgttaaaactgagggctctgcccaggcccctcagcatggcttcttgagtcaatacctgggtacttactggccctggcacctacaagttcattcacagttccttctcactgacttcaccagtgaccactatcagtgacttcaagggagaaatgaggggggagataaaataaagtgaatggggaagaaataaagaagagaggtcttttcacagtttgccagaatagtcccttcagtggttttaccccagggcaacaggggcccccttttagtttctttctcttttaattttcttttcccttcccactttttgcccactttttgccttatttgtgtcttactcaatgttcatctctttctctacttcttcattcccagatttggctgtagaaaattagaaagttcttgaacttggtttgcacgggtgcttttactttaacatgaaaatgaatgatcagcctccttctaattttatcctagagtctactgcatccctcctaccccctgcacaggaatttagtcacacttatctctcccactttctctcccttcttcactttctctattgctcctcctttcatgcctgtacctggttttccatgccctgtttagcctggcttgggatccagcaggttctccaagggttcctgcaagaaccccggctgggtgcccaggtctgagcctggtatgtgcctcagtatcacaaaggcctcctgtaaatgacatccattgttggaagtttcagaaattctaggtcaaaatggcactgaaatattaatgtatttactccaacccaagcaacttttctaaaagttgtagagagtgtgacctctttattaattgaaacgtgaaaatcagctctagtttggaagctgagaaaaaaaatatatatatatgtatttatttctttgttgtttgaattcttaatataaatggtttaaaggaccattgaaaactgcatgcaatcacagaaggttttggcttcaggcagctcccgccatgatcttgggaccccattgattctttcatctttcaggcgtcttactgtttgaaccttgaattttaacctgggacatgtttgactaaaatgatgctgttaatattttctgttgtgcaaaacacaaagagaactaggctccagggttgtttctatttgctaatgctgtttctgttgacttttgacttttctagtttcccagagctatggggacttcccatccggcgttcctggtcttaagctgtcttctcacaggtacggagcccagtcctctctgagttccttgtttgggtgtctcgtttttttaagctttgtgctgcatgggtttattaccagtactctgcatacacagtccaaaagagtgaaaagaaatagaaaactataggacgttatccagaatgaccacaaaccttcagttccctttgctgtatcgcacttactccatttcaaaaggaatgctctccagtggcagttttagtacatatataatgttggcattgaaatgttgttagtaataatgtctaaatttacttactactctcttccttttcctaggacaaggcttctattagagctggattagataaattcaggaatggtcagctgtgggaggtggcacatctgttgtcccagccccttgagcagctgaggtgggatgatcccttaaggccaggagttcaatgttgcagtgcactgtgattatgcctgtgactagccaccacactccagcaacatagcaagacctcatttaaaaaaaaatgttcaaaggaaataaataatagaaaattcttgcccaagaaatcatacttgtcttaaatcataactctcttgaggaaagatgcttacattgcttccaaatctcagagtcacctttatcttctctaggaatcaaattgatagatgaatgtttggctcttggaaaatcttaaaaactttcccaccaaaaggatcattggggtaatttgttgaagtgtgtattggactgtcttagttttcctccagatatttatgcactgcagatgttcgccatgaaaccagtgctcttctattctgaggagttagctcagcccgttagtgtctttgtcttacccatttggatatggtagaattgagcaagaccagagattcaacagttctaagctccactaagtataccccatctacagagtaataggtgatccagatgtacttacaaatcctatcttaacaagctttaggaattatagtggtcatatactgaagttgggtgggaatctcacaccaggttccaagggagattacaaatcattaattaataattaagtcataatatctcttctatcagtctcgggtttcttgttttctaagttctgtgctccatgggtttattatctgtactctgcttacacagtccaaaagagtgaaaagaaatagaaaactacaggacattatccagaatgaccacaaaccttcagttcctttgctgcattgcacttactctattgcaaaaggagtaagtgcaatttcagtctaaataagtgagactgaaatttgagcttcaaagatgaacttagagttttcactcttgggttttacttaccaattgtgaattaaaatccatatcatctggcaccactgcactccagcctgggtgacagagcaagactccatctcataaaaataaataaataaataaacaaataaatccacatcatcctgctttggccctggaagtcatgagggagagacggcatgcccgagggctataagaaatgaagatgtggaattcttgagcacagatgtgctttgtgttttgttcagtctgtatccttgcctccattctcattccatggggggttttttttttttttttttttttttttgagacagggtctctcgctctattgcccaggttggagtgcagaggctcactgcaacctcaatcccctgggctccagtgatcctcccacctcagcctctggagtagctaggactacaggtatacaccagcacacctggctaatttttttatttttttattttttgtggagaccaggtctcactacgttgcccaggctggtctcgaactcctgagctcaagcaatcttcccacttccacctcacaaagtgctgggattatagacatgagcctctgcgccccagcctcatctcattttaactaaaggaaacctttgcagtgattgtgaaccataaagaacccatatgtgcttgagcccgtgccatcttgggatattttatggttacacataagagtctgaaatatggaattggaatcagacatcctctgtctatttgagtgtttggaggggtgaatctagtggggcttggtggagctatttggaacatttgctgctctcagcagatgcagtggctgttataatgggggagctttcatgggcatccaggctaacggatttttgtgtagaaatggtcattgttcatctaagctgctactgttgcttctctcagttatcgggatgagactgtcctttctgactgcatcctattcagagcgtgcttccttttgcagggctgagcctaatcctctgccagctttcattaccctctatccttccaaatgaaaatgaaaaggttgtgcagctgaattcatccttttctctgagatgctttggggagagtgaagtgagctggcagtaccccatgtctgaagaagagagctccgatgtggaaatcagaaatgaagaaaacaacagcggcctttttgtgacggtcttggaagtgagcagtgcctcggcggcccacacagggttgtacacttgctattacaaccacactcagacagaagagaatgagcttgaaggcaggcacatttacatctatgtgccaggtgagttggctgggtccccaggaccaagcttcttctcttcctgtccttcctgttaaatgtactaaggttttaaacatatatataaataattaatatttattgtgggaagtttgaaaaatgtaagtgaacacacacaaaaatcatttgtaatattatcaagaaatattcattgttagcatttcagagctgtattaagtttggaaagtcatctttgttatgacatgtcctgtattgatactgtataaacaatctgaaatatactcatctctattcagttcattcaagttgcacacatactcacagtgtgtccagcactgggctaagtgttgaatacacaaaaattaataggtaagccctgtcttggagttgctgatagttcattataatatcttccaaataaacactcgatttttcagattcactatcaacatacatttattcttggagagttggaagaaattttctttttccttttaaaaaagttacatatatatatatatatatatatatttttttttggtaacagggtctcactctgttgcccaggctggagtggcataatcatcatagcttactgcaatctcaactcccttggttcaagcgattctcccacttcagcctccccagtagctgggattacaggcacgcaccaccacgcccagctaatttttatattagttgagacaggggtttcaccatattgaccaggctggtcttgaactcctgaccttaagtgatctgcctgcttcggcctcccaaaatgctgggattacaggcatgagccactgtgcctgaatttttatttttatttttgtagagatagggtttcactgtgttgcccaggctggtctcaaactcctgggctcaagtgatccacacccacctcagcttcccaaagttctgggattacaggcacgagccactgggcctggcctactcctgcattttaattaaaaggacaaaagggtcgagcacaagtgatggcaatttcagtatgcagttgggtaaattaaaaaggactatggctagaatccttggttttagaacaaaacctaaactgtttatgattcttgccatccttgctgttttggcataggtgtgtcttcctacctttctgccttttctttttcagtttttaatgggctcctcttcctaccctctataactacgagtgtccccagggatctagaccctctttactttttcatgatactcttattcatatgaaccttccttcttaacaattaaaaaaaaacaaaaactttgttttgaaaagggaaggtatttagaatgtcactccaacttcattcacacttagattccttcaggaaaatcctataggtgtggagggattttcccctgctgtgaagagaatggtaggaacgtgaatgtgttaaaggcacacgagtccctgaagttttaatccgtgtaagattgtccaaaaattcttcttgttccagcacagacgccatccaagtagcccctgcatcgctgtctgactgagatctttttattcgcgatcatggagacttaggggccctttctgcagctgatgtttgagactcttagaacttcttaccaccgtagcttaagtagctgtttttcttttggaaaggaaattctcaggctccttctccttctttaaattttatgtatatctcaaaggattactttttaataaacagatttctatgctatttttgaatcatactgactataggtgataagagtttttaaaagcatttcataataaaactagaaatattttttcctgttttaaacagagttggactgtattattttattgttaatttttgtttttagttgtttaaattttgatttagattcctggttagtatttatttatttatttgtagagacagggtctctctatgttgcccaggcaggtctcaaactcctgaacacaagcaaccctcccaccttggcttcccaaagtgctgggattacaggcatgagccacaactcctgtccagtattgatatttatcatcagtattatccatcaggagacaggcaatttggtattattcatacttaaaaatcactttgtagctgtcatgataactaatgccagtggggcaattcttctggatatatgtgtaaaggtgaacttcatacctaatatcaataatgccagtgggatagtttttctggatttatgtgtaaaggtgaaattaatgtctaatagagtcttcattcttttttaaaccacagacccagatgtagcctttgtacctctaggaatgacggattatttagtcatcgtggaggatgatgattctgccattataccttgtcgcacaactgatcccgagactcctgtaaccttacacaacagtgagggggtggtacctgcctcctacaacagcagacagggctttaatgggaccttcactgtagggccctatatctgtgaggccaccgtcaaaggaaagaagttccagaccatcccatttaacgtttatgctttaaaaggtacttgtatcatctccttccttctttaaataagaataacaggcaaaatcatcaggtgcatgtaggatttttttttttttttttaaatcatcatcactggtgatcctaaattctgatttggggatttaggaccccagctaatacaatgtctgtggctataataataagcttaaaattactaaaggccaaagcttgattacccatgcaagatttcatgtttcatcagttgacttcaaaatactgtaaggaattcttttcttacataagcctcttactttcattcacattcctggctatggcggccctaaaaacaaacatacacccagggggttagatgcctagattaattttagtaacttaagaaaagtgatttgaagaaagtagtttagacttcaaccctttgatgtccacagttagtatgcttggggaagtataatacatgctgaggtcaacagatatttcctgaacactatattacatggaggaatgggtagcagcaagagtacactgttttaaaatcagagcacagctaattttgtgccaggcactgtgctaggttctgggaaagtactgagaataactgaggagcagagtggaagagaagaagagaagaaacaattggatagaaacaaagtgtctagagcagtgtggatcagcaaatgttggttgattaaatgaataaatttattagtcaaggagattgtggacgagtataaccataactaacccactgctgaggaatgcggtgttctgtttgattggaatttatttttattgttattattttgtaattctgtattataactatatgcctaattgttgtacaccatctcacaatcaagccttgtgagattttccaaattttatcttgatcaaactggtttgcaaattatttttcagggttttcttaaaaaaaaaaaaaacacccaaactttataagatcctggctatcctgtggatttttaggcccttgtatttgttcttttttatagcaacatcagagctggatctagaaatggaagctcttaaaaccgtgtataagtcaggggaaacgattgtggtcacctgtgctgtttttaacaatgaggtggttgaccttcaatggacttaccctggagaagtggtaggtaccctcaaaacgtgcaatggcttggagcagagcagcagggctcagaagacctgcatttgagctcggtctgtcactgatgggcacatcactgagtttctctagaccttagcttcccacctctgtgatgaacacatttgattaaatggcctttaggactccttgatcaatgggagagtttgaaatgatagttcctggaccaggcccttcagaatacataaagagtgtgcagtaagccttctttttcagaagtcagacagaaataggaaggttctctggctacaagatatcaaccaaaaaattagaagagcaaaaaaaccactggattttactattgcggagacagtgattgattctcatcgtcttggcctctgtgccctgaggtttgattcatctgatagtgttgattgcccgcaccccttcctcttctgccttgttggcacccaggacaatgtgtcttcctgttccacctcctatgtgcctgacctttgcatggcccaccttcagtgaacagttatgatgtaatcattcagcaaaggtttaatgaagtttgctcaatcccaagcactgtaccagaagctggttcagtattgcaggaagaagggaggaagggagatggaagtggggaaggggagccaccatgctgcctcttggtcactgaagatttacacagagtctcagtcattctaatgcattgtcactaagtgtgtaagacagccatgtgtaagaggctatgaatgcccaaatgcaggaatgactaatattcttatggagaacaaaaacgagatatatatatttcttccctccactcctgacttgtaaatttctgctccctgttcttttaggcatttgacagctttctgtccttctatccattgatccccctccttttatccgtttctctctcccatgcatttgccgctgcttttcgtttgtcctggggcgtctgataggaagttgggcattttcactattgcctcacaaacttcacacagtgaagggacatttacagtccaacaaatgtacatcttccctgaaatatgaagtgatttggttcttctgttcatacttgattgactttaatccttaacacataaacactgctttttatttataggagacagcaatttttttttccaaaccaaagtacatgctatttggcttacaaatatataatcaaagtattgtttcatacagtatgttttttccgattataaaagtaatgcaggtttattgcagaaactttgtaaaatatggagagacaaaggaagggctacttcccagagcatcactgtttatattttagggagataaagcttttatttttcatttgtatttctttcttttttttttcttttttctttttgttgtggagatgaggatctcactacattgcccaggctggtctcgaactcctgggcttaagtgatcctcccaccttggcctttcaaagtgttgggattacacatgtgagcctctgagcttgactgagataaagctcttaagtatttcttatccatagataaacattgaataataggtattattctttaaatggtaatttattacattctttatccttcagcagtatagcacaaacaccttatatgtgtcattaactgtccttttaaaaaatgggctgggtgtggtggctcatgcctgtaatcccagtactttgggaggctgaggcaggagagtcacttgaggccaggagtttgagatcagcctgggcaatgtatcaagactccgtctctacaaaaatttttaaaaattagccaggtgtggtggcatgagcctgtagcctcagctactcaggagactgaggtgggaggatcacttgaacccaggaggttggggctgcagtgagccatgattgtgccactgcactccagcctgggcagcagagtgagattctgtctctaaaaaaattaaaaacaaaataaaaaatctcatgattttctaagcagctagcttttattctttaggttttatcttttagagcagttttaggtttacagcaaaattgagaggtacaaagatttcccgtgtgttccctacacccacacattgcatagcctcccaccttgtcaacatccctaccatccatttgttataactgctgaacctccattgacacatccatatcatccagagtccatagtttatcttagagttcactcctaggagcgagctttttaaaagtcggttttcttccccttttgctgtagaaaggcaaaggcatcacaatgctggaagaaatcaaagtcccatccatcaaattggtgtacactttgacggtccccgaggccacggtgaaagacagtggagattacgaatgtgctgcccgccaggctaccagggaggtcaaagaaatgaagaaagtcactatttctgtccatggtacattccgctttctaaaatgtcagttgtccatgctgcttgggatccatatgtggtaatcattatttaatggaaactcttccctgtacagagaaagggttcattgaaatcaaacccaccttcagccagttggaagctgtcaacctgcatgaagtcaaacattttgttgtagaggtgcgggcctacccacctcccaggatatcctggctgaaaaacaatctgactctgattgaaaatctcactgagatcaccactgatgtggaaaagattcaggaaataaggtaaagaaattctctgcccaagtatgcctttttttagtgtgcatcagaggcagactgaggtttgtgtgtgtcttacaacccagacccaaagtcagtctagaaaatgtaacaatctgagttaagagatgcttgaaatcacatccctttgatgataacattgcaaagtggtattagtatgctggtaagtatttaatgagaagatgagaagaaagaactaaaagctctggcccctggggaaagacaggtcactggattcagctagggtggaagaaaggaagtaaaattggactcaccaggattgaatagattgaatatattccctgatgttcatcatccatatcgcaagtagacaggtatggtgattacacccatgaggcagttatcacatcaccttatgtgaaagttaacgtcataggcttaatctggaacccatttgccctaattgaggactccacaggaaagaagagtagagcctggctaactttaatcaggagagagatatgcagtgagttgcttggatccctaccttttaatcagaatggtagattgctctcatctcttaactggtggtggagttttgaatgagtcacccctcagccacagtttcctcatctacagtgtaggataaacaataccttatgtccttcaaggcaaggaattggatcagatgatatcatgaggcctcttaaggttttaagctgtgattagaacccaagagtcagaaggtacgtctcacagcacccagctaaccagccctatacttttgtcagaaatcatctcagaaagacaaagtcagtcctgtatttcaagccttcaggaggaagaacagagcctttctcatcagttccattcacctcaggatttgctttcttctttgtgaactaaattccacgtgtaattgagaagcaatgtctgagaaaatggaattttacaacctctatagaatagtaaaggaaaaatgaagtgggatactgaatctggaaggctttctgttgacacaaaatgaaggtgtacaacaaggagggcagctttccatgaggaacttccatgaggctgtgcagccagagaggaatagggtaacaaccctggtacagctaacacctccaacacgtgtgtgagcactgtctgcaagccataatccatagcagtggcaggacaggcttgccaactgagtggttctggaaagctgccttttccttttagtgattcaaggatgcttcaacgtggattttttagttcctgttatgagccagtgaatacaaagatgaacatggtagatgggggatctggcttcctggagcttaaaactccaggatgggggatctggctttcctggaggaagaaaaccagtggttttcttggccgaagaagtgtagagaacaaacagcagaggataatttggtaatcagcatcccagtgtgccccaggggactctcttaaggaaatccagtcgtggagcacacccagtatggtccagcctgctctcttcgtaggtctgagtgcccaagtatttgcaaagtgttgtggagcctatgaaatgctttcacacatacaatctcctttaattaactctcacaatgactctgcgctatgtgtacaattatcacgttttacacacaaggaaactgaggcatggagcattgtaataataatgcctgagatcttctcactccatgaccagtgctttccttctccattccagttgctttttcaactgtgatgatttataaaggacaatcaaatggcacatactatatttacgcacatacatacacccacacacacacatcaccaacgaccagatgtcatttataatccatgtaaaatatttttggggaaatttctcnnnnnnnnnnnnnnnnnnnnnnnnnnnnnnnnnnnnnnnnnnnnnnnnnnnnnnnnnnnnnnnnnnnnnnnnnnnnnnnnnnnnnnnnnnnnnnnnnnnnnnnnnnnnnnnnnnnnnnnnnnnnnnnnnnnnnnnnnnnnnnnnnnnnnnnnnnnnnnnnnnnnnnnnnnnnnnnnnnnnnnnnnnnnnnnnnnnnnnnnnnnnnnnnnnnnnnnnnnnnnnnnnnnnnnnnnnnnnnnnnnnnnnnnnnnnnnnnnnnnnnnnnnnnnnnnnnnnnnnnnnnnnnnnnnnnnnnnnnnnnnnnnnnnnnnnnnnnnnnnnnnnnnnnnnnnnnnnnnnnnnnnnnnnnnnnnnnnnnnnnnnnnnnnnnnnnnnnnnnnnnnnnnnnnnnnnnnnnnnnnnnnnnnnnnnnnnnnnnnnnnnnnnnnnnnnnnnnnnnnnnnnnnnnnnnnnnnnnnnnnnnnnnnnnnnnnnnnnnnnnnnnnnnnnnnnnnnnnnnnnnnnnnnnnnnnnnnnnnnnnnnnnnnnnnnnnnnnnnnnnnnnnnnnnnnnnnnnnnnnnnnnnnnnnnnnnnnnnnnnnnnnnnnnnnnnnnnnnnnnnnnnnnnnnnnnnnnnnnnnnnnnnnnnnnnnnnnnnnnnnnnnnnnnnnnnnnnnnnnnnnnnnnnnnnnnnnnnnnnnnnnnnnnnnnnnnnnnnnnnnnnnnnnnnnnnnnnnnnnnnnnnnnnnnnnnnnnnnnnnnnnnnnnnnnnnnnnnnnnnnnnnnnnnnnnnnnnnnnnnnnnnnnnnnnnnnnnnnnnnnnnnnnnnnnnnnnnnnnnnnnnnnnnnnnnnnnnnnnnnnnnnnnnnnnnnnnnnnnnnnnnnnnnnnnnnnnnnnnnnnnnnnnnnnnnnnnnnnnnnnnnnnnnnnnnnnnnnnnnnnnnnnnnnnnnnnnnnnnnnnnnnnnnnnnnnnnnnnnnnnnnnnnnnnnnnnnnnnnnnnnnnnnnnnnnnnnnnnnnnnnnnnnnnnnnnnnnnnnnnnnnnnnnnnnnnnnnnnnnnnnnnnnnnnnnnnnnnnnnnnnnnnnnnnnnnnnnnnnnnnnnnnnnnnnnnnnnnnnnnnnnnnnnnnnnnnnnnnnnnnnnnnnnnnnnnnnnnnnnnnnnnnnnnnnnnnnnnnnnnnnnnnnnnnnnnnnnnnnnnnnnnnnnnnnnnnnnnnnnnnnnnnnnnnnnnnnnnnnnnnnnnnnnnnnnnnnnnnnnnnnnnnnnnnnnnnnnnnnnnnnnnnnnnnnnnnnnnnnnnnnnnnnnnnnnnnnnnnnnnnnnnnnnnnnnnnnnnnnnnnnnnnnnnnnnnnnnnnnnnnnnnnnnnnnnnnnnnnnnnnnnnnnnnnnnnnnnnnnnnnnnnnnnnnnnnnnnnnnnnnnnnnnnnnnnnnnnnnnnnnnnnnnnnnnnnnnnnnnnnnnnnnnnnnnnnnnnnnnnnnnnnnnnnnnnnnnnnnnnnnnnnnnnnnnnnnnnnnnnnnnnnnnnnnnnnnnnnnnnnnnnnnnnnnnnnnnnnnnnnnnnnnnnnnnnnnnnnnnnnnnnnnnnnnnnnnnnnccccccccccctcccctccctttcccttcccatttttcttctcaccatgttgcccaggcttgcctcaaactcctgggctcaagtgtttctcttccacctcagcctcccaagtagctggagctacatgtgtgaggcatcacaaccatggacttttcactttcttcactccaggttaaaaacatcacagggataaatctcaaaacaccaaaactgtgaaaatgctgctaaccatgtgggtctgtctaaaccggagtgttacttgtacaactggtttcagccccaccggagtgttacttttacaactggtttcagcccctccggagtgttttcaatgccatgtagatgagttgtgaactcatattccactttgtagtctcacatgttctgggacacgaactattccattctgacttctttctgcctcttgcagttccttcatccattctggacttggtcgatgatcaccacggctcaactgggggacagacggtgaggtgcacagctgaaggcacgccgcttcctgatattgagtggatgatatgcaaggatattaagaagtatggaaaacagatgtgtcttcttctttcgtggtcagaatctttctcccttgacacaaatgatgtcaaatacattttacttattgactataagatagggttttgggtgtgatagcttcagggtgtgtatcttttgtcatgaatagctgtgagaagaaggtccagggctctcattagaccttcaaaatgtctccaatctaaaaacaagagtgaattttaagaaccactgttctaagaagatttttactaccctggctcacatatcttatttggtgaactttgtttggtagtcggactgcatgtaaacataaatgtgactgcttagtcccttatctgcccacctgctgtttggtgggttaattcgccattccctcctccctccccccagtcctcagccttcttaaatgggcacatgagcaatgtgtttacacttcatccatggtaactggttgtgttcagaagcctcagttgtttcttcctctagacagagactcctcatcttaacttctcctagggctaagaacagacttggatgttgactggagtttctagtagattccagtgtggagcaggaatctaggtcttataactcaatctgaggatcatcgcaaccctagtgacaccttaggggctcttcccagtgtgagtgttgagaagggagggctccaggcctttttgaaggggtgagagatcgagatcattaaatatggttgaagttgaactgttcagtttgctcataggttcaagactggggaatggtagtcatattttattaaacttgtttatctctgcctgctatgtaaacacttagccttcagttgttcatgtgtgagttattccctcttcagcacatgcagacaagttttaatgttcatctgcatgtaaaataaatcagtgtgtattgccccgaaatgcagacaaggtcccaactccttgccatcttagagtgttcccgtggctccactcattgccatgactctcaggaattggccctatacttaggccctttttctttctagatgtaataatgaaacttcctggacgattttggccaacaatgtctcaaacatcatcacggagatccacccccgagacaggagtaccgtggagggccgtgtgactttcgccaaagtggaggagaccatcgcggtgcgatgcctggctaagaatctccttggagctgagaaccgagagctgaagctggtggctcccagtgagttcctcaacagtcaggacaactcatcagctgagccgcatctcccccaggcggaactttgaatcccagatagaggtcatatagaaatgaaggtcccaaggcagaaattcagttatgaatgctcttaaaggcatgtgggactttgttttattttgttttgttttttgagacagagttttgctctgtggcccaggctggagtgcaatggcacaatattggctcactgcaacctctacctgggactttgttttagattcagatccaaaactgcatttttgcagaggcccctcaacattttgcttgtctaataatatagctacagtctctactttgaatgtctgtgtatgtggatggagagtggggaaggatcttctgtctcattgctccttaaaagatagatgaagccaaaagcaatataagcaaaatgcaacttacaaaataagctttattttttatttatttatttatttttgaatttttatttatttatttatttttattgatcattcttgggtgtttctcgcagagggggatttggcagggtcataggacaatagtggagggaaggtcagcagataaactggtgaacaaaggtctctggttttcctaggcagaggaccctgcggccttccgcagtgtttgtgtccctgggtacttgagattagggagtggtgatgactcttaaccagcatgctgccttcgagcatctgtttaacaaagcacatcttgcaccgcccttaatccatttaaccctgagtggacacagcacatgtttcagagagcacagggttgggggtaaggtcacagatcaacaggataagaatttttcttagtacagaacaaaatgaaaagtctcccatgtctacctctttctacacagacacggcaaccatccgatttcgcaatattttccccacctttcccccctttctattccacaaaaccgccattgtcatcatggcctgttctcaatgagctgctgggtacacctctcagacggggtggtgcccgggcagaggggctcctcacttcccagtagaggcggccgggcagaggcgcccctcacctcctgggcggggtggctggccaggcgggggctgccccccccacctccctcccggacggggcagctggccgggcagaggggctcctcacttcccagtaggggcggccgggcagaggggcccctcacctcccagacggggcggctggctgggcggggggctgacccccccacatccctcccggacggggcggctggccgggcggggggctgacacccccacctccctcnnnnnnnnnnnnnnnnnnnnnnnnnnnnnnnnnnnnnnnnnnnnnnnnnnnnnnnnnnnnnnnnnnnnnnnnnnnnnnnnnnnnnnnnnnnnnnnnnnnnnnnnnnnnnnnnnnnnnnnnnnnnnnnnnnnnnnnnnnnnnnnnnnnnnnnnnnnnnnnnnnnnnnnnnnnnnnnnnnnnnnnnnnnnnnnnnnnnnnnnnnnnnnnnnnnnnnnnnnnnnnnnnnnnnnnnnnnnnnnnnnnnnnnnnnnnnnnnnnnnnnnnnnnnnnnnnnnnnnnnnnnnnnnnnnnnnnnnnnnnnnnnnnnnnnnnnnnnnnnnnnnnnnnnnnnnnnnnnnnnnnnnnnnnnnnnnnnnnnnnnnnnnnnnnnnnnnnnnnnnnnnnnnnnnnnnnnnnnnnnnnnnnnnnnnnnnnnnnnnnnnnnnnnnnnnnnnnnnnnnnnnnnnnnnnnnnnnnnnnnnnnnnnnnnnnnnnnnnnnnnnnnnnnnnnnnnnnnnnnnnnnnnnnnnnnnnnnnnnnnnnnnnnnnnnnnnnnnnnnnnnnnnnnnnnnnnnnnnnnnnnnnnnnnnnnnnnnnnnnnnnnnnnnnnnnnnnnnnnnnnnnnnnnnnnnnnnnnnnnnnnnnnnnnnnnnnnnnnnnnnnnnnnnnnnnnnnnnnnnnnnnnnnnnnnnnnnnnnnnnnnnnnnnnnnnnnnnnnnnnnnnnnnnnnnnnnnnnnnnnnnnnnnnnnnnnnnnnnnnnnnnnnnnnnnnnnnnnnnnnnnnnnnnnnnnnnnnnnnnnnnnnnngattcaccagtcaggcgtggcggcgcgcgcctgcaatcgcagggacttggcaggctgaggcaggagaatcaggcagggaggttgcagtgagccgagatggcagcagtacagtccagcttcggctcggcatcagagggagaccgtggaaacagagggagagggagaccatggggagagggagagggagagggagagggagagggggagggggagggggagggagagggagagggagagggagagggaataagctttataataaagcatatgaagtagaggtgtctgcccatatagtagctgtcaattgcatttatcctattcaaattctgtccacaaggttactgttggagcaactttggagaaaatactgagttctcctgattgaattttgtcctcttcttgtataaggaaagagttgatgtagtttcctgggtgtagatggtttgagagatggtactgcctatccctaaaatgaaccaggcagccctcacacttccccaccagcagtgagagattcctggctcagacacagccacactaccttgctgcccctatgcatgtctgccaggaaacttttcattgtgcctctctctcttgtcacgtagccctgcgttctgaactcacggtggctgctgcagtcctggtgctgttggtgattgtgatcatctcacttattgtcctggttgtcatttggaaacaggtagatattttcttataaaactaaagatctttgaagccaatgataacaagcatagcaacctagttcagtgcttggcacagagaaggagctcagcaattacatgtggagtgaacgttgttggactctactgtgtccagtcactgtgctgcttcagtgaagctctggtgcactgggactttggtaattcaccagttacccgtcctggtcatttatagaaaccgaggtatgaaattcgctggagggtcattgaatcaatcagcccggatggacatgaatatatttatgtggacccgatgcagctgccttatgactcaagatgggagtttccaagagatggactagtgcttggtaagttccatggggtgacctcccaagactcccttttcccttgcacacaactttacaatttataggccttggcagaatagagatctgagcttgtgcttagtaagaactaggcaatggaaatttactttcagaaatacatttctgtcttgacaataagttaattggatcattgcaatgatttttttaaatctctttccataacaaattatagttaaggaaaattttacaaagggagaagagaatatgaagagggctggcaaagatacccaccaaaattgcttttctttagaaatgacacattgaaaatgaatttctgtgactaaaaatgagcagatgagaaatgaatgaggacaaccacaaaatgtattttgattcagtacattctgaagatgcattagatactcctttttacatatttggaatatggaatataaaaatataggtacattttaaggcaaaatatgtaaaaataagcaagccaacttatcacaagcatttcaagtatttcagtcctgggctgagaccaagtatatgaagctttagtccaagggagtatttcttttttaaatcacattcctaatgaatgaaagcaagacaaaggcaaatgaaagtagaggtagaggttgtgttatgatgaatgatctaacagtatatatgttaaagaatgccaaatgcaggttttaattatccaccagtctcattgcaaaatacagaagagtttaagtcttcttagagagttaggtaaactgaaatcaagcaaggcaccagagtgaaatcaccttcgcaaaaattgtaactgaggaaattatgacagtgaatgagatatgacctaaccaactccattttgctttagcctccaagttgtccttgttccttcctgggcataggccgaactaactttgagaggaacttagtttatagtttgactttgaaaaaaaagacaataatagccctttgccaaaacaaaccctctttttgcctgggaactagactgcctttgcgggactaacgaattagctacaagattagaaagtatggtttaggggtcactgttgtaaaacctgaggtcagtgcttgagatattttggagaccctgtatttcgattcgccagctgacgccacccaggtcaataaactggctcatctgatcttgtggcccctacctaggaactgactcagtgcaagaggacagcatcagctccctatgatttcatctttgacccaaccaatcagcactccccatttcaccccctacccaccaaatcatccttaaaaaccccattcccccagtttcagagacactgatttgagtaatagcagaatagtagaaattcccccagtttcagagacactgattcgagtaatagtggtaatagtagaataggtctcccgtacagctggctctgtgtgaattaaaccctttttctattgcaattcccctgtcttgataaatcggctctgtctaggcagcgggcaaggagaatccatggggcggttataagagctgccccccaatttcaaatatttatatctaagctttctttattttcctgcctatttcccaaaaagggatgaggagcttagggaggtaaaaagtagtaaaatatggggaagagggcataattcccattataccaagaggcattgctggtgaagcaatacctttccaggtacgattttcagtaacatagacgtgcagtaagaggcagtgttggctgttagtgtcttttatgagccaagtcttttcctggcttggctatccgtggtgagactgacaccccgggaaatgtttctctcagggtgagctctttcagggtgggacaacagcttcagtgtctttacgtatgtctcctcccaacatgaagctaattgctgtgctctcgggcatgtttagctcttggtagagtggctttcctaacaaatagggagcagtgagcccagcctgaagtttttatttagtcactccttggaatcagtgatattttgaatactgaagtatttccggtggctagtaatttactaagacaaaagatgcccctgtttgcatatggaaaacagaaggggagagacccagggggtgtgggtgagagcccccgaagccagaggatcccaggggctggcccagcatggagctggtagacagcgcactcacaccagggagggctgcaccctcctttctcccgtctgtgttttctttcccttgcaactgttattcgacaaaagcaattatgctaatttccttccctgtgggctcaattccgtttttgacacgatgacttggagaagtcattatgattactccaaacaggaaagacacccgcccagctgtccacccgcagagagctggctacggtgcagaaagctgaggaggcgtctggagtttttgggtgttaatgattctgcctgcccacaggtcgggtcttggggtctggagcgtttgggaaggtggttgaaggaacagcctatggattaagccggtcccaacctgtcatgaaagttgcagtgaagatgctaaaacgtaagtgctccttcctggggattttttgagcatggggattttttgagcatggggatattaagggaatttctcaaaatcatgcagctagtaaataagacatttaggactaggtcgtgattattttgactccaggttttatgtgtatttagattaggtttatttagattgctcttgctgcctgtatgttggaaaattaagagcttgttatttccagtgacttctttttactagaaagaccaggaattagttattagcactgaggccaagtaactatctgcttcttttagacttctggtaaatagaatgatatccaatcacaggattagtcatattcttggtttttttctgagaacaggaagttggtagctcagctggactgatatgtgatttattctttcaacagccacggccagatccagtgaaaaacaagctctcatgtctgaactgaagataatgactcacctggggccacatttgaacattgtaaacttgctgggagcctgcaccaagtcaggtgggctcactgacctggagtgaggattttcactggacacatgtggttgtgaaaactgttcaatcaggcttaaatcctccactctccatccccacacatggcagggaatagaagtcccttgaatggagctgactggtcccttgaatggatggaagctcattgttttttgagcaaaatctgttgccagtccagtcatagccgttcatggctctttataaaaaaaaaaaaacaacaacaaaaaaaaccttttttggtatcttatttttttctgcaccatatggtctgcaggacaattcatggcttttctgttcttcattttcatacccatctcctaacggcttttgtccccataggccccatttacatcatcacagagtattgcttctatggagatttggtcaactatttgcataagaatagggatagcttcctgagccaccacccagagaagccaaagaaagagctggatatctttggattgaaccctgctgatgaaagcacacggaggtgggtgcaaagagagatgttgctgtctatcattatcttacaggcatcacaaatggaaagacccatgtcctgatagatatcatgtctgcagattcagtgcccaaggtagcaagacttagagtcaaaccaccctgtccagtctttccatggtcatgcagagagatgcatgatgtctaaaggtgttttggactggggtgtcacatgggaaggccttgctgataggtttgaatgagagtgagttagaatgactctgggagctcttctgctatttacatgtgatccacttagacctataaaatgcagctctggccagggatgcttgagttctggaaccttgcgagaactgtctgtggatctccaagctcgaggtccttgctgaacctggacctataaatgacgtcaatgatagtgatccctactgcagaaatctacaagtggctataaagaactctgtaggtaagaaattctgtaagatcagaaagtacaatgaattcacttcttaataaattacttggtggacaccaaatgggtgctaaattgattgggtagaaggaattgtatgcccaagccacatggccacacggctcaagttccaaccaaggcttgtgagttgaaaaactgagaaagaataatgacagacttaatgtagtgaattcttcaaactttaagtgtaatggacttacaggtccatgggagcacagccccactgtcttagatgtggctcttcaggatgtgcgggctcctgctaaagatgtgcagggaactggctctgaaaacaagtgaacagtagtcatcatggcagctgacatttgtggagtcctttgtatgtgccaggtgccatgacaaatattccgctagtctttcccatctttgtcagtgggattcattctacatcttctgaaaagtgcttccttgacccccagatcaagtcattttccttacaagctattgaaatctttcttccttcacagcgcagctgagtttgatttgatctgtgtatttattttgtttgttttttacatttctttttttccctatttaaaaaatttttttatttccataggtttttggggaacaagtggtatttggttacatgagtaaattctttagtggtgatttgtgagattttggtgcacccatcactggagcagtatacactgaacccagtttgtagtcttttatccctcacctgcctctcaatttttccccctgagtccccaagtccattgtgtcattcttatgcctttgcatcctcatagcttagctctcacttatgagtgagaacgtacgatgtttggtttccatttctgagttacttcacttagaataatagtctctaatcccatccaggttgctgtgaaagccattaattcattcctttttatagctgagttttttatatatatatatatgcatacctacacatacatatgtatagatacactgcagtttctttatccactccttgattgatgggcatttggggttggttccacattttttcaatatgtgaattgtgctgctataaacgtgtgtgcaagtatctttttcgtatgacttcctttcctctggtagatacccagtagtggaattgctgtgatgcatgtatttgtgtgactatttgattaatgctcatttccttgactagatcacctcatgtgaaaggtgtggattggttttgcttttacccagttagctcccatgcctacctcagtacctggcacattgtaggtcccccaaaatcatcatctactgaaagtggaatgaccacttcagaagggcaccctgggtaagatttctctttctgtttttacagctatgttattttatcttttgaaaacaatggtgactacatggacatgaagcaggctgatactacacaatatgtccccatgctagaaaggaaagaggtttctaaatattccgacatccagagatcactctatgatcgtccagcctcatataagaagaaatctatgttaggtaaaagtgtctgtactcactctgggtgttgggactttccagtggtttaatatgatacttaaagtatttagagggaagtgtatagggatggtaagtgaacctggcagcccacgtggtctctaaatgcaggtctgcacaaccagttctgtgacatgtttccaggtttgtggcctataaattgagaagaataaaagctgacaatgtaacaaattttttaaactttaaatttaatagttttaaagaattttcttggtgtgttcctgcagtaaacattttttttaaaaaataattatttattctgatataatgaacttccttttttattgctgtctttttcttttttaatgaaaatatggtgattgattttttttaatgcccttacttggcagaattacaagttggctgtcttacgttggttcctcacattgctttttttcccttaagttttagaagtctctgatgtctatgagttcagtaacccttgcttttacttttcctaacattcaatttgtgataggaactctagagtagataatttgcagttatattttctggaccagtgtttctgttgaatgtattttgaaggtgggtctgtttttcaagtacattaatatgtggcagggttaaattgatttataaactccagggagtccagctgatgcccagaccagatggaccactcacatctgttcagggtggttcctccagagccctggactggtcacagacatgaagctggaagtctgacattggcttgtcctgtgagcttgcctttttgggtctgagccttcccattagtcaatgcaaaaaagtgttgagctgccctggacatagttttggaaattattgatgtgctctgaatgttttcaggttcttaagtgaaaggtacaatcgatttaaaaaagaatgtgtttgttttgcaaagctcagtacacaatattttccatttctgcggttccaagttccattcacttctcattgccaaatgggtgaacttccaagtgcttttaaaagattagccagtgagagttatcggaaccagtacttcctctcccctcccatattgttaaaaatagtttacattgcttcccaggctgggctggtggagttggcacgagatgtcagaggaacctgagtcatgctcaggcccaagccctgttggcaggcagaccactgctttctggccttccgtgactatctgaaaaaattgtgaatggctagagctactcttcccttgctgaacattttcaaaaagaattgagaacttctggattaaattgccttcttcctcgaaaaccctgggacccttccagatgggactaactggggaaagtggacaagttagaaacaaagaaactcaaagcaaagtcattggcactgatctctaagatgctatcacatgtgattggtggttgattttattaacaaattataagcaaagtactacaaaggtggctttaaaaagaaaataaagcaattcacagaaactactttttcatgtagcttgtatgtgtgctccatgtatttcatcatggaagattttagtgtgtgtttatgtgtatgtgtgttttaaaggtagctgagatgatttgctaattatggtcgaaaaaaagaaatttaggaggtaaacaaaataattatgtgtaagattggtccttgtggctgtgtgtgttttgtgtgtgcgtgtatgtctctgtgtgttttaggctgttcttttattgctataaataaatacttgagactgggtaatttataagggaaagaggtttaattagttcatgattctgcgggctttacaggaatcatgatactggtagatctgctcagtttctggggaggcctcatgaagccatgaagtcatggcagaaggcaaagcagtgcaggcacatcacatggccagagcaagagcaagcgagagagagaaagagagaggtgccacacacttctaaacagtcagatcttacaagaagtcacttactattgcgaggacagcaccagaaggatgatgctaaattgttcataagaaatctgtccccatgatccattcatctgccaccagtccccacctccaatactggagattacaattcaacatgagatttgggtggggacacatattcaaactatatcatattgaccctggaccctcccaaatctcatgtccttctcatatttcaaaatacaatcatccctccacaatagtcccctcaagccttaactcattccagcatcaactcaaagtccaaagtcttatctgacacaaggcaagtcccttccacctatgagcctgtaaaataaagaacaagttatttacttccaagatacaatggggttataggcaatgggtcaacattcccattcccaaagggagaaatcggccaaaagaaaggggctacaagccccacagaagttcagaacccagcagggctgaaaactccaaataaactccattgactccgtatcccatatccagagcacactgatgcaaggggtggagctcttgggaggggtggaacaccctgtggctttgcagggtttagcccctgcagctgctctcaggggctggtgtcgagtgcctgtggtttttccaggtgcagagtgcaggctgttggtggatatattattcatggaggatggtggccctcccctcgtagctccacgaggcagtgccccagtggagactctgtgtggggacttcaaccccacatttcgcctctgcaatgccctagtagaggttctctgtgagggctccactcctgcagcatgcttctgtctggacaccctggttttttaatatatcctccgaaatctaggcagaggctcccaagcctcaactcttacactctgtgcacccacaggctaacaccacatggaagcggccaaggtttatggctgtcacaagctgacgcaacagcccaagctgcacctgaactcctttgagccacggctggagctggagtcatagggatgcagggagcagtgtctcgaggctgcacagggcagtggaccctggggctggcccatgaaaccattcttccctcctaggcctctgggcctgtgatgggaggggctgccatgaaggtgtctgaaatgccttaaaggcctttttcccattgttttggcaatcagcctttgcctcctttttagttatgcaaatttctctagcaagtggttgcccagcagccctcttaaattctctcccaaaaaagcttttactttctctgtcacatggccaagctacaaattttccaaccttttatgctctgcttcccttttactttttttttttttttaaagagatggggtctcgctatgttgtccaggctagtttgaactcttggactcaagcaatcctctcacctcatcctcccaaagtgttgggattatagctgtgagccactgcgcccagcctctgcttctcttttaaatataagtttcaacttcaagtcatttctttgcttctgcatctgactgtaggctattggaagcagccaggccatatcgtgaacactttgctacttagaaatttcttccaccagatatcctaggtcatcactctcaagttcaaacttccacatattcctagggcatcgacataatgtggccaagttctttgctgaagcttaacaagggtgacctttactccagttcccaataagttcttcattttcatccgagaccttggcagcctggatttcattgtccgtatcattatcagcattttggtcacaagcatttaaccagtctctaagaagttccaaactttccttcatcttcctgtcttcttctgagccctccaaactcttcttatctctgcctgttacccagttatctttacagcaattccccattccttgataccaattttctctattaggctgtttttgcattgctataaagaaatacctgagactgagtaatttataaagaaaagaggtttcattggcacatggattctgcaggctatacaggcgtttgcttctggagaggcctcaggaagcttccaatcatggtggaaggtaaagggggagcaggcatatcacatggccagagcaggagcaagtgagagagagagagagagaggtgccatacagttttaaacaggcagatcttgcaagaagtcactcacttttgcaaggatagcaccaaggggatggtgctaaaccattcgtgagaaattcacccccatgatccagtcatctcccaccaggccccacctccagtactggggattacacttcaacatgagatttgggtggggacacatatccaaactatatcattgcgtgtgtgtgtgtaatttttaaaccagatatatgtttctgcatatctctttcctttctttcattcattctttctttcttttttttgagacagagtctcactctgtcacccaggctgcagtgcagtggtgtgatctcagctcactgcaactcattgcaacctcctcctccctggttcaagcaattcccctgcctcagcctcccgagtagctgggattacaagcacatgccaccatgcctggctaatttttttgtattattagtagagatagggtttcaccatgttggccagactggtctcaaacttctgacctcaggcaatccacccacctcggcctcccaaagtgctgggattataggcataagccaccatgcctggcctatacatctattttctaagatagaatctttgcatagtgatattcatctgtgagatctaaacattctacaaaaaaattaagaaaatatttttggatgcgttctttgggcatgcctctgcaacctgatgatttcctgctgcctgccagcaccaatacatttaatttcttttctgcagactcagaagtcaaaaacctcctttcagatgataactcagaaggccttactttattggatttgttgagcttcacctatcaagttgcccgaggaatggagtttttggcttcaaaaaatgtaagttcaaggaacacagacctttttagacccagatttcagtgagtggagtgtggaaggagatgctaggagatagatcttggaaaggccattaataacaggggcctcttacttacctgtctctctccttcatcccttacgcaggacagggagtctgaaatcatcaggcgtctactcttctctagagctttctctctgttgggagtgggtggagtgagaacctgggagaaggccagccctttatatccaggcagacagctccaagtgccaccatggatcagccagtcttgcaggggtgatgctattcagctacagatggcttgatcctgagtcatttcttccttttccatgcagtgtgtccaccgtgatctggctgctcgcaacgtcctcctggcacaaggaaaaatcgtgaagatctgtgactttggcctggccagagacatcatgcatgattcgaactatgtgtcgaaaggcagtgtacgtcctcacttccctcactaggcaggctcaccctccttcactttaatctctgaagtcaggtgttgcttctagagattcggtgcctgttttttaaaacatcaatagacttcaaggggtcagtacactgccttggcagcagattgcccaggtgtgagtgccagctccaccacttacttaatttggatttggggctagatacttgactgttctgcccctctgtctccctgactgtagtgggaggtggtaatagtacctatttgctgagttgttatggggattaaatcaatgaattcatgtaaagtgctcaggacagtgcctggcatatagaaacagcactcaataatgttagctattttatttatttatttatttatttatttatttatttattttctttttttttgagacagagtctcactctgtcacccaggctggagtgcagtggcacaatcttggctcactgcaaacttctgcctcccaggttgaagcaattctcctgcctcagcctcccgagtagctgggattacaggcatgcaccaccatgttcagctaatttttgtatttttagtagagacagggtttcaccatgttgcccagactggtctcgaactcctggcctcaagtgatcgacctgcctcagcctcccaaagtgctgggatgacaggtgtgagccactgcatctggcaagtgttagctattaatatgtcaattgtgtgtatgcatggacaagcatgcattcccaaggatggtgtctttatattttaagcttttatcagattttcaaaagccatctgtgacccctaaaatattgaaaccatttgggtttatgtatcttagaggcacagtttccttaaagatactcattttgttgtctacttgaaccattcttcccatcccttccacttctcagcagatgacatagctccctgtggggatatatctgctccctgtaggtacaattccaaatcacctcactgcactggacgtgagacagcttatggcagctgcagcttccacctagagaaagacatgggcctgcatccatgctgtgtgtgattcatgtactcatgtggccgtgatagctgtaatcggctcatagatcgttggatctgttcttaattttgttcccaggaatatctaaaaataggaaaccggtccattcagggcttacaccttttgggtgaaaattcaggattaatgtttttggatattattcctttggaggacataaaaggcaatattgaccattcatcattcatctagtatttgttgagcacctactatgtgccagggactgagagttcagtaatgaacaaaacacatgtaaaagacactcaaatgggacaagataattagcacaagttattaagagcccaaggggaacccttttctatttccactgctgtggatcatcagtgagtagacatgggtttaactgtctccctccttccttgcagacctttctgcccgtgaagtggatggctcctgagagcatctttgacaacctctacaccacactgagtgatgtctggtcttacggcattctgctctgggagatcttttcccttggtatgggcctgacatcgctgcttatttgggctgttctgaaacaccactggaaggaaaatgtgttctttcaagccccaggatgtagacactgttaagataacctggtgtgaggccagtatgctgcagccgcctcaaaccacatgttgtgccttattgtgtctgagataggcccatgcaggtggagatgggggtttttgttgggggttgcgtctcactcctggcctctgcccctcctctcctttgggctatgccagagtgacttcctcccactggaagtggtcccaatgacattcgcatcccagctgctttttcattttgggctttgggtcacatgggttcacccatggagagtgggccctccctcacctggtggcaattgatgctcaggtgaaaaggggtatgtggcgggaagggcagggctctcattcctggttgtcactggccagtcttgacaacccaggtgctgaacaacccaggtgccctgggctgtccggtgaggtccctaagagaaggatgagccataaccctgacatctggatggttcatctggggaggtgagacttacacacttagggataaacagtgtggtgctgatttaaaattgtaatttgagtcttgagtaaagagaaaggagtcctggaatagtgtgggaaggcttcagagagggaacttaacttgacctggccttggctttgaaagtgtgaaatgtttcatgaatttatctgtgatcaggatgtaatagtaaagtgtatcttcctgccctgtctcctttttcatcctagttctccctccatggatgatcacaatggatcatccccagtggcttaatggagtcctgtactcccttaaaagcagagaggccacaactttgatttttgctttagctatttgaacatacctggtaaaaaagactctctgggttttaatgattcagaatttctccttgcttttctagttcattttgtctgtgttgatccaatagtcatacacattgaaaaacacttgaacgcttatttctaaagatgtggaatttttgtgatggtacttggacttgaccaacctggagtcctaattaaacttaaggtttgagctggtctctgaagtcaaggagatgatgacactgaattttcttgaaaaaaccagtgcttcaaggctataggatctgaaaggttttctaacagtgttctatcatgccaagtgtttcaacaatgcactgagcgtttgttagtcctggtgttttattgtttggcttttaggtggcaccccttaccccggcatgatggtggattctactttctacaataagatcaagagtgggtaccggatggccaagcctgaccacgctaccagtgaagtgtgagctccttccccatcccgggggcctgtgttcacagtctgtgggtctagggggagggaggggccctgagacttccccctgtgcccactcttgagttctgtccccacagctacgagatcatggtgaaatgctggaacagtgagccggagaagagaccctccttttaccacctgagtgagattgtggagaatctgctgcctggacaatataaaaaggtgtgtttggatctatgggtggaaaggtctggttaaagctggaagttataccagtgagctgtgctgttccacagttctagaggagcattttcaaaagaggcaaaagattgtgtgatccagtggctgggcttcatggcggtgctccacgagaccctagtagcaatgatgaatgaaaaccctccccttcccgtggggctttcctttcatcttatatgtgcagtacctgtaagcactattctccagatgtttgagtatcagaagttagtgtgcagttagaagactcagggcatccatggccattacatcactaatttgagtgcacttaaatccatgcgaaattggcttttaccagcggactggaaggaacaacctcagctgttatctgtggcaccagctggttttttgtggaataggaagcattgttcaaaggaacaaatgtaatttcttggaaccaagcaggatatgtaaatgaatgaaacagctttctgctgaggtgttgagaggaaaactcagacataacctcagtttcttagattaagattagtccctgtgtagactttttatacttaccatttttcttccttcttctcaaggaggaatagcgttaggagattgtgtgccgaactggaagttaaatacttctgtctgttaattatctcactgcccactacaactttcacaggtgaggcagtgaggaggcagaaggaaattaaccctcagttggtcaaagatgctctgactggtggaaatgtgttggtgggaagagattgaagttattgttgaaaatagggtcttttcacatccaatgttagacctctccaatgtttaaggatcatgaaggctttgggtattatccacccaatagaaggcctcactgcctatctatgggacccatccaagccctggaaaggcaacgtgatggggaccagaagggttctcagttgtagctactgacttggagaaggggctactggtatcttagcacctaatggcagaagctctttaccattggtggccccttcttcatgttctatgtctctggggatagttgacatgactctccttcaactaagtcccacatcttccaggtagtttggaaatatgtacagttaaataatagtaagttctgagtgtctctattcatttttgaggtttggttgttaacacttgattaaatatgttcaatgaatgtttatagagttatgaaaaaattcacctggacttcctgaagagtgaccatcctgctgtggcacgcatgcgtgtggactcagacaatgcatacattggtgtcacctacaaaaacgaggaagacaagctgaaggactgggagggtggtctggatgagcagagactgagcgctgacagtggctacatcattcctctgcctgacattgaccctgtccctgaggaggaggacctgggcaagaggaacagacacaggtagctgtgggggcagcctcagtgtctcacctttcccctcccctataggccctgaaggagaggacccattttcccgataatggtgcactcccggttggtaaatatgtactcagggacaagttgcagaatcctcaggaggtccacgtggttttgaaaatgcttcccagatgattctaatatgttccccctggggctgggagagggatgtgcatgttgtggggagagggacatgcttccctggtggagaatctttgagctaaattctcaggtaatttgatcaaattgatacagaactgtgattactgagatcatataagcctctcctgccattgtcttaaatagtcattgaactggggaaaaagtgaagaaaggtgggactgagtcctttgacgctatgccctacctgtgaattggaatcacctgcagagatttaaaaactgctgatctacaagcctcacccaaaacaacaaattagaatccctgggggtggtggccaactgctccctggctgatttgtttcttctttcttttaaattttgtattatggaagatttctaacgtgtgcacaattcacatagtatagtgagctgttcagtatccgtcacccagcttcaatgactatgcactctgccagcctggatgcacacatggccatgtctgtctctcctcagcctcctctggattgtttggaagcaaatcctagacaccttatcatttcacccataaatattccagtgtgtgtctcttaaagataagggctctattttaaagaagaacaacagttattaaaaataactacaatgctgttatctcacccaaaacagggacaataaatcattaaggcatcaggcagccagttaaagttcaaattatctcacaaatattatcatactccattaaaaagtgggcagaggacataagcagacacttttcaaaagaagacatacctgcagccaacaagcatatgaaaaaatgctcaacatcactgatcactagagaaatgcaaatcagaaccgtgatgagataccatctcacaccacacagaatggttattattaaaaagtcaaaaaataacagatgctggtgaggttgtggagaaaaagggaagcgtatacactgcttgttgaagtgcaaattagttcagctattgtggaaagcagtgtggtgatttctcaaagaacttttaacagaattaccattcgatccagcaatcccattactgggtatataaccaaaggaatataaatcattctaccataaagacatgcatacgtatgttcactgcagcactattcacgatagcaaagacatggaatcatcctaaatgcccattgacagtagactggataaagaacatctggcacatacacaccatggaatactatgcgttgataaaaaagaacaagatctgagataccatctcccaccagtcagaatggctattatttaaaagtcaaaaagcaacagattgtggcgaggttgtggagaaaaagaaacacttttacaatgttggttggagtgtaaattagttcaaccattgtggaagacagtgtggcgattccccaaagacctagaggcagaaatactgtttgacccatcaatcccattactgagtatatacccagagtgatataaatcattctattataaaggcacatgaatgtgtatgttcactgctgcactgttcacaatagcaaaatcatggaaatcaccctaattncccatcatgatagactggataaagaaaatgtgatacatatacaccatggaatacgatgcagccataaaaaggaatgagatcatgtcctttgcagggacatggatggagctggaagccgttaccgtcagcaaactaacacaggaacagaaaaccaaacaccacatgttctctcttataagtgggagctgaacgatgaggacacatggacacatggagggaaacaacacacactggagcctttcaggggttggggattgggtggagcatcaggaagaatagctaatggatactgggcataatacctgggtgatgggatgatctgcgcagcaaaccaccgtgacgcatgtttacccatgtaacaaacctgcacatcctgcatatgtacccctgaacttaaaaagtggaaaatacaaaaatgaaattaaaaaaagaacaagatcatgtcctttgcagcaacgtggatggagccggaggtcattatccttagcaaactaatacgagaacagaagaccagatacctcatgttctcacttataagtgggagctaaaacaacgagaacacatggacacaaagaggggaacaacacacaccagggcatagttgagggtgcagggtgggagaaggaagaggatcagaaaaaatacctatcggatactgtgcttattacttgggtgatgaaataatctgtacatcaaaccgccatgacgtgatttatccatgtaacctgcacacgtgcccttgaacataaaataaaagttaaaaaaaaattatcatacacttgttttgttctgtttgagatccagataagagtcacacattgcacttggttgctatgtctctgtaagttcactatgcctcttttttttgccctcttacatattatttgtgaagaaaccatagtgtttgcctgtggagttcccacaatcagaattttgctgattacatccttgaagtgtccttctcaggtgcttctgtcttctctatgtgttgtaaactggtagttagtctaggaacttaacctgactcaggttagatcttcggcaaacatgcttcatagatggttctgtgtgcttctgtcaggaggtatgcactgtccagttgtctgccttttgtaacattatcagtcattgggtgaccattacctagaatttctttttttttttttttttgagatggagtctcgctctgtcacccaggctggagtgcagtggtgtgatctcagcttactgtaacctctgcctcctgggttcaagccattctcatacctccgcctcctgagtagctgggattacaggcacatgccaccatgcccagctaatttttgtatttttagtagaaatggggtttcagcatgtgggccaggctggttttgaactcctgacctcaagtgatctgccagtctcggcctcccaaggtgctgggattataggcatgaaccatctcacctggcctagattctttaactcagcaccaaggtggagctaatgcccaggcaggactgagaatcactggttcatgtggtcagatggaggagaccatgccccagttctccgctgtctttgcatggcccttggacagaggtaggagaaggtgatgatagtggcccctagttcaaggtccaagttgcttgtgtgtgtgtgtgtgttttttttttcctcttctttcccatcagaacattattttggaggcttatgactgtgacctttgttaaccaatttaggtataatatgtagacagcccttgtttatttgtatggactgggtaattttgaaagtatggcttttctattttgttttagaatgtgttatgtgatttgaagatgggacacagtggcccatcagtcttcggttttttattatgctttgctcaggccagtttttataacgtgtttatatctcttgagcatatggtgttcctccaagttttgggggtctgcaatggaacttcacgggggtcggggaaggctgggcagtgaatctagggctctctgtctcagatcctttctcaatttggttactttgtatttgtgggctctgaataatatttgagttgtaagagggttctgcttttatataaagttagaaagtcacattggaataaataacatgagaaaggtgcccagaagttttctagggctacaacaggctgagctgcagaatttgatgcaccaggaattgaactttctcagttgaagttcacgttcaagttaagtaacttgtgtggcatcacacagctagtaagtggggggaccattccagacctaaggctttctgactccagaactcccctttcagccacttctctagtatgtaaggagccgtcacctgggccttcaagttgggggccggtgggggggcatttgatgtcaagagagaggggaagagggcattccaggcaagtggcaggagatcctgagaacacagtttggatgctcaggaggcttccgggagagcacctgatgggcctggctgcagcttgcaccctgatgggtctgacttcaccccctgctctgctttcccaggcctttggatccggcattgcttatgttctcttccactaggattgagtagggaaagtagaaattcttgcagcttgtcagtaactttgatgaaagacccagcagaaaagcaggaaagctgaagtgtaaaagtgatgggtggaccttggttttccacgtggcctaccacagcatgtcaggcctgggggcagaatcttgccatactgtgcagcccaaatttgaatgccaaaggcttttgtttgtctctggggggccacagtctaggtctagttctgtgcaggagttgtaatatttgctcttctctccctcctccagctcgcagacctctgaagagagtgccattgagacgggttccagcagttccaccttcatcaagagagaggacgagaccattgaagacatcgacatgatggacgacatcggcatagactcttcagacctggtggaagacagcttcctgtaactggcggattcgaggggttccttccacttctggggccacctctggatcccgttcagaaaaccactttattgcaatgcggaggttgagaggaggacttggttgatgtttaaagagaagttcccagccaagggcctcagggagcgttctaaatatgaatgaatgggatattttgaaatgaactttgtcagtgttgcctcttgcaatgcctcagtagcatctcagtggtgtgtgaagttggagatagatggataagggaataataggccacagaaggtgaactttgtgcttcaaggacattggtgagagtccaacagacacaatttatactgcgacagaacttcagcattgtaattatgtaaataactctaaccaaggctgtgtttagattgtattaactatcttctttggacttctgaagagaccactcaatccatccatgtacttccctcttgaaacctgatgtcagctgctgttgaactttttaaagaagtgcatgaaaaaccatttttgaaccttaaaaggtactggtactatagcattttgctatcttttttagtgttaaagaggtaaagaataataattaaccaaccttgtttaatagatttgggtcatttagaagcctgacaactcattttcatattgtaatctatgtttataatactactactgttaccagtaatgctaaatgtgtaataatgtaacatgatttccctccagagaaagcacaatttaaaacaatccttactaagtaggtgatgagtttgacattttttgacatttatattaaataacatgtttctctataaagtatggtaatagctttagtgaattaaatttagttgagcatagagaacaaagtaaaagtagtgttgtccaggaagtcagaatttttaactgtactgaataggttccccaatccatcgtattaaaaaacaattaactgccctctgaaataatgggattagaaacaaacaaaactcttaagtcctaaaagttctcaatgtagaggcataaacctgtgctgaacataacttctcatgtatattacccaatggaaaatataatgatcagcaaaaagactggatttgcagaagttttttttttttcttcttcatgcctgatgaaagctttggcgaccccaatatatgtattttttgaatctgtgaacctgaaaagggtcagaaggatgcccagacatcagcctccttctttcaccccttaccccaaagagaaagagtttgaaactcgagaccataaagatattctttagtggaggctggatgtgcattagcctggatcctcagttctcaaatgtgtgtggtagccaggatgactagatcctgggtttccatccttgagattctgaagtatgaagtctgagggaaaccagagtctgtatttttctaaactccctggctgttctgatcagccagttttcagaaacactgacttaggtttcaggaagttgctatgggaaacaaataatttgaactttggaacagggttggaattcaaccacgcaggaagcctactatttaaatccttggcttcaggttagtgacatttaatgccatctagctagcaattgcgaccttaatttaactttccagtcttagctgaggctgagaaagctaaagtttggttttgacaggttttccaaaagtaaagatgctacttcccactgtatgggggagattgaactttccctgtctcccgtcttctgcctcccactccataccccgccaaggaaaggcatgtacaaaaattatgcaattcagtgttccaagtctctgtgtaaccagctcagtgttttggtggaaaaaacattttaagttttactgataatttgaggttagatgggaggatgaattgtcacatctatccacactgtcaaacaggttggtgtgggttcattggcattctttgcaatactgcttaattgctgataccatatgaatgaaacatgggctgtgattactgcaatcactgtgctatcggcaggtgatgctttggaagatgcagaagcaataataaagtacttgactacctactggtgtaatctcaatgcaagccccaactttcttatccaactttttcgtagtaagtgcgaagactgagccagattggccaattaaaaacgaaaacctgactaggttctgtagagccaattagacttgaaatacgtttgtgtttctagaatcacagctcaagcattctgtttatcgctcactctcccttgtacagccttattttgttggtgctttgcattttgatattgctgtgagccttgcatgacatcatgaggccggatgaaacttctcagtccagcagtttccagtcctaacaaatgctcccacctgaatttgtatatgactgcatttgtgtgtgtgtgtgttttcagcaaattccagatttgtttccttttggcctcctgcaaagtctccagaagaaaatttgccaatctttcctactttctatttttatgatgacaatcaaagccggcctgagaaacactatttgtgactttttaaacgattagtgatgtccttaaaatgtggtctgccaatctgtacaaaatggtcctatttttgtgaagagggacataagataaaatgatgttatacatcaatatgtatatatgtatttctatatagacttggagaatactgccaaaacatttatgacaagctgtatcactgccttcgtttatatttttttaactgtgataatccccacaggcacattaactgttgcacttttgaatgtccaaaatttatattttagaaataataaagagaaagatacttacatgttcccaaaacaatggtgtggtgaatgtgtgagaaaaactaacttgatagggtctaccaatacaaaatgtattacgaatgcccctgttcatgtttttgttttaaaacgtgtaaatgaagatctttatatttcaataaatgatatataatttaaagtta

SEQ ID NO: 16 - DNA, 46811 bp, Mus musculus
  source 1..46811: mol_type = genomic DNA
aaagctttcctagggtacgtcgcgtgcgacccactcggaagggtggaatttaggaggataaaaatccttctgccatcaagatgcagagggcaggcatttggtagtcacgcctagcctgagcgttttcatatgaagatagaagaagcgaggaccagataacccccgaaaacaaaggcaggaccagataagtggctccgaagggataaaggtcgttctttccttcttccggagaacatcccaaaggtacgccgagcaaccgttatttgcacaccgcctcacaatccagcctttcaaaaacccatcatcttcctattagactccacagtttcctaatcccattaaaggattagcaactacacggcactttcccttaagacccccagttcaaaacgacgcagccgcgttagaatttctccccagggccatatttctagcgaggcccagactgtctatagaaaggataatttgaattctagatttatattcgttttagaaatgagcagcaattttacgtgtattttcttttcgaagagaatacaaaacaatagcacccccacccccaaattgggaagtcaactcattttggaaatgatggctgtttgtagtttcctgaaacctctttcccggcagaacgtcaacacctcccccttcggccccccaccccaccccatctggtttgctcccccctcctcgttgttgttgaagtctgggggttgggactggcccccctgattgcataagagcaaaaagcaaagaagaggtcttgagcctgagagagtcagagagcaaggagtcctagggaaacttttattttgaagagaccaagggggggggggacttcatttcctgacagctatttactttaagcaaatgattagtttttggaggacggactataacattgaatcaattacaaaatgcgggttttgagcccattactgttggagcttgagggagagaaacaaacggaggagctgcggggaaggactggaagcttggggcttacttttcactccgggtatcggattttctttgcaaattgacatagaaggagaaggtaagggagaggaaaaagtgacttttgtttctcaagaaggtccctgatcataacttggggctgcaagaagctaagtaacttcaaattttgggcaacgaggaaaacaaaaacaaaacagctgagttcagtggtgtgtccagaaagtaacttattctgaataaacttcactggaatggggggtgtgggggggtaaccattagagagtcaaagataaaaaaaaaaaaagaaaaagaaaaagaaaatgaaaaaaaatccagacctatttttaaaagcaatgtttttttttttttccctacacaatcctatagccttccaaagaaattgttaggcttacatttttgaggttttcctccagggtgggggtggcgttcgtgcttactgggacgaacaccaagtaacattgggggggtggaagccgcggcgcttggcctcttggcagtgggtcacggaagaggacaggtttttaatgagtattttcattcgtcgcccgcggtttggcgggactacgctgtagcgggtggtgcggcgcgaagcttggggagggggcgcaccaggagaagtgtgtgtgtggaggggaaaggggcgccgagtggggcgcgggaaagcgctaagaaaaaagggaggtgtgaagggctcggctggaggaggtcggacctcggatgccggccgggcacactcggcgccagtcgagccctcgtaattactggacggcgctgctgttggaaacatctggggccagacttgagcgcggcggtggcggctgcagcaccgtgagaggggcgcgcgggcgaggggcgcagctccaagggttccggagagattggagcgaattacttgggtgctagaagcctcgggcggaatccgcagtgcgctgggatcgtgcgcctctcactccagcgacggaggcagcggcggcagcggcggcgcggacgagcgatctggaataatgacaaacacatttggcctcgagtgaagaagtcgtcctggcctcgcattccagcaactgggatttgaggaatttcaaactgcactccgaggggccctcattgtgctccgtagtccccacccccactcggctcacttgcgtctccagtggagtcttttctgcacggccgggggttgggggggcctggctcttgcttagtcctggccgcaggcagcaaagaggcaagatccctggctaggagctgacctcttgtgaagaagtcaggacatctctgaaaggacagacgtgggtgcaggtaagcagaaatgtaagaggccaaccaccctcgcctcctgcctacggaactctgggtgcttctctgccctgggatgatggatgcgaggcactggtcgcctgaacgcaacctttccagtgccccccccccccaactttcctcccaacgctcagtatcctgcaaaactcaggggcggtctccgcgcagccttccctccttcaccgttattcccttggaaatcagtttatacatgtgagattaacttccctcgagcagggccgggaaagcaggaagcgatctcttggctttgaagcttctgaggtcggcgattctttctgtttggaaggcgtgtggggcagtctgcagagtaaggcagtatgactcggccctggtctgcagcaggaccaagccagagcctcgcagccaggtgtgcaggagttgccagtgacttggcgaccagccttggcgagaaaggaagtgttggcctgtttgtctgctgtggggagtccttgcagaacccgcgcttagaaactcccaggtctgctaagacctctagaagacccggagggtgtgcatgggggaacccaagctggggagggggcgtgggtggcacttttaaaagtctgggctgcccagcgtcggacagagctgcccagaaaagccccaggctgggcggtgtgggaaacggctttttggcttcgtggcggaattgctcaatgttttggactgaattgcttctcctgaatggtttcggatcagtcttaggcagccttgaggagccggaggaggcctctagtgtaaacccacactgtggtctgcagctgtacagccccagatttaacacccaaagtctcagaagaggctcggggctcagggcgctcctcgggcgcacctcttctgccgtcgcactggagtttacataacctctcttaggctcggattttcccctgaccaaggctttccatctcatccttcctctcgtcctctttctttgcaaattcctcttgatgaggactccttcgatttcccaacaggagtgtgtgtgtgtgtgtgtgtgtgtgtgtgtgtgtgtgtgacacaccaattaatttgtcgccgtggtcagttcctgcttaggaacccttgcaaaagtcctgttttgggttgtctctagtacagctgggtttctaaagctcgcgggagagaaagaaagaaagagaacacagtccaactccactgtttattgccccggatcccttcttttgctggagtctgcagacccgcagggttcagactcagaacctggcctcccacttctgggcccaggggcttctactttcttcctgggcgcgggctggggagagatgcagggggaggggcttcaggctgcaaacgcgtcaggcgccgaagctggcgggcgggatttctgcctcctggggacaggacctaggctgcgcgggacctggggacgtggtgaccatccttctgcctggtgacctcgaggggtgggatccccctcgggccttcagtgagtagcatccaggttaaaggttgctgactggaaagctggataggtgactcaaaggtgagaggctcagcgacagtctggccgctgatggttgggttggccggaggcatcagcattgaggaggagaaggagaaggaggagaaggaagacgaggaggaggaggaggagggggagggggagggggaggaggaggaggaagaggaggagggggaggagggggaggaggaggaggagggtgggtcttgtaggagagtactcagtgtgggatgcagagtacgcagctttcgctgactgcattctgattcccgacctcatcggtgcctttttttttttttccctctgaagtagttcaatgtttttttcttttgttttaaactgaagggtggaccaccaatactagctgggaacttagacggtagtaaaaggggataaatgtaagccacggacttggagagtctctttcttctacttcagttcccttccttccggaaggtagagaagctagaggcatgaagtagagcaggggtgcccaggggcagggcaaacaaaggggcaaggtgggcactccagaccccgaatcacagagcttggtccagcctttggttctggcggctgcggtcggtgctggctggcctgcaggaggcgctgtggctcgcctgtaaccctaaacctggccccctccctccaccctgcccagtctcctctcaggtcgcagttgaaaacaatgcaaacgctgagcatagagcctggggcgcggcggcctccgcagtcctgagctggaaggaaagggacttgggcttgggcctgggatcgtcgggtagatccgtgtcgcctggtatctggtggcgatcttgtggcgcgggggttaagggagacagggagagagggtgttggggaggggggtgagagacacagatacacacacacacacacacacacacacacacacacacacacacacacggagagagtgagggagaggcagagagacggagacacacagagacaggcagagagacaggcagacacagagagacacccagagagaaggggtggtcgggatcccgagcgtgctagcgcggaacctcagagagaatcggccccagtgcgcgcagcgctgtaggggacccggagcctgagctttgagcgacgccggagccagcgggtaagatcagcggggttgccgcgccctctagtggctcccgcagcgcgacccttgtcccagtagccctgggcggtcgagcggtccccagccgggagcccagtgcgcctggaatttgggctcacctgggtcgctcttgagttttcctgcgggcactgcgttggcgcagaggcgttgggtggacaagagtgggctgagggtccgggtttgagctggagaattggggcgtcttaatttagcagaaggtgggtggaggcggtggaattccggatccagggagatcttgggggacagtagccggcgtgtgcgctccaggccggctcaagcttccttggcctgttgctgtcttagaccccgcgttaccgagcaatggaaatagtcctttctaaccaactgggctgcagggaccccgcggggggcgggtttacgagcagcgagaacagagtggcagggaaaggcgtcgtggtctctcttggcagggtctaggtagccttcatgcttggagaggtggaaagtcaaagggtgttgtttcccctaaacccaagtgaccagttctgcaacatctttgagacctggtccacagcgctatcttcctggctctcaaggcacggctgtgtcttggtccctctttgggcagtggtgatgataattatgctgatggtgacgatggcggtatgtttgttcctcagtgaagtctctggaggtccccaaagaaatttagcattttagataggagttttgtcatttcttcttccacgcctaggagctcaactacaagtcatcacaagacctaaaagtaaagattaacctacgatttttttttaaagttgggacattttaaaatcagaactggtttcaatggcgcctgcagctcagagacaacaggacactggttcttgaaccaacactgccatctgctgtctactctgaggaactgcatatgcctctgagagggcttggcaaattccaagcaaatattggtaggagggaagtttctctctctctctctctctctctctctctctctctctctctctctctctctctctctctctctctctctctctctctctctctctctctctctctctctctctctctctccccctccctctctctccctctctctccctctctctctccctccctccctttccctccctccctccctctctcccccctttctccctccctctctccccctcccccctctccctccttcctccttcccctctccctctcaaattttaaatttttatttcaagtgtatgtgggggggttcccccatatttatatatatgagtcttgtgcatgcctggtgtcttctaagatcaaaagagagtgtcaggttcctgagtctgagctgctgtgccggtatagagacttgaacccagagaccattcggtgaccttaaccactgtgctatcccttcatccccctttttgctcttgaggagcacaaagatgattttattaatttttctttcttgcgagtctgcaacaatctccagaggaacagattttatttttcagacatttgtgtagtttccaacgtgtgtgtgtgtgtgtgtgtgtgtgtgtgtgtgtgtgtgtgtgtgtggtcaagagatcaaattcaatccttccaaatgctcagtaagcccagtgtggctgagctacatcgagccctaattgctactctttcacacgtacataatgaacggggtttatgtgagcaggcctgaaaggaagggagcaggcttttttccttctgtaaacacagcgtgtgggcttggtgacttcaagacacctgatgacttttcttttcatttagtgacagtcgaaaggatgtgttattttattctttcagagttacacatctggtgcaaagagaccagaaaggtctatgaacccaggctgccccctaaaatgcatgtgtgtaaaagtgtcccagcccctgtctcttattgaacatttaatcttgtactttggcagatcaaaacaccgcagaccctggtggggtacaggtcctgggaaatacaatttgggctagaaaacgcagaagtggccaccattgcagacccatatttaagctgcctgggctgaagttctgagagcgaataaagagagaggagaaacaaaacaagaacctagatgtgctattttcatagttagaattaacttaggagaactgaaattaaccaaacctcagaaatctgaatcttgaaggacctcggtggctttggtggctgagagcctcctgtggtctttaattgggacagggtggggtggatttcattgtccagtggttgagcagcgaaatccatgttttttgctcttactgtcagggaagctgggagtaagcctcaggggagtggtagctcttctgggagcaagcttgcatcctgtttactttcaaatttgcctgtggtctctggtaggaggctcaccttaggagttttcacttctgcagtggaatgactagctctgatggtgtaccgctctgcagcaggagagcttgagttcaaggccaacctgggctacatcgtgtatatggaagaactagaaagagggggaaggaagaagggagggatgggaagggggtggttggagacagtggccgcagtcagattgacttctgtgttttaggactgtaggtgttagttaacgttgcagaatggtcacagcgataccagctcgatagagacttttcatcctctttcccactaggcagaaggaagagatgtggagtatccagggctccacttaattagtcaggaggagttcctagactggttaagagcactgactgcagccgagcttggtgacacacatctttaatcccagcacttgggaggcagaggcaggcagatttctgagtttgaggccagcctggtctacaaagtgagttccaggacagccagggctatacagagaaaccctgtctcgaaaaacaaaaaaaaaccaacaaaacaaaacaaaacaaaacaaaacaaaataaaacaaaacagagtactgactgctcttccagaagtctggcatcttaggattctgcagggcaagtctaagtgaacatcaggcactttgaaactgtgtatgctagtcccttaggactcagggaggcgagccggcaagccagtgatggttggtttcaagttagagacaggacctaagtttaaagggatagacagggtttcagagctggaatcagaatctaatctgagaaggaatgagagcaacaggttggagatgtcccatagcaccggagagtgagtggggcagcaatctcacaatctggcttgtctctcccactgtgacatggtttttgaaatgtgaacatggcagggcaggagactgatgtccaacatggaatcagtgtgggagcaagaaacaatatcttgtctatttatttatttgtgataaagtctctggggctggagagatggctcagcgattaagagcactgactgctcttccagaggtcctgagttcaattcccagcaaccacatggtggctcacaaccatctgtaatgggatctggtgccctcttctggtgtgtctgaagagagacagtatactcacacacacaaaataaataaatctttttttaaaaagtctcttagagcccccgccaggctagccttttgtctctacttcactatgcctgactaataagtgatttaatttaagaatacattcatgtatttattacctgtatgtgtgcatgtatgtatatgtgtggaggccagaggaccacatatgggagttagttttctcttcccaccatttgggtcttggggctctaactcaggtcatcgggcttgggagcaagcacctctacccaccagactgtctcaccagccccattaattttttattttaagtgaaatctgtccctcctccttgcaaagtgtttagtccccatcacaccaacttacagtgctacaagcctcagattttgtaatggcagctccctctgtctgtacgtctgacctgtggatattcatggctctgtctgtgtgtctgaggtgtggatgttccgagctgtgagcaactaactaaagcatggtccttgcaggttgggaaagcaccagccaaaccaagactcccttccggagctcttccatagagcaagcactgggagtctcttcctctccccttgggctctctttctcactgtgggacaggcatgctactgttattcatggccagattgtctgggtctccgatgagtaatggcatgcacctagccaggcaactgctgctatcagagtctggagttgggaatcttaagcaaacacatgtggacattcgcatcgttatcactctctcggaggctctgttttcgttgcccactttgagcgccagtaaatcatcacccctggcagtaagtgtaccatatctggacacacagaaggaaatttgctggagcctggctggggcaggccgttcttcagagcctgctcagtccctgtgctgagttctttctctccagcttagtggggcttgaaagatccatagctgctgaccctggctggggaggtaccagggtggggatgtgataaatccccagccagcacgctggctctgggagccgctttgtagctggccaagtggattatcggtgggaggttgatgttggtgtgtacaaacacacaggccctcactgctaattgtggtaaatcaggcaaccagcctggctctggggcctcccgtggctgtcaccacagccgtttggaagccctacatcctccagcacctgccaacatcctcagaggccattaagccagacagcatctttctaagtgcatttggtccacaaccctgcaattaggttttttaattgtggtgttcagagaaggagaggggtcaggggtaggttgtattgggaaagagtgggcacagaaaggctaacctttcccagatccctagggattgctaggctgcttgtcggtgagctccaggctcagacagagaccttgctttaaaaaaaatagtgtagaatgatgaggaaaacacctgatgtcaattacgccttccacatacacctgcgcacacatgcatacatgcatgtacacacagacagacagacagacagacagacagacacacacacacacacacacacacacacacacacacactcctggatctgcccatggctaagtgtttttggatcatttgctaaacttctgtaccccacagtaagaaactgtaaaggtggaggctcttcctgtatagagatttctaaaaaggaacctttctattccccagaatttggtctgcacagatcctgacaatgatgttttctgtgcctcccaatggatgaaatctaagtgtacatccaccatgctgggcctctcctcctttctctcaattgtccctttgtttgtgttcctgtcctgggctttccaagcttctagtagcctggccatatgtccaggtcccacaagaacacaggctggaagccaatgctcttgcaggcttccgtctcacagaggctgcctcaaagctagggctacctcgaaaccacacgctatggtcaaattgttccagccttttctgaaaggaagacgattcacactgccgatgagctgtgatgtgaagcaagggacagcccacgagaagcagagacttctccagcttagatggagaaccagtagtaacatttattcccccaatcccctttggagacagtaattgaggatcctggcttgactctcaggctccgccatgctctttgatgcttccctcttatctatctgactgtattagttgtcagccttaagctgggacatgcttccactgacggtaccagtaagaactcccatggcaggagaacctggcccaccagtggctttctgtttggctaatgctgtttatgtttggcttttgtcatttgcaggtctcaggagctatggggacctcccaccaggtctttctggtcctcagctgtctcctcacaggtatgtatccacacatgcgtccttgttctcctaactcacagttccagggagccaacgtccatgttctgtgggcctctcacctgcacctgggtccaaaggggggcgagatgaaaccaacaggaacttttgatgcctttcactaaatggcaccaattccatttcaaaacaagagctttctgtcagtggtccgaagggaggaataatctggatattgacatgtctgcacttgcccacttcttcctctctctgggatgggcttacagcaaggaaggagaagatggttttgagcatgttcaaatagagtaaagactcaggcatccttcatcaggtttagggactcaaacctgtaatcccagccacttgggaggctgtagcaggaagatcataaactcgcggtgtgccagggctacatagtgagaccctgtctttaaaaacaaaaagtaaaaagagggctggggagatgctcagtggtagagcgctggcctggcacttggtagatcctttccacgtgtttgtctgttgcagacattactccaaagttaggcaccgatggaaactagagaccattaattaataattaagtcagaacgtgtctcctcttcagacaagggaagctcggctgaaacgtgaagcttagggattagtttcaagcccccactccccgcctgtgttttatttattatttgtgaatttaaacccatgccttcctgctttggcttttggaaatcattaaggagagatggtgtgccagagggtggcagtgaggaaagacgtggggctcctgagtgagcccagatctgctgtgtgctttgttcgggcctctctccctgcctcttctcacatctcctgcccattttttttttaaaccaagggaaacttctgcagggcatatgcatgataaagaacccatatgtgcttgagcccagaccgcactgggatattttatggtcacacataagagtgtgaaatatggaattggaatcagacatcctttatccgtttgagtgtttggaggggtgagtatggggcgtttggtggggctgttgaggccgttggaacacttgctgccctcagcagatgcagtggctgttataatggggggcctttcatgggcatccagaggaacagagtttcacgtagaaatggccgttgttcatataagccgccactgtggctactctcagcgctctggagaagctgtcctttctggctcgccctattcaatggctgtccctttctacagggccgggcctcatctcctgccagctcttattaccctctatcctcccaaacgagaatgagaagattgtgcagctgaattcgtccttttctctgagatgcgttggggagagtgaagtgagctggcagcaccccatgtctgaagaagacgaccccaacgtggaaatcagaagtgaggagaacaacagtggcctctttgtcacagtgctggaagtggttaacgcctccgcagcccacaccggatggtacacttgctactacaaccacactcagacggatgagagtgagatcgaaggcaggcacatttacatctatgtaccaggtgagttgcagggccctcctagaccacgctgcgtcctgccctgcctgcctctgagtcaccgagttaaggggcataaaacacgagggattcataaatgtttattgcagagaaatttgcaaggtagaaaagtctttcccttctttcatctctgtctgtctgtctctgtctgtctctgactgtctctgtctgtctctgactgtctctaactgtctgtctctgtctgtctgtctgtctgtctgtctgtctgtctgtctgtctgtctgtctctcactggaactctcactgaggctggatctaggtggttagcctgccaacccaagctatcctcctgcttccaccttccacagagctaaggatatagatttttttctttttatgtgagtctttgtgattagaaccctggtactcatgcttttaaaacaagtgctcttactcactgggccactccttagctctctgtctgcctgtcagtctttggttcttgagactctcactgtcttagaacttgccattgtagtccaggctggcttctaacttatagcaatcctatggcttcagccttctgggtgctaggattaagggcatggggatgcttaacttgctggttttgtgtttgagataaggtctccttctgtagaccagactggctctgaatttaccattctctgacctcacctcccaagtcacagaattgtgtgcatgtggtacccgactccggtgttttgttttgtttgttgttgttgcttttgagatgagagcttggtatgttgcccaggctaccctcaaactgctacacttaactagtcctgctgtctcagcctcttaaatagcagagactacccacattatgaccagcaaaatacacaaattaaatacagatcatttgcacgttcaaaatcaagaaaaactcatgggaggcttggagatatggttcaggttttgggagcattcgcagctcttgcagaggacccaggtttggttcctaggactcacagagatacatccctctgttagacagttacaggagattagcgccctcttctgtcctccacctgaactgcatacatgtaatgtacctacatacatattcagccagaacacacacacacacacacacacacacacacacacaccaaaaaccaaataaacaaacatggaaattcccctaaatgttaacgaccaaggcaaaaagaattccttccactcttcaagagttaatgcacctttgtaggaaagctggaatggtggtatttaaaatgcatgttgttttaaaagagaaagacttgcagcttgggatctaactcagtgacagagcgctttcccagcaagaggaaggctgtcgattctacccagagaagtggttattgtcaacatgtcagggctttattaattttgaaaagtctttactgtcgaatgtcttttattcagatggtacaaaacaaaaaaagaaatcaaatgtagtcagtcagtgtggttcagtcagtgtgagcaggcacttacatgtgtatcaggtgccatgtcttgtgtgggaggcaggattaacaggcggcaggccttgctttggatactcacagttcactagggtagattccaaatagccactcagtttcagctttcatacaaatgtgcatttactcttgacgagtaggaaggaattctctttgcctttgtcattaacatttagaggagtttccgtggtaatgatatgaccttgtgtctgctgagaggcagatgccaagatgtaggttacatgccttggttttataaggggcaagacctaggaaaggggtgggagggtccccgcatgctcctgctggactccattagatgaatcggtactacactgccttcttgcccatgggcctcaggtgccctcagtcagtgacaggaagcattgctggtgagtgtgattttaggttcagagggctgcagagctaggctctagaccattaagccctctgtggttggagggatgcgctttctctggaatccaggcttagctgaaagctttcgatgcatttggtctgccacccacctcgcctccgctctgagcttttgccgagctggagctgttggtatctgtatgtagcgttggtgagcagctgtacaaagaaggaccctggtgttacctacacaccatacaggtagcattcggtagtcgagaagattagtcttggagagggaagcccaactgaagcatgggaacatgagtctatctgtctgaacctgacccggatgcatacctgtctaaactctgtgtggacagggttcaagtgttcggaactctgaacacaaattagaacggtggggctttatgttgctggggaatggaaaaagctttggagtacaggtgactgccgttcacactctgcctttactgcatgtacacgggtgctgggggtttgaactctggtcctcacacttgcctggcaagcattttcctcctctccagctccgaagtgtctcttttcttacaatagaacagtttgttgtgaaaagggcaggtgtttagaatgtcactttaatgctacacagtaacaatggtggtgaagctaacgatgataatgatactaacagaacactttttcccccctgtatatgtgtataaaaatgaaatgaaactctaatagattcttctctctctctttaaaatcacagacccagacatggcctttgtgcctctcgggatgaccgattccttagtcatcgtggaagaggatgactctgccatcataccttgccgcaccacagatccggagactcaagtaaccttgcacaataacgggaggctggtgcctgcctcctatgacagcaggcagggcttcaacggaaccttcagcgtggggccttacatctgtgaggccaccgtcaaagggaggacgttcaagaccagcgagtttaatgtttatgccttgaaaggtactttcacctctctaagtgagagcaacaggcaaacaagttttttttttaatttgggtgttgcctcttccttctctatacaacgtggctgacctctgtaactataataatacaggcttaaaaaaatactacaggctgaacttgcttctacgtgtaagacagcatgttccctgaaaaatacctcaaggaattctttcttgcataagcctcttactatttggttcctattcttgaatatgcagccctaagaagcaaacacaccccagggggttggaggtctagattaatttcagtaacttaagaatcaagtgatttcagttttgaaggaagactatagttaaagaggctaaaacttcttccctttgatgtgaggggttcgttagcctgacttgcaaagtctcggggaggggggtcctggtggccgaattttaggtggggactttacacggacatggagcagaagcaagaaattgtcacttgcctcttgttacaaacttattttgttctgagctctgggaggtgctacgaataactgggggagggctggagagatggctcagtgtttaagagcactgactgctcttccaaaggtcctgaattcaattcccagaaaccacatggtggctcacaaccatctgtaatgggatttgatgccctctcctggtgtgtctgaagacagcgacagtaacagtgtacttacatacataaaatagataaatcttaaaaaaaattaaaaagaataactgagaggcacagaaaagaagttacagccaggggcacggagactttcagtggcttgaaagagtgcagccacagtcatacagcccaggcatgtggtgttcaggttaaaagagactgagctttaccatcgttgttattttgtatttctgttatatcctaagttgtgtaagactcaaagtccaggctccgtagacggtccggcttttgcctccattacactggtttggacatgattttttcatcatttttaacggccctgattcagctacaggttttactttgagatcccgactgtactgtattttctttgtcatctcatcacagcaacgtcagaactgaatctggagatggacgcacgccagactgtgtataaggcaggagaaacgatcgtggtgacctgtgccgtctttaacaacgaggtcgttgacctgcagtggacttaccctggagaagtggtgggtaccccgggataaggagctcacggaacccccacaacaggacttgtaactctacacaccagaggtgtttctcttggatgggcacatccctgagcttctctgggcctcagcttcccatctgggcaatgggcacatttgactccaggacttttaatttttctcaatcaggcagagtttggcatgaccacaagggacatgctccccttgagaaggcagagacaagcaggaaggttctgtggctagaacacaagcattaaagcattagaaaggcaagaaatgcctggattgtaaatattagccgattgcacagtcatgtatcctcactgtcttgggtcacacgccttggggttgtgaggtgtctgatagtgttgctaagtgtgtgtgttattgtggcctgtagtcacccagctgcacaacagcacaccagacttattccttccatctgactggaactttatataaagccttattcactctgatagctgtagagagtatataggagctgtgtatgaagaatatgtaaatcgaatgcagaaatggtgtttaatactgtgcatgggggcctcatagggaacaaaacacatgtatacaattatgtatggggaacaaatccatgtgtcaattatatatatatatatatgtatatatatatcatgtatgtatttttctccttactattacaaaataacatatagcacacattacatatatttgtgtgtgtgtgtgtgtgtgtgtgtgtgtgtgcactttacttgcatgtgtgcctgaatgacagaacagggtatcagatcccattacagatggttgtgagccactatgtggttgatggggaattgaactcaggacctctggaagagcagccagtgctcttacctactgagactctgtactctggtcgctttgtcattggagaactttgcttctgcttgccatttctctcccacacttttgctggcttttttttttttttgctgcctggccgttcattcacacttttatttgataatggtggatgtgtgggacagcacctttgtcacaacatgctatggaggtcagaagagtactcttctggactcagctctctgcttccacctttaaatgggttccaggggttgaactcaggtctctaagtttgcatggcaggtgcccttgcccactgagccagcttgcagaagcaagtctggtgctctttcattaggcatgatcgttaggtgttgtcaattgactgcatgcatggtgggacactcacagtctagtgtattatattccttgcactatagtgtgacttggtggttttcttcatgctccattacttttaatccctaaaacacaatacttcatttatgaagtgtttttaatttttaatttttaagccgaaacatatgacatttgacccacaattacataaaatgctttaacactttttttccctcccataaaagtgctgaaaacttctctttgaaaatttgtaaactatggagaaacacagggaaaccttcttctcagagcagcacacatctcagattccagacagacaggcagaccctttagaattcttcattaaaagattgttttgcaatactgatggctgactcagagccttgcaggtgctgagcacgggatccatggctaagctactgccttagcccagcgctttaatttctgcttgccttttggtttatcggggctcactctgtagcccaggctggcctagaactcgctacatagctcaagctggcttcatccccaggggagtagtccctcatcagcctcccgtgtgctgggatttgagctgtgagccaccacacttaacgctagtatcgttttaaagcatggctttttaaaaggatctagatttagcgttattttcacttcttgttactgcatgtgaagcaaatataataatggattcattatggcatttacacacacacacacaccacacacacacacacacacacacacacacacacttgattatgttcatctgccactaactctgctctcttgcccccgcccccacccgtgttggcagagtcccttcttttaggctagtccccttctttccttcatgcctttttacgatttgtttgtggtccaattagcttaattaaagtgacttccaggaggatgggcaaagggttggcgggagcatgggtcacttaccagggtctacattactggagagaatgtctcccctagcaactgctggctactgacaaggcctccgagaggacaggggcctcgctggcttctcccccttctgccttcttatttatatttctattctttaggaggttttatgctttagcgcatctttaggctcacagcaaatgtacaaagcacaccaatttcctacgtgatcccggctcccacctatgcttagcctgccaagtgccaggtcttcctcggagcgcaccgtgcttaggacccgatgagcctcctacactcacaaaccctacaccagggctcactctggaaggacctttttttcacacgaccgttttcttgtgtgccactgcagagaaacaaaggtatcaccatgctggaggagatcaaactcccatccatcaaactggtgtacactttgaccgtccccaaggccacggtgaaggacagtggagagtatgaatgtgctgcccgtcaggccactaaagaggtcaaggaaatgaagagagtcaccatttctgtccacggtacccactgttctgttaaatggctgccgttcgagggacttggttgggaggcacaggctgtggttattatttactgggaactcttgctttcacagagaaaggcttcgtcgagattgagcccacctttggccagctggaagctgtcaacttgcacgaagtcagagagttcgtggtggaggtgcaggcctacccgacgcccaggatatcgtggctgaaggacaacttgactctgatagagaatctcaccgagatcaccactgatgtacagaagagtcaggaaacaaggtaaagggggccattcccaagtcactcccgtaacaccagccttctgagcgctgagggagtggcagtaccagagggaccagcacctgagctgagacgtgcttacggtcacattttaatcacagcttcctcacactttaagataacattgcagcctgacgaggtaatacatccatgagtgtttaacgtaaaatgagaagaaaggactaaaaggttctgtcctccagtggaggacagcatactgtttcaagctaaaggtgaaggtaagatgggatgggatgcgcttggaccttgatggtcattatacttcagcagacattatgaactgattccatgtgtgaggtaattcgaatgtaagtctacatgtcaccaaataccattgtttagagtgcgtctgccccaatccaagattccactgagataagactagggtctcgttagatctgactgcagtgatggtgttggtggctctcatctctaaccactgctgctgctttcctgccccctggtaccgttagtcaaccatgggtctcttgtgtcccttgcatactcagcagacactctgccattgggcaccacaatttcccttgaagtttttgagctatgaatagaaattgcgagtcagaagttgctttattttcttattttttatttttttatttttttgagatagggtctccttctgtagccaggctgaccttaaactctcaacaatccccctacctcatagcctctaggattatggctctgagccactgtaccaattaaagtcattattgacatgtttcttgagacagggtttctctgtagccctggctgtcctggaactcactttgtagaccaggctggtctcaaactcagaaatccacctgcctctccctcccaagtgctgggattaaaggcgtgcaccaccatgcctggctattgccatgtttcttgtttcattagtatcactattattgttgttgttattattgatatatcgttttctgggacaggatcttgctatgtagtcatgcctggccttagacttgtaccgctcctcacgcctcagcttgcgagtgctgggagacacagcgtcttcctggcacagctgacatttcacgggtgtctgagcaggagtacaggctgtaataagtagtgctggcaaggcatgcttttcaggggagtggtgtgggaaagctggtcattactgagtttcgagaacccttcagaccttggtctttccgttcgtgggtggatcaggcagcacaaggtgaaaggagaagtcgctttcatggagttaaaaccagtgaacctgaagactttctcggctaaacagatgtaggctatgaatggcctggatcgtttggccaccaacagccagaaacctggtcgtgaagccaatccaatagcaggcagagacaggcaagccagtgtagcctgcttttctacaggtcctgtgcttgtagggaatattgaagcccatgaaatgctttcccacatttaatatcatttgataaatctcagaaagagtgctctgtgtgtgcagttatcgtattttatatgcatggaagcggaggtgtggggatccaataatttctacaattttgttccatccaaaatacttttgtgtattgggatgttttataatgaaatgaaaagtcaaatgtgaaaatattgtatttatacataaacacacacatacatacagcacatgcaggcgcacatacatgtttgtcagaggataatgtgggggagtgagttgttgcattatagcttgttgaagcagggtttccattggcactgctgctgtgctgaacatttcaggctagctgtcccgagagctacgatgcattctcttgcatttcctctcatctcacgacaggagcgctggggttggagatggagatggagatgggtaccactgcatctgacttttttttttttttgcgggttctgggggttgaattcagcccaccagaaagcaccaagttaagtggtctcatttaaaaagtcttttcttattttcattcagaaatgaggtcttgcagggcaatggtaacacacaactttaatcccagcacttggggaggcagaggcaggaggagctctgtcagtttgtggccagcctgttctacagagggaggtccaaaatagccagagatacagtgaatccctgtctttacaaacaaaacaaaacaaacaaaacaccaaaaacaaaacaaaaatcaaacccagaaatgaggtcttgccagaattgttagctacttggttttctattgaggctatgagtgacaccttcaatgtgtggaaactagatcaaattttagaaaagacattgatattgacaagaaagattttttttaagaaataaaatttcaatcataaaatgaagctgcttaaataatcggtggttatttagtctctacttatggaaataaacttcttgtctcttaaggtatcagagcaaattaaagctgatccgggctaaggaagaagacagtggccattacaccattatagttcaaaatgaggatgacgtgaagagttacacgtttgagctgtcaaccctaggtatgtaaaggtcgtgctcgctcacgggtgactgtcccccagaggcacctcggctcttctcttcaaagccttggaggagaagccagaccttggggtagaggctgggtctgacgcatgtcaggaccgtgttgtcgtgcctgaaaattcaggtccatttggaacagtcctcatccaaaaactctgaaatggccccaaatcggaaactttgatttttatcaggggagatgttgagatagtttatgtatgtagcccaggctagcaatgctcttgtctcagctgtagcccaggctagcaatgcccctgcctcagcctcccaagtgctgagattctagacacttgtcaccacatctagttcaaaatctgaaacattttgaatgctcacacgatgttacaagtggaacatcctgacctgacatcttgtgacaggtcagaaaatattcaggcatataaaaatattgtgtaaaattaccgcttggttatgtgtatgaggtgtatgtgagatataaatgaattgcatacttaggctgagtcctttcctaagacacctatctcattaggatctaacttctgaaatctaaaacacttctggagaaaaatatgtgctgaggaaaaattttaaagtaaagtatgtattataaagtttaaattcttattttagtttttaaaatatttaatatttatttagttttgtgtagtttaaattatttactttaaatcaaagtatataaaggtaaactaaaacttgcatatttttcagcttattctttatttttattactattattattatcatcgtcatttggtacttgaatcccatgctttaaaaacaaatcaaggagctagagagagagctcaatggttaagagcacttgctgctcttgcagaggactggggtttggattctgacatccacatggtggtttacaaccatctttaactccagttgcaggggatctgataccctcttctggcctccgcaaacaccagacacgaatgtggtgcctattcatatacgcaagcaaaacacttgcctgcctctaacttatttgactacaaattggtgaaaagatctttaaagtctaatgatggcccccagacgcttgagtgaaggctgctttcatcagatccattagtcaaatcccgaatgcaaagatagctggaggatctcccttgccttccgaatggaaggaccccagcccaggcactcctcacctccctccgtccagatctgagtcatccaggcacaaagcccccaaacacgggcactgagggagctattaactgagtgggtctgtccaggctggagttgttctgttctgtcttccacaaccggtcccttgaggaccgttcctgaaccgacgggacccttccgcggagggatgtccctccacagccagagacaagagctgctctgccctgacttctcctttcctttcccagttcctgcatccattttggatctcgtagatgaccaccatggctctggcgggggacagactgtgaggtgtacagccgaaggcacccctcttccagaaatcgactggatgatctgcaagcatattaagaagtatggaaaccagatgttccctgttcttgtgtggtcgggatgtttcttccatgacataaagggcctcaagtgcagtttatttctttggttgacctctttttgtattcgcgattcttcctcggcccaaggctcatattactcacaaactatacaataggtttctgaaagtggattccatctcttgatgtgtgtgtgcgcgcacgcatgtgtgcatgtcctcaaagggcctttatttttatattttattctccattgtttttcttaaacatttcccattctctcttagaatgctctataatgtgaagacaaaaagaattgtaagaaccactcttgttcatggattttatctgtatatgtatgtatgtatgtatgtatgtatgtatgtatttagcttgcagtcctgttgtgacataatgtctcactcaccgtgtagccagtgctttggctgaagtcaaacgtaccattctcttgctttgctctcccaggcgctggggttgcaggagtgcaccaccagccctgcccagctcacatttctttctttctttctttttttttaaagatttatttatttatttatttatttatttatttacttatttattatatgtaagtacactgtagctgtcttcagacactccacaagagaacatcagatttcattacggatggttgtgagccaccatgtggttgctgggatttgaactcaggaccttcagaagagcagtcttaaccactgagctgtctcaccagctcccagctcacatttcttatttcttaccataaatgttgtctcggtggctagactggcagtgcaaacagagccgagagccgtgcccacgtgactcctcatacccacttgttctttggaagccaggagagggcactggatcccctgaaggtggagtaacaggtggttgtgagcattttagtaggaatgctgggaaccaaatgtgggccctccataagaacagtatgagcgcttcatggccggcccacctctctagcccctcctccaccttcataggcaggcccatgaactgtgcgcccacaccttgctccacggcaactacctgctttcagaaggccttgagtgcgtctctgctgaaagtgcagcttgctattgctctcctcactgagagctgtggagtgacctgggtcctgggatttctaggtgtaatgatttaacccagaagactactgcagccttagggaccccttagaagctcttcctggggttgaagatgaggagggaggatattttcaaaggagtgggagatttgcattgttgaacgtgtttgatgctatctcctgagtttgctcacaggtccaagatttgagataagtagttagattttgtggattttatctgcctcctccacaaaccattaactttggttatccacgtgagattactcctcttgagcaggtgcaaatggattttaatgtgaacaagcaccataaaacgagaactcccaaatctatgcaccataaaacaaggactgccccaccccccaaatatatgtaatgttagcaatgtggaagggtcgttgtgactcctggtaatcagatcttcatttgtgtcacattctctctagatgtaataatgacacttcgtggacagttttggccagcaatgtctcaaatattatcacagagctccctcgccgtggcaggagtaccgtggagggacgagtgtccttcgccaaagtggaagagaccatcgcagttcgatgcctggcaaagaacaacctcagcgttgtggcccgtgagctgaagctggtggctcccagtgagtttctcagtaggcagcacaactccagctcaccagccacgccctgtgttcctcaggtgggacgtggaatcccagacagggctcacagagtggcaaaggtcccaagacagttcagccctgtctggacttgaagcactggtcttcctgccaagccccctttgtttgccctgacccagctgcgtttgcagagctgcaggcagctttgcttgtcatgtagaggatgactaagcctctgtcatctgagcactggggtctagggatagaaagtgaggaaggggcttttgcctcacgatcctcagaacaggtgggtcaggtttgagtcagaaacaaagaaaggaaggaagccgagaaagagagagagagagagagagagacagagacagagacagagacagagacagaccgagagacagacagacagacagacagacagaaggcaaaattcacctttaccatgaaacttatgagatggatatttctacaaataaagttgctcctaacttattgttggtctccatcgtctttattcaaattgtccaaaaggagatccttggagtgtctttggaaagaaagtctttgtcccagggaagaatcacatttagttgcaagggtacaagtgattgagggatgatataggccacccctaaagtgacctgggatccccaacacttccccaccagcagggagataggccctagttcatttctttctgcctcccgtcttattctgccgtccacaaataactgacaaaattctctactgtctctgtcttgccttccagctctgcgatctgaactcacagtggcggccgcagtgttggtgctgttggtgattgtcattgtctctctcatcgtcctggtggtcatttggaagcaggtgagtctttggaaccattagaatgagaacaactgtatccttcggtgtttggttcagagaaggggtttggtaattccatgggtggtgggtcatgacagactttcctgggtccagtcactttggttctgtagtgaagctcagttgccttgaactctgggaattcaccagttacccaccctggtcattacagaaaccacggtatgaaattcgctggagggttatcgagtcaatcagccccgatggacatgagtatatctatgtggaccccatgcagttgccttacgactccagatgggaattcccgagagatggcctcgtgcttggtaagttcttgtgagggtaacctcccaggaccccaatgttacctacatagcttgctacgtacagatctgggacagaattagggacttgaacgccactcacagagctggatatggtagctcacactcttcatctcagcactggggagactgaagatggaggactgtgagttcaagactagcctgggctacatggacatcttcaacatgagctcattggggctgagaaggggaagtcaagggtcaagaagttgtttagcctttgtaaggccccagattctatcccccaaacgaacaaagttagtgcaccgggtatagtagcatacagttggagggcatcagcagacggatcctgagttcactctcatactgggtttcaggccagcctaggctacatgagaccctagagcaaaatgccaaaaggaaagagtcttttcttttttttaatgcacgtgagtacactgtagctcagacacaccagaagagggcatcagatcccattacagatggttgtgagccaccatgccgttgctgggaattgaactcaggacctctggaagagcaatcagtgctcttaacggctgagccatctgtctagcccatagaaagaaagtcttaattgtatcattggaatgattttggcctgacaaaaatattgcaatggaaaaaataaagttcatttttataaccgaagaggactagctgagaagtgagagaactcagtgggctacagtcagtccgttttgaggagtcataaaatacttctttaagtatatgtaatgtaggatggaaaaatatacgctggtgttgtactgcatgcctctaatctcagagacgtagtattgggagtccaaggtcattgttaactatatagagattttgagactagcctgagctatatgagatcctgtctcaaaaccccccaaacaactaccttccgtgtgtgtgtgtgtgtgaacacacacacacacacacacacacacacacacacacacacacactttaaagcaaaacataaaaaggaagggagccctctggggctatgtcacaatcaaggccctcgccaggtgcagtttttggctatcgtctgtctgtctgtctgtctgtctggttccaaagtacagcagagctaggcgcttaacagtcactcaagctgaacctgtgcttctttattgtattgtccaccactgtttcccacacagagcttagggaagttaaaaagcagtaaaataggcagggagggtgggtgggtgggtgtgcgcgagtgctcgctcagaggtggggatggagtagcagagcccctgctatccagcacgttgcctcgtcctcttggcaaggccacattactggaaaagcagcatctttctaggcatggatggcggaggtacatacagaccggaagagcgggcatgtccactctcagtgtctttctgtgcctgggctgccgtgatcagactggcttcctggaaatgcctcccttagaccacagtctctttaagagtggacaacagctttgatttctttgtctctacacacaaagaagggctgtgctggcacgtacacccccccatcccccccccccccaagtccagggaccttggtggcacgtacagcttctggtccaggaaccttcctttatgacaaagaagacgagtccaagtgttcagtagtgcactcctcagaatcagtggcatttggaatacagacgatttccagtggttaaggatttgttaatgcaaaggttgcctctgtgtgcatctgagagacagaagggtagagaaccagggggttgggtagaagccacggaggcaagtgcacaggagcccagggcctggcgggagcccatgttcacaccagggaggactgtgctttcccctctctcatccatgttttcctttccattgcaaatgccatttgacaaaagcaattacactaattcccttccctgtgggctcaattcttttttttggacatgatgacttggaggaataattaggcttactcaacacaggaaaaacacccacccagctgtacaccctcgtgcactggcctctgccagtgaggccgaggggccgggagctggcggtgatggctctgtttgcctacaggtcggattttgggatccggtgcatttgggaaagtggtcgaaggtacagcttatggattaagccggtcccaacctgtaatgaaggtggctgtgaagatgctcaaacgtaagtgtttcttcccagggatactttgaacatggacatactaagtaatttaagagtaaaatcgaatttaatattatattgagattctttggactgtgggttgagacttagccaccctccaaaattaggtttcttttgttcttatccctcattgttaaaaatcagatgctttcatttttggtaagagtttgtttttttgtttttttgtttttaatcttaaagaccagagactctggggctgggaaatggctcaatgggcaaagtgctttctgcgaaaacatggagatctgagctctgatccccccagcatccatctaggaaggcagaagtagtggcattcccctgtagccccaaccccacagggaggcaggatgagacaggtaaatcctggaagctcactggtcagctaggttactcaactcggcaagctctcaggttcactgagagaccctgactcaaaatataagatgtagaaacagttgaagaagatattctgatgtcagcctctggcttccatgtgtatttgtagacaagggcattcacacacacagacacacacacacacagacacacacacactcagcagtctagactgaggagaccatctagtgctcttcctttagactcttggtaaataaatactattgaatcacaaggttccatgtgttcttctgagaaccagaagtagggagttcagttgtactaaaatctggcttacttcaacagccacagccaggtctagtgaaaagcaggctctcatgtctgagctgaagataatgactcacctggggccacatttgaacattgtgaacttgctgggagcctgcaccaagtcaggtaggcgccttgttctggggttcctgggagtttctgggaatcctctttgttgtggaaactttttgttttgttttgttttggtttttcgagacagggtttctttgtgtagccctggctgtcctataactcactttgtagaccaggctggccttgaaccaagaaatccacctgcctctgcctcccgagtgctgggattaaaggcatgcaccaccacgcccggcttattgcaggaacttttgaaccagtctcaggcacagattgccctctctgcacccccaaacatgcctcctgaggataaagctcatacgtggagctcactgggtcccccgactttttggaagttcatgggttcagagaaagaatggcttctttctgttctccatttttatactggactgtttggtacccacaggtcccatttacatcatcacagaatactgcttctatggggatttggtcaactacttgcataagaacagagatagcttcatgagccaacacccagagaagccgaagaaagacctggacatctttggattgaatcctgcagacgagagcacaagaaggtaaacatgagaggagcacgtgtgtccttgtgtcggactcagacatggagaaaagcctgtcctgacaggttccaggcctgcagatcctaggccagcaccagaagccacgaggctgggagcctacctagccatccgcgtcagtgtggatgggtacacactgcaggtgtcttgggctaggtcatcacatggcaaggctgtactgattggtttgaatgacggggtgagggggggtgggatccttctgagagccattctcttctctgtatgtgctttctcaggacatgtcaaaggatgtcattagtgctcatccccaggacgagttgttggtccttgctgaacctgggccagggatattcgcttgtctctactgataaaacttccaggtgtccgtaaagacccctgagagtagacggacctcccatgctcttgagtcacttaatgggctccaaatgggtggtcagtttaatgagtcgcaggaactgtgtgtctgagccacatggccacatggccactgaaccttcaggggacagtgactgccttcctgtcatgaacttttcaacagtttagtgtagcagactaagaatgtttcttgtgtttatgggaatgtagcccccaccctgacttccctgtagctcctggggatgtctctgctccttgtgaggatgtgtagaagacagagaagtaaaacatgaagaatcgggctggagagatggctcagcgattaagagcactgaatgcccttccagaggtcctgagtgcaaatcccagcaactacatggtggctcacaaccatctgtaatgggatccgatgccctcttctcgtgtgtctgaagacagctacagtgtacttacatataataaataaataaataaataaataaataaaaccaggaagaatcatggagactaccttttggggaccccagctggccctaagatgtttcccttctatttagatggtatcgatgtacggactctttagaagtgcttgcttactcctggatagagttctgatgccttccatgtcaccagagtcatcctcccttcccatcacactgggtttgagatgacctgtgcgctcatgtctgattaatgttcatctgtctgtctggaccaccccatgcacagtgtgcccatggggattgtttatgctcatccccaagcccttgatacctctctcagttaatggcacactctaggtacccaaattagcatgtgtttagttctctactgagtgactgcattagaggccacccggggtgaaatttcttcttcttcttttttttttttttttacacagttatgtgattttgtcttttgaaaataacggcgactacatggacatgaagcaagctgataccacacagtatgtccccatgcttgaaaggaaagaggtttctaaatactctgacatccagagatcgctgtacgatcggccagcctcctacaagaagaaatccatgctaggtaaaagtgcccatgctcattctggcaaatatgatctttctgtggtttaacttgctgctcagagggagggaaaccgggatgacaggtagctctgccaagcagtgtgctccctaagtgcacggctgcgcagctgggccaagatagctttttgtagatttgtgctctatgtgtgagaagaataaagacgcagggttgctgatgtagccctatggtatattgcttgcccggtgtatacacagttccttctctggaactgaagaaaaagtatatactattgtaataataataataataataaagacagatataatgtaatcaatttctcagactttaaatgtagtggctttaaataaataattcattctgctatgatggtctttgcttgttaacatgtcttttgttaaaaaaaaaatggaagtggtgataattggtgttttctcaatggccaatctgaaagttggcaatcttacattgtttcctcacattttttgttttgttttgtttttcctgtgagcgccataatcctggcttttagctctcctaatgtacatgttgtgacactaactggagagcagacagtttgaggttgcagtatctgacaagtgttcctgttgacttttgtttgaaagcaaacccccctcctgttttgaaaactgtgctgggatgagttcatttgtaaactccggggtgccaccggtgatgccacaccagatgggccacctcatgccagctctggggtggcgactccagggctcttgcttaaccacacactcgaagtgagcagtatctaggcaggcctgagcttttcctgtgattctggttttggggggggaagggggggaattgaggctctcatcagctgctgcaataatattcagctgccatggagattgttttttgaaaaatcgctaacatgctctgaatgctttcagggttcttaagtgaaaggtacaagccattaaaaagtatgtgctggctttgcaaaacttaagcacgtaataatattttccagttctgtagctccgtccacttcccattgccaaatggttgaacttccaaaccttcttaaagtttacccagtgagagttgttggaacgctgttacctttccactcccaaatggttaaaaatagtttgcactgcttcccaggcagagctggtggacttggcaccagggagagggggcccgagtcatgcttgccctgggtcctgctggcaggcagaccacagttttctggccttcctatagctggctgaaaaaaaaatggctggagctgctcatcaccggcctgcaaatcatcaaaaagtactgagcaccactggcctagattgcctgcctcctgagtgtgtgtgtgcagggcagtggacaggttgcaaggggaggtccatgccccatcctgggcacggcccttgaggatggctgcctgctctgttcaggaggtgatttaactggcaaattagacacaaagcaaaataggaaagaaagcaaacctcagaatcatcatggatggtttcagtgtgtgtgtgtgtgtgtgtgtgtgtgtgtgtgtgtgtgtgtgtgtgtgtatgtgagagagagagagagagactccaagatggctgaggtgatgtgacaaggtcaaaagtgaaatccaaggtcaaccgacaatctgtctgtgagattccgtggagggagtaggtttgactaatcattgtgtgtataattctccccctgccccgcccagtctgtgtttgtgcctgccggatgaatatctcttatctgaaacgcttggaactgaatgtgttttgaatatatttttttcaaattttggaatatttgcatatacataatgagatatcttgggtttgggagccaagtctaagcacaaattcatgcctgtttcatgcacacctcagacacatagctgacagtaattttatacaatatttttttagtgtgcttgtgttttgactgtgatctgtcacatgaagtctggcatgaggatacttttaccagcgtgctggtgctaaataagttttggatgtttgaagcatttcggagtcaggattttgggtctgggatgctcaacctgtgtatatttcttttggaagaaagaactattattttgttcctttctatttttatagtactagggcatgaaacgtgtgcctcgtgcctcctgggaaaatgctctaccactgagccacacccacagcctcctttgtatacttttttgtacctagtaaagtctaaaaattatgacaaaaatgtgttcaaaagagatctttgggcaagcttctgcaacctgccagacaaggggatggctgggtactgggacgccccccccaccccacttttacctaacaccaacatatttggttccttcccacagactcagaagtcaaaaacctcctttcggacgatgactccgagggtctgactttgctggatctattgagcttcacctatcaagttgctcgaggaatggaatttttggcttcgaaaaatgtaagttcaaggcccagagacctcttcagacccagccatgccttcagagggaggggcatgggaggaaattggaggaggaaggtctaagagccagagtatcagctgctcagtttaacccgcctctctcacttcccctaataggctgggagtgtgactcactgggagtctgcctttctccaggaggagtcagggaggggagggaaagggcttcctgccagggcacttttaagtgcccatcatggactgggtggtcttgcaggagtgctgcaactgggccttggctggagccattctgaagtgatttcttttcttcccacgtagtgtgtccaccgggacctggctgcccgcaacgtcctcctggcgcaaggaaaaattgtgaagatctgtgattttggcctggccagagacatcatgcacgattccaactacgtgtcaaaaggcagtgtatgttcccgccgtcctcgatccttctttccccatccctttaatctcagaagttctgttatttcttaattcaggagccagttatcagctggttccagaggtctcatagggaaagcttaggtataacagtcagacagcctggtatcagctccaccctatactagggttgctgtttggtgaagtctcttgtctatttcatgcctcagtttctctgtttgtagcttcatccgtttcctaaattactacaagggaatgatttaggtaattcacacaaagtgccgtagacagtgctggacatatagaaacatctatcaggatctggatagatggctcactgtcacatgctggtcttccagaggatctgggtacaatttccagccctcataaggcagctcacaaccacctgtaactacaggtctagggatctgatgccatcttttggcttccgatccatgtagcatacagacattgcaggcaaaacacccatatgtgcaaaattaaaaattaaaaaaaaacaattagacacatgcagtgttatttcctagtaaatcaagtgtgtacatgaatatacaagtgttcatttccaggggagagctctagtttttaaacctctcaccagatttccaacagaccagtttaaccttgagaacatcaagactgcttgaatagatagaacatcaccgtttctttggtgatagtttcattgtctacttgatcctccctcttccatcccttcagcctgtaagcccaggagtcgctgaggacacatctgtcacccattggtgcaattatatgtccctctgttccactgatgtaagacagcttactgggctgcagcctctgcttagaggacagtaatctctgtccgtgctctgtgccccggactcgggctcaatgactgtagccgtggctcctcccaggcaccccgaacaagttgctaaacttgggtggagatgatttcttacctaaggttatgaatgtctactatttcttcgtagtctgggggaaggggtgtgtgtgtgtggaaggatgctaacatgaagggcgctgtgttatatatcttcccagacttagtatttcacctgctgtttggaccacctttgcaaaagagacgcgtttgagtgtcttgtctttcggtggtagaaaaccaaacttatttcttactgcttggaagctgacactggtttccaggatgctgtatctatctattcttagttttgttcctagggtggcctgaaaactggtctggtcgaaggccacactttattggtaaattgaaggttgaatatgcttagcatatcattcctttggaagctatgagaagtggcgttgaccactccttgtctgttattattaagaatctacacagtggggctaaagagagagctctgagagtgacgtgtttgctgtgtaagcaagggcacctgagtttgatgtccagaaagcccgacatagtggccagtgcttgtaacctctgtgctggggagtcagggacagacccctcgagctccttggctagatattctagctgaattggtgagtcccaggccaggagagagcctttgacctccacatgcacacacactcatgcaacaagtacttgcatacacacgggcatacacacacatacacacaacctacctagttgctggtgaacagtaaacccatgagagacagaatgctggcaagatctttaatgcattattcccagcccaaggagaacccctttctgtttctccagacatcagagcgtagcccgtgggttcatttcctctctcctttcccacagactttcctgcctgtgaagtggatggcacccgagagcatcttcgacaacctctacaccacgctgagtgacgtctggtcctatggcattctgctctgggaaatcttttcccttggtaagagctcaacggctactgtggctcattctgaatggcactagaagggacatgagtctgtcccagttccagggggacacatgcagtgtcaaccagtcacactgaagcctcactccacaggtttacccctaccatgtctgacataggctgagtagatccagtcagggtctctgtgggctgcttcctcacccctggctactggcactctggttatgcgggagtcacttgcccccgtgggaagtgtttcccatggcatctgccttttcattttgaccttgattagagagatcaccaatagttcctctcccttacttgatgatgaatgatgcccaggtgaaaggtgatgtggcagggaacccgaggggtgtatgtaactccacatctcaaagagaaaaaaaccgttcttaacattcggtcacttgtcattagggcctgagcaaatcaggtgcctgctgccaagggagggttgtaagggaatagtgaggtttgactggactttggggatatacagattacacacttagaggtaaaccctgtaagctgtagtgtgggttcagagacaagacaaaggagacttggagtcgttttggaaacttcagagagggaattgaacttgacttggccttggccatcccacacactgctaccccttcagttctcctttttctgaggccctgcatgcccttaaaacatcagactatggactgccaggtcctagctttgccttgggctgtgatttgtgaacacttctgaagatgatgttctttagtggcgtagaacacctctccgcctcgttcgtgtgtttgcatttagatgtggttgctagaaacagcattcagtgcgttagtgaattttgtgctaaagttgcccaagacgcttggatttagtcacccaagaccgctatggcaagtctgaaaagtcctctggagtcaaggagatgaaaatatacagattctttgaaagaatcaggccctcaggggttcaggatcaaaggtgtgtggtacaaggaaaaaccctctgtcatcgggttatctctggctcgtaggtggcacaccctatcctggcatgatggtcgattctactttctacaataagatcaagagtggataccggatggccaaacctgaccatgccaccagtgaagtgtgagcttcctcctcacccacgggcccatgtccacacttgggggggggtgtctgtggggtggctgccgtctacgggcaggcccacactcactctgagctctgcctctgcagctatgagatcatggtgcagtgctggaacagtgagcccgagaagagaccctccttctaccacctcagcgagatagtggagaacctgttgccgggacaatacaagaaggttggttcgagcctgtgacagtgggcaggaggaggcgggaaggaggagagactagtgagcagttatgccaacaagcagagctgctctgagctgtttgaaaggaacgctttcaaaggaggacacggattgtgtgatcttgtgaccagggctttggggagtgctctataggaccccagtagcactgatgaatgagagcccctccctgcctttccacagggctctctttcatcttaggtgtgagacacctgtaggcacttcattctccagacatctgagtatctgaagctaccaagcagttagaactctcaggacatctgaggccattaaattgctcatttgaatacacttaaatccatttgaaactggtttttaccagctgactggaggggacaatcccagctgttatctgtgactccagctggttttcagtggcacagaaagcattgttcaaagggacaaatgtaatttcacgggacctacgcaggagccgtaaatgaatgtgacaattttccgccgaggccttgagaggggaagccgcacactcccgtgtgatgaatctcatctcagactaggcaccgcagaccgactcggttctcttccctcttgagaggcaacatcagtgatttgccctagagcctctcatcatttgagctgaaagttcagtgtgtcagttttggtccctcagcaccggtttctcctcacattcgtgatgctgggatcgtgtaggggtaatttacctaggtcagtggaaggttctctgttggtgggaagaggaagacactactgctaaaactagttgtctgattctgtctgtttcggccggtgccgcatacacagacggcgaaaatctacgtggtgtgttgactagggtgtgtgcctcagaggggcatagctaggtaatttgtttttgtttgtttgtttgtttgtttgttttttgagacagggtttttctgtgtagccctggctgtcctggaactcacactgtagagcaggctggcctcaaactcatagatctagagatctgccagcctctgcctttgaagtgctgggattaaagatgttcatcatgatgcccaatttacgtttaggcttttttttttctttttgaatctagcctccatacagacttccggtatggatatatagcccccctccccccatcagcataacctcatcactattgattgatttattgattgatttgttgttgctttcttgctgatggccactttgactgggtgagtggcttttcttctttctccagtggctaaggatattgaatgctttttaaaggatttattgaatatttacatttattcttttgaaagctaaatagtcagtttattagccaatttattgactgagtatttgtgtgagtgtgtttgctgctctttatatagcctgcatactaatccattgtctgatgtatatttatatatgtggcagagctttccccccaattctttaccttctcttttcacttttgtgactgttcccaaaaaacaaaccacaaaagctttattatttctttcctcttttattattttattgttttgtcttgtgggtttttttttgttgttgttgttgttgtttgagtttttttgagacagggtctcactttgtgtctctggctgacctggaacttgctaggtagaactcatagagttcttccttcctcttcctccctagtattagaatccaccacacctggatatatatttactgttttacacaaggtctcactatgtaactgtggctggcctggaactctctaagtagacctagctgacctcagcaaggttctgcatgcctctacttcctggattgaaggcatgtgtcaccacacccagctttacattccatttgatcctatttgtcattattttatgtgtgtgagacaaggtctcactatgtagccctggctgtcttggaactcgcaaagatcctcctgtctttgagtgttgggattaatggcaaacatcacttgcccagacccacttgctagtccttgatcatttcctgtgcttttggagtctgactcagaaaggtcttgtctatgtctacatcttgaaatttttttctactaagtctcaaagctttaagtctttcattcaggactttgattcattttgaactgagttctgttcttctagttttccaagttgttaaataggctgtcttctctccagcgtcagcttggcctccctatgtcaaataggtggctatatctgtgtgcttatttctggatcgtctatcttgttccaattgatacatttatttatagttatatagttatagataaactagttatatatatgatatatatatataggctctattatatagtttgaggtcaggtattatgagtctggggattataatatttcaaacattgctctagctatttggggtctttttttatatgaattttagaattgcatttttagttctgtaaaaaaatgttgaaatttgttggggattgtgttgaagccaggcttagaaaggcaagaaccatgtttcttctaaatatagaaactaatttaaaattatgtgtgtatacatatatacacatgtgtgcacttatttatctaaatactaattttatttttaaattttaacttatgggtgtatgagcatatgactgcttgtatatatatatatatatatatatatatatatatatatatatatatatatcacgtgtgtgtgtgtgtgtgtgtgtgtgtctgtggaggccagaagtgggtgtggaaatttttagaactggaataatataaggttgtgagccacctaatgtggatgctgggaactgaacttgtgtcctctgcaagagcaacaaatgctcttaaccactgagccatctcaccagtctctatatgtaaatgtatacctgcacatgcgcacacctaaacatatgtgtatgcgtaggtcaggaagcaagaaaggggatcgtgagaagggaggaagagagcttaaaggttggggtggagagagtcatgaaatatatgtggcaaattacatgttctaaaagtctgcatttattttacagtttgtcagtaacatctgattaattgtgttaaatgaatactttcagagttatgaaaagattcacctggacttcctaaagagtgaccatccggccgtggcacgcatgcgggtggactctgataatgcgtacatcggtgtcacttacaaaaatgaagaggataagctgaaggactgggaaggtggcctggacgaacagagactgagcgctgacagtggctacatcatccccctgccagacattgaccctgttccagaggaggaagacctgggcaagaggaacagacacaggtaactacagccaccttcctcgtgctagcctgcaggggaggactcagggagactgaggccaccagggatgtaaactgtgcgtgggcaacaggtgcatcattccagggtaggtcacaaaggtttgaaaatacctcccatgtgattctgaggtgtcctcttactcctggtgagcgcttcgtttggtcaccaaagctggtgatgaaaagctccactctgagctcatttttttgatttatttatttattatatgtaagtacactgtagctgtcctctgacatcccagaagtgggcatcagacctcattatggatggttgtgagccatcatgtggttgctgggatttgaactcaagaccttcggaagagcagtcagcgctcttaaccactgagccatctctccagccccactctgagctctttttttttaaaaaattaggtattttcctcatttacatttccaatgctatcccaaaagtcccccataccccccccccactctgagctcttaaacagccatggagcaaggaaaaccttgagagaggcggggttgggatatgaggtgctccatcaacagcctttagccttgcatgcggtgcagaactagctggggaggactttcaaactgctgattcacaggcctctcaccctgtcagtctgtctgtccctccttcctctggtgggctgccttctacttctgttttgtgtgacgcatagggaagccacctcacaaaggggaaggagtcgggggttctacccacctgcagatgatcgtgaatttcaaagactcagatggacaaggcacatggtgacccaaggcagaatatggaaaagccagcaagaatctagagaagggaggagaggtggggattttgggcaggctggtgattttagggatagtaacactaacacctaacacttttgttttaaaaatgtttagtacacagtagcagtgagtacacctcccaattagtgggtacaggggttgacatttgccccattctctttatccagattggtgtcacataaatcatcatgactacagacacacacacacacacacacacacacacacacacacaccttatttctcacccagtgactgaaagctaagtagaaaacaccaagataattcattcctagtattctgcgacactctttcctaagaatacgatcattcatgctgtgtctatcatgaccacacggaagagagtgaactgttaaagaaaattagagttggaggtatagaattcatgttggccatatctgaggccataggttcacatccctgtactgaaagaaaaaagagaagaagaaaaggaagccaacaaccggtctcagattcatttcatacctgggctttattcaaattcagttgaataataactgctaatttattgagctctttatatgtttatagttatcagattattatcgtatttaatcatctcagagatctttatttttatttttattatgtatattttacttttgagattatatttatgtgtgtgtgtacagatctgtacacctaagtatgtgactgcaaccggcttagactgtatgatactcgtatgtgtacgttttcggggctgaccatttggtattggatagccaatttggtgtattcgtccctggggaaggccctttttctggttctcaaccttccttcgttatctgtcgctcttggtctagaaaagaggctgcctgagctccttgcttacccattaccgtgcctattggtgccgttctggtgcaggtcttgcgggcaaggcttctatgccttgtgtaaatggtaaactgaagacttttctcttctgggcctttagacccagaggggcggggtgaacaagaggcaggggcctggcaggaagtgaaggaagtgtgggatcccatccttctgcttcctaaggttttttttttcccttctctctcagtaccttttgattggctgttgcttgttctctcccctgataggctgaggagggaaagtagaaactcttactcttgttagccacgcccacaaaagacccctggcaggaaaggcagcaaactgacctgcgcagttggccctgttttggttttgtgttggctctgtgcagcaatggccagtgagtggctggctggctcagccgctcactggccatgctcggccactcatgcttcaacaggaaaggaccttgtgcatgaggaaagagtcccgctgcttcaggcagccaccctggaaatgcagccccgtaggcagtctgtccatgaccttagcctttgcttttcaatcccatcagctcacagacttcggaagagagtgccatcgagacaggttccagtagttccaccttcatcaagagagaggacgagaccatcgaggacatcgacatgatggatgacattggtatagattcctcggacctggtggaggacagcttcctgtaactgacacgctccgggtatcatcttctccgggagcctcctcgggataaccttaagaaaaccacttcattgcaatgcaaaagttgagaagaggacttgggtgatgtggagagagaaagttcccgaggccgagggccttggtaagcctgtgtggatgactgggatacttggattgaactttatccgtgttgcctcttgcaacgcgtcagtagcatctcagcggcgtgtgcggtttggaaatggatggacaagagagtgactggccacagaagacgggctttgtgtttccagggcatgggtgagagtcccacacgcgccaacttgtactgcagacaactccagcattgtaattatgtaaataactcttaaccgaggatgggtttagatctgtgttaactctcctctccggacctctgaagagaccactcagtccacccgtgtgcttccttccttcttggaatccggtaccagctgctgttgaattttctcatgaagtacatgcaaaaccactttgaactttggaaggtactggaaccgtcgtgttttactgtcttgtaagtgttaaagaggcaaaaagataaaaactaaccaaccgtgagtagtaggtttgggtcttttagggcacccaagaattcctctgtatcttgtaatctgtacttataacactactactgtttaacaagaatgctaaatatgtaatccgtaacatgatttctttacagagaaagcacaattaaaacaaaacccttactaagaaggtgacaagtttggcagtttttgacatttatattaagtaacacgtttctcaataaagtataataggtttagcggattaaagttagcaaacactagagagcagagtgtaagtagttatccagaaagtcaaacctttttgttttgttctaagcagtctccctaatccaaggcactaggaacagttaatgacctctgaagtactgggataagcaaagcagaaacccggtgggtgtcctaagtgttctcagtagaaaggcgtacgcctgagcccagtgtgactcctcacgctgtgtgcgaccttctggaagagactcattcacaaaaaggactcagatgggcagaatgtccatcagatgggactcagatgtctctcctgaccagtgatggcttggatggatcccgcccatacctacttttaaagtctgtgacttttaaggatgcttcaacatcagcaccttactttttctctcttgtctcagacgagaaagaactgcaaaccctgagaccacaatggtgctgttgaatgaaggctatgtgggcatcagcttggctcttcccttcccaccattaactacagctacagttactagcctcaatggtgtcagacctttgccccagagatttggaattacaaggtctgacgggagcaggaagctatatatatgaactgcctggtgctcttgaatagtcagtgttcagaaacactggcttgggttactgttgggggagggcaactttgaaatttggaacggggctagaagtcaaccatgcaggaaggctactgtttaagttcttggcttcatgtcaataacatgtcaatgccacgtatgcagctattcctacccttgatttaagtttccaggcttggctgaggctgagaaagcaaacatcttgacttgggaacatcttcccattctagtcaacgtgggtaccacttccccctggatgggagaacctgagcttgctcgcctcaaagtgtgtccgggaatgatgcaagtctgtgtgtcaggtctttgtgcaaccagctccatattcggtggagaagattaaaaaaaaagttttctgaatttggggcctttaggtggtaggctatcaggagcatccgaactgtcaaagtggttagtgtgagttcattggcattctctgccatgtgtctaattgctgactctgtatgaatgaaacatgggctatgattactgcaatcactgtattgcttctagcaggtgacgctttggaaggcacagaagcaataacaaggtacttgactacctactggcataatctcaatgcaaaccccaactttcccttttcacagtaagtgtgaagactgagccagattggccaattgaaaaacaaaaacctgactagagtctttcgagccaattagacttgaactacatccgtctttctagactcgtggctggagcagtctgtttaccactcatttgcacagcctctgtttgttgcttctttttattctgatgtcgctttgggccttgcatgacaccatgaagttggatgatacttctcagaccagcagtttcccatctttagctgtacccacctctgagattcaatgggaatacgttcacttttgttttttgagacagggtctttctacgcagccctggctgccctggaactcactgtgtaaaccaggctagccttgaactctcagagatccactgtctctgtacccccagtgctgggattacaggcatgcaccaccacactcagcagggatacatttttatttttaaacagtgttttgactgtatcctgatttgttttctttctggcctcctgcagagtccctggaagaaaatttaccaatctttcctgctttctatttttatgatgacaatcaaagcttgcccgaggaacacaatttgtgacttttaaaaaaatgatcaatgatgtccttaaaaaaatgtggtctgccaacctgtacaaaatggtcctatatttgtgaagagggacgtaagataaaacgatgttatacatcgatatgtatatatctgttgctatgtagacttggagaatactgccaaaatgtgtatgacaagctgtatcactgcctttgtttatattttttttaactgtgatattccccacaggcacgttaactgttgcacttttgaatgtccaaaatttatattttagaagtaataaagagaaaaatactgacatgttcccaacatggtggtgtggtaagtgtgtgagagcgacttactccataggaagggtcttccaatacaagatggcttccagatacccctgttcatgttttgttttaaaaagtgtaaatggagatctttatatttcaataaatgatttattatatatgacttaacgtta

SEQ ID NO: 17 - DNA, 2962 bp, Homo sapiens
  source 1..2962: mol_type = genomic DNA
gcagtgtcactaggccggctgggggccctgggtacgctgtagaccagaccgcgacaggccagaacacgggcggcggcttcgggccgggagacccgcgcagccctcggggcatctcagtgcctcactccccaccccctcccccgggtcgggggaggcggcgcgtccggcggagggttgaggggagcggggcaggcctggagcgccatgagcagcccggatgcgggatacgccagtgacgaccagagccagacccagagcgcgctgcccgcggtgatggccgggctgggcccctgcccctgggccgagtcgctgagccccatcggggacatgaaggtgaagggcgaggcgccggcgaacagcggagcaccggccggggccgcgggccgagccaagggcgagtcccgtatccggcggccgatgaacgctttcatggtgtgggctaaggacgagcgcaagcggctggcgcagcagaatccagacctgcacaacgccgagttgagcaagatgctgggtgagtccgagtcgcagacccaggcggccgggcgcgctggcgcgaatcgctaggccgatttcttaaaccccaaactgttctttgcgagcctgacgcccaaaaccaggggtgtgtagcggccacgtcctttcttaaggctctgggttcccttcccgcttcccgccctccgaccctccaaagcagctttccgccttgctctccggctcccggattccccaggtggccgggggcgcgggtccaacggctctgggaaggcgacttcccggcacctccgggcggcgcgagagcacccttggccctgaactgggccggttgtgtccatccctcgaccccttccctagttaggtgtccttttctgtttttcgaacgaccgggtgatgggtgagcggaaagccgcttccaggagaccaaaagaaaggggtgcctttagaggacgggtgttccccaagggctcggactcaggagtcccagatctccctctttaacttcaccccggttgcgcaattcaaagtctgaggggggaggtgcgtccaggtggggccaggtggggcctggagcgggagcgcagccgataagccctgcgcccctctcccccttccttccactgtgcaggcaagtcgtggaaggcgctgacgctggcggagaagcggcccttcgtggaggaggcagagcggctgcgcgtgcagcacatgcaggaccaccccaactacaagtaccggccgcggcggcgcaagcaggtgaagcggctgaagcgggtggagggcggcttcctgcacggcctggctgagccgcaggcggccgcgctgggccccgagggcggccgcgtggccatggacggcctgggcctccagttccccgagcagggcttccccgccggcccgccgctgctgcctccgcacatgggcggccactaccgcgactgccagagtctgggcgcgcctccgctcgacggctacccgttgcccacgcccgacacgtccccgctggacggcgtggaccccgacccggctttcttcgccgccccgatgcccggggactgcccggcggccggcacctacagctacgcgcaggtctcggactacgctggccccccggagcctcccgccggtcccatgcacccccgactcggcccagagcccgcgggtccctcgattccgggcctcctggcgccacccagcgcccttcacgtgtactacggcgcgatgggctcgcccggggcgggcggcgggcgcggcttccagatgcagccgcaacaccagcaccagcaccagcaccagcaccaccccccgggccccggacagccgtcgccccctccggaggcactgccctgccgggacggcacggaccccagtcagcccgccgagctcctcggggaggtggaccgcacggaatttgaacagtatctgcacttcgtgtgcaagcctgagatgggcctcccctaccaggggcatgactccggtgtgaatctccccgacagccacggggccatttcctcggtggtgtccgacgccagctccgcggtatattactgcaactatcctgacgtgtgacaggtccctgatccgccccagcctgcaggccagaagcagtgttacacacttcctggaggagctaaggaaatcctcagactcctgggtttttgttgttgctgttgttgttttttaaaaggtgtgttggcatataatttatggtaatttattttgtctgccacttgaacagtttgggggggtgaggtttcatttaaaatttgttcagagatttgtttcccatagttggattgtcaaaaccctatttccaagttcaagttaactagctttgaatgtgtcccaaaacagcttcctccatttcctgaaagtttattgatcaaagaaatgttgtcctgggtgtgttttttcaatcttctaaaaaataaaatctggaatcctgcttttttgctctactagtacctctgtcacactagtcttatcaaaaaccagttcttaagatcaatgttaagtttattagttaatgtaaatttctcatcctcgaaaagggtgaacataaatgcctttaaggagtatatctaaaaataaacattaggatatctaagtttgatgtaattgtttcaggaaggaaaaaagaaaagcattctggaatgagcctacttcaagtaatcttagtttctaaaactaacagttaatattttcaattccagtatatcactttaagtagaaggggatgtccaagtaattttggttttctaactgttgaatcataagcttgacctgcccccagaggctttttggatgtttttatctgtgttttgccatctctttacactcctcgacattcagtttaccttaatcttcacatttttacaccttgggaagtggcaagcatcgctgggtttaagataaaggagtcacaaaaactaatcaaaataaaatttgcattatgacaacttttaataca

SEQ ID NO: 18 - DNA, 3955 bp, Pan troglodytes
  source 1..3955: mol_type = genomic DNA
cacatctgtgcagaaaaggccccgcggcccaggggcgcccgcagtgtcactaggccggctgggggccctgggtacgctgtagaccagaccgcgacaggccagaacacgggcggcggcttcgggccgggagaccagcgcagccctcggggcatctcagtgcctcactccccaccccctcccccgggtcgggggaggcggcgcgtccggcggagggttgaggggagcggggcaggcctggagcgccatgagcagcccggatgcgggatacgccagtgacgaccagagccagacccagagcgcgctgcccgcggtgatggccgggctgggcccctgcccctgggccgagtcgctgagccccatcggggacatgaaggtgaagggcgaggcgccggcgaacagcggagcgccggccggggccgcgggccgagccaagggcgagtcccgtatccggcggccgatgaacgctttcatggtgtgggctaaggacgagcgcaagcggctggcgcagcagaatccagacctgcacaacgccgagttgagcaagatgctgggtgagtccgagtcggagacccaggcggccgggcgcgctggcgcgaatcgctaggccgatttcttaaatcccaaacagtgttctttgcgagcctgacgcccaagaccaggggtgtgtagcggccacgtcctttcttaaggctctgggttcccttcccgcttcccgctctccgaccctccaaagcagctttccgccttgctctcccgctcccggattccccaggtggccgggggcgcgggtccaacggctctgggaaggcgacttcctggcacctccgggcggcgcgagagtacccttggccctgaactgggccggttgtgtccatccctcgaccccttccctagctaggtgtccttatctgtttttcgaacgaccgggtgatgggtgagcggaaagccgcttccaggagaccaaaagaaaggggtgcctttagaggagtgttccccaagggctcggactcaggagtcccagacctccctctttaacttcaccccggttgcgcaattcaaggtctgaggggagaggtgcgtccgggtggggccaggtggggcctggagcgggagcgcagccgataagccctgcgcccctctcctccttccttccactgtgcaggcaaatcgtggaaggcgctgacgctggcggagaagcggcccttcgtggaggaggcagagcggctgcgcgtgcagcacatgcaggaccaccccaactacaagtaccggccgcggcggcgcaagcaggtgaagcggctgaagcgggtggagggcggcttcctgcacggcctggctgagccgcaggcggccgcgctgggccccgagggcggccgcgtggctatggacggcctgggcctccagttccccgagcagggtttccccgccggcccgccgctgctgcctccgcacatgggcggccactaccgcgactgccagagtctgggcgcgcctccgctcgacggctacccgttgcccacgcccgacacgtccccgctggacggcgtggaccccgacccggctttcttcgccgccccgatgcccggggactgcccggcggccggcacctacagctacgcgcaggtctcggactacgctggccccccggagcctcccgcgggtcccatgcacccccgactcggcccagagcccgcgggtccctcgattccgggcctcctggcgccacccagcgcccttcacatgtactacggcgcgatgggctcgcccggggcgggcggcgggcgcggcttccagatgcagccgcaacaccagcaccagcaccagcaccagcaccagcaccaccccccgggccccggacagccgtcgccccctccggaggcactgccctgccgggacggcacggaccccagtcagcccgccgagctcctcggggaggtggaccgcacggaatttgaacagtatctgcacttcgtgtgcaagcctgagatgggcctctcctaccaggggcatgactccggtgtgaatctccccgacagccacggggccatttcctcggtggtgtccgacgccagctccgcggtatattactgcaactatcctgacgtgtgacaggtccctgatccgccccagcctgcaggccagaagcagtgttacacacttcctggaggagctaaggaaatcctcagactcctgggtttttgttgttgctgttgttgttttttaaaaggtgtgttggcatataatttatggtaatttattttgtctgccacttgaacagtttggggggggtgaggtttcatataaaatttgttcagagatttgtttcccatagttggattgtcaaaaccctatttccaagttcaagttaactagctttgaatgtgtcccaaaacagcttcctccatttcctgaaagtttattgatcaaagaaatgttgtcctgggtgtgttttttcaatcttctaaaaaataaaatctggaatcctgcttttttactctactagtacctctgtcacactagtcacactagtctcaaaaaccagttcttaagatcaatgttaagtttattagttaatgtaaatttctcatcctcgaaaagggtgaacataaatgcctttaaggagtgtatctaaaaataaacattaggatatctaagtttgatgtaattgtttcaggaaggaaaaaagaaaagcattctggaatgagcctacttcaagtaatcttagtttctaaaactaacggctaatattttcaattccagtatatcactttaagtagaaggggatgtccaagtaattgtggttttctaactgttgaatcataagcttgacctgcccacagaggcttttcggatgttgttatctgtgttttgccatctctttacactcctcaacattcagtttaccttaatcttcacatttttacaccttgggaagtggcaagcgtcgcggggtttaagataaaggagtcacagaaactaatcaaaataaaatttgcattatgacaacttttaatacactttagcattttgattattatttttttttgcttttagatttaatacatatacggacgattgcacagacataggggagaatccatgaatggtttgtgtgtagtgtccctatctatcaccatcattactttatcaagaagaaacagttacagggttgtaagtaaaagatggggatcagcccctgtaatctgccatactaattgctgtggcacgtctcaccacatttgagattgagacaaatggaaacaggtgacttataatgggcatttcctgtgccagatgtttgttcaatgccattctaaacagtgtgagcctcaacaaacctgcaggtttaggtgctatttttcccattttgtgagaaaaggaggcaccaggccttcccctgctatgtatatgaaggcttgtattacaagttcttttgacatatttctcacctgttttcctctgggccagtatgttcatgggcactgggagaatttacattctgttaagaaaccatataattatccttagcagcaagtgctatagaaaaaggaaaggcttggaggatagcttccagcatttacatgggagagatgtctcagctgaaatgattggctggattctcttgaaaaagggcatggaatatgttttttagaagggattcctggaatgtgaaggatagacagtttcagtgaggaaaggtaagtttattctgttaggcataacaggctgcctttaaaaaggttaaattctttctcttagctcagatgggttgtttctgcttccagcctgagctccttctgcagggtgtcccaagagttcccagtagataaagtggacagaagggctacgagcccaagtccagggctgtgctcagattacacttggcattttcatcatagtcagcccaagaagactcagttacccttggctgccatctcttaacgatattaagataagt

SEQ ID NO: 19 - DNA, 6461 bp, Mus musculus
  source 1..6461: mol_type = genomic DNA
aagttaatcttggggtcagacgttctcagctctcacgggagaggctagcaaagcgaagattgcagggtctggcctgaatgttctgggccaccgtgggggccggtgatcactgtctttcttgccactctttcctctcaagttcccgaatttccatctccacctccgacccactggggactgaccagggactggaaagagcgcgaaaggtataaaggggagaagagactgcgccttttggtgcccgggtgaaaggtgccaatcgaccgcatcgctctgcgtggccctacctgggaggtgcggagcccggggcacgacgctcggtgttctcagaggcagactctgaggcacgtattttagaccgtccagtggtactattgtctctgttatcttagagtccgccgggggctgtctccgtgatgacagcccacgctcccttttccgccctcatgaacttgctctccacagaccacggatctgcttgagtgcccacggatcctgtgcaattggacttgaatgtcctttaacaggccttggccatcagaacaccaaaaccataaaaccttcgagaaatcaaccactcactctgaggctcgctgtagaagagtggcttagactctcccacttcggagtcccagttgatcaccaacccgcttgctacaggccccaaatggttacgggcacagcttctagttacattagacgcttccttgccccagcctttcgagcctcaggtctgctttggggatgtggcttaggcagtagccacctagaaatcctgcactgtttgagtgtgataccgctgcggactacagcagacaggcgtgccaggcttctagtccagatacccacccccaccccagtaaatctctagtgttgagggaagcaaggcttgcaggaagccgctccggatgtttgcttctttacttgtggcatttgtggctggctttgataacgtcgtgagctcggcttccaacacccatttagtgaagaaactgaaatatggcccactcacactgctggcgggtctgaagtgcggttggccccaacactcctcccaaagtatctatcaagagaatggtcagcagaagttagatctaggtaagaggacgggaagggggactagtcttgggaaagcgccacatttcctggtagatttgttaagtaaagtgctatctagggactccaggggaggctgttttaaggaacggggaagagcccaaaagtggtcgcttggactcctactgtgtttgtgctttccctcagaaagatcagttgttaatcttcagggatgcttgtaaataacgctgcctccccatccccgggctttctttctaaccactttctcagttccttttatggagctcgaacagaactaggtacccaggtaaaatggtgtaaatacattttctagacctacacctgaattatatttctgttgtctcttagtttttagagaaatcaaccaagacagggaagacagagaaaatgcattctggacccgctactgttttcaatcgtcatttcaaacaaaacccgtagtttatttaaaaaaaaaaaaaacacggaaagagaaaattaggccctgagatctttgaaaagatgcccattactagatacaaaagagaagagtcactgtggaggtgagggactgcgtccctgcttctgagaggcaggagagctacatggggagactgtctcaaaactaacaacagaagagatagaattttttttttcttaaagagcacctggctagagaatcgatttgtaaaattgctatttctacccttagagtttccttgattaaacatctgaaatgcattttttttgttttactttcaagctaatgtttttcagaaaaaaataaaaagctttgaggaaaagcacattatcagttagatttaagaccaattgcttttaaattaccaatttaaaatatcattttttttatttcttaaagcagatttaattttaccccctttgtatgaatcttacagacctggagttttaactactatcactgatctctacacacaacctccagctttaaatgggagggagggtcaccactgctttataacataacaaattagagaaaagctggcttctgtatgagttctttggagacaaagtagctccagaaactgcagaccagaagctatcaaaatctctgtgcttttttggaacctccagtaagccagatttggtctctgaaataatacaggaaaacctcagcatgtcacctcatggatacaagtaagtaatacttttcaatcagctattcacagtaaagaaagtctgttttggaaactgacatgttgagtccttccttccttccttccttccttccttccttccttccttccttccttcctccctctctccctccctcccttccttcctttcttcctttcttcctctccttcaagacagggttgcatgtagcccaggctggcctctaattccatatgtagctaaggacaatcatgaacgtatttttctgccccccacatctcaagtgctggaattatagaattacaggcactaggcatctcatagactgtctttcggaattgtactagatgaacattcaaactgagctcgatcaccattcctttgagttttcctaccttaaaactacgcaaggatgaccgttggatctggtagagaacaacacaaacatgcaaacaaactcaaatgtaacacagagcttttggagctccttgtctgaaggagggctgctaagtgtgtgtaacactctcccagtgtctgccttaacaggtgatgagtctccctttcctctcctagaatctataatgctgcccttgaaaaagactacgtctagaactaaatgagtttgctaatatttggagggtgctgagtggttgctgggataagcattgtaggaaggcatgttttgaagcccgtgggaaagtactttcaggtttaaaataaatttaagggtggtcagcttttcattccagtcttaagaaaacgttgtaaccgtctgtcaggctaacagtcttacacgctacggatttgctgcttaaatggactgatccttttcctccgaggaacagcacagtgctgctgtctttgcactttattttacattttaatctcgtggtgtttgcgatggaatcatggccttgcaagtctttagaaataaaaccagatcttgcctcttttgccgaacacacaaaaggagcttttgttttatatttttatgtttcacactgaaattcctcagggttgacttgagctcttattgagcagtgatatattagtgatatagcattttatgttaaactttgttttattacaacttgctatttaccttggatatttttattataatataagcatgatggatgagttcttgggagaagaacaggattttttttctctgaaaaatcatgctaagttaattaccttcggtaatatttttttaaaagaatggaataaatacctatacctagtatgttgatgtgaacaaccttggacttgttcttcaatcttccgttacagtgagcagcacctccagacatctgaatttcagccttcctatttccccaagaggtcttggcgccagcgcccggctccagccagttttccccaaggcaggtgtagccagaacactgccgggggaggggaaaggggcgggtgtgggacttgggactcggaccactggctgggcgggggcctaaggactagggtccggtccgcccccgcctcgccattggccgcgtccataaagaaaagggccccgcggcccggggggacacccgcagtgtcactgggtagatctccagcgcggattaggcgaagggttaggtctaccaggagagcagcgggagggtagcacccgctcagctttacgagttcctctgggcatctccaggctagcttccgatccctgcctcagggtcgggggaagcggcgtgtcccgtggccatagcagagctcggggtcggtctggagagccatgagcagcccggatgcgggatacgccagtgacgaccagagccagccccggagcgcgcagcccgcggtgatggcagggttgggcccctgtccctgggccgagtccctgagccccctcggggatgtaaaggtgaaaggcgaggtggtggcgagtagcggggcgccagccgggacgtcgggccgagccaaagcggagtctcgcatccggcggccgatgaacgcctttatggtgtgggccaaagacgaacgcaagcggttggcacagcagaacccagatctgcacaacgcagagctaagcaagatgctaggtgagtcggaccagggggatacagggcaccggcgcactccagagaatctccttgagccacttccttgagccaagaggtgtgctgtagactcaatcccttcttccagctccctctctcgccaaagtaacactttggtctttgggccataggagcgaatgtaagggtttctcagtatttcagagaggtaacccgcacagccctggctcgaccccttcccagatcaggggactttggcagtttttcgagttaaggggagaaaggtaagggaggaagccccttctaggcgtcctgtaaggacgcgatctaacactttcatccgaataggaccgggcttctcacctgctcgctcagtgagaggttgcaccagagaggggtcagggtgccggagctcactcgggtaaccctgcgcgcctctccacctttccctgcaggcaagtcttggaaggcgttgaccttggcagagaagcggcccttcgtggaagaggccgagcggctgcgcgtgcagcatatgcaggaccaccccaactacaagtaccggccgcggcggcgcaagcaggtgaagcgcatgaagcgggtggagggaggcttcctgcacgctctcgtcgagccccaggccggcgcgcttggtcccgagggcggccgcgtggccatggatggcctgggtctgcctttcccggagccgggctatccggccggtcctccgctgatgtctccgcacatgggcccccactatcgggactgccagggactgggcgctcccgcgctcgacggctaccctctgcccactccggacacatccccgctggatggcgtggagcaggacccggctttctttgcagccccgctgccaggggactgcccggcggccggcacctacacttacgctccagtctcggactatgcagtgtccgtagagccgcccgctggccccatgcgagtggggccggacccctcgggccctgcgatgccggggatcctggcgccccccagcgctctgcacctgtactacggcgcgatgggctcgcccgccgcaagtgcggggcgcggtttccacgcgcaaccccagcagccgctgcaaccgcaggcaccgccgccgccaccgcagcagcagcacccagcgcacggccccgggcaaccttcgccccctcccgaggctctgccctgccgggatggcacggaatccaaccagcccactgagctcctaggggaggtggaccgcacggaattcgaacagtatctgccctttgtgtataagcccgagatgggtcttccctaccagggacacgactgcggagtgaacctctcagacagccacggagccatttcctccgtggtgtccgacgctagctcagcggtctactattgcaactaccccgacatttgacggttgccgacccgacctgagggccagaagcagtgttacacacttcctggaagcgctaaggaaatccttagcgtcaagctgttttgtttttaagttgccttggcatataatttatggtaatttattttgtctgccacttgaacagttgaggggctacacgagatttttgttttaaatgccttgagggacttgctccccacaatcactgtccagttttagccagttttaaaatatctcactgacttattccatttcttgaaagtgtattgatctagagaaattttgtcatgcgtgttttctcaatcttaaataaatcctggaatctttttaaaatctctcgcatcgatttttatcaaattaaagatcaacagtaagtattatacaattagaagtgtatacttaattgtaaaattttcatttttcttacaatggtaagaaaatgcatctaagaaaccctaaacacaaacagcggggtgttcaaatgtgatataattgttctgagaaaaattctcaaaagatgaacttgttatgtacattccaaatattggtttctaaaaatgatactgtaaatgtttttaattctgtacactttaatgaggctgttcaaaaatttcggattttcagtcatctcgacacctgccaaaagagcttttcagatataactctttcctgtttgtcttttcttccaaaagtcttgatcccacttcccacaaaatttgcctttaattcctacaattttagagtcagagaaactaatcaaaataaagtttgtgttgtgactgttagtg

SEQ ID NO: 20 - DNA, 53560 bp, Homo sapiens
  source 1..53560: mol_type = genomic DNA
gtccttatttgcacccgccccccgcccgcgtcggtctggggcttttgacttctccccgaacacatttcccctcccgtcgctgggtccctgcgatcgcccccagctggtggggctcgcggagctcaggggagcggggtcctctgcgccgctgcagcgcgagttaataaacagttaagtttggaagactctgcagacacgttgagggggagttaccaagcccaggcagcaaaaacatcctggcacattcctggggagtcctcagctgccagcatctgattagaaccatatctctcgccgggagtggccgcgcggctccgaagctcccggccggcggctatttaagcgaggcccgccgcatccgctgcgctgtagcctggaggctccgggcgcggggaagtcatgctcgcttcacggaggcaatagctagccggtgagtagcttcgaaacccttcttccctctggctccattttttttttaaagatctccttctctcctttgctccccctctctcacccccccgccccccgctacccttctttgagtacagaccttgggctgtggggaatcttagaaatgagaccctgtgcttggggaaaccagcagttttgtggcctgacatctgaggaatgcttccgcggaatgtatttacctttcgaatccgactccagatgcccagcttgtgacatttaacaaacgcctccttttgtgtcgtgtgtgtgtgtgtgtgtgtgtgtgtgtgtgtgtgtgtgtgtgtgtgtgtgtaaaaggtctgcgggcagccctcctaggacactgaggtggctgctgaccgcctaattaactcctcgaagggtgtttatttttgctgtgtgacaaaggctggggacctggcttgtgcccataaggagctttttcctggtgactgacaacatatggcattaaaatgtgaacttttgtcttacaccggcattcctaaggaagtatctacccaagggacttaagaaacttgttttatatcccccggcgcagggagcatggtttatatggtgcttgcctgcctgttgtaagctggttaaaaagattaagtaagaattctaaaaaaggggggaaaaatgaatgggttaaaaccgtggagcctcagtcaacatagcggttttcatagcatagagctgactctgttatttgtttctgctgtctttccctcttgacttaattctgagcctggaattctggtccgcagacagtttcagcagggagctgagtccaaagggaaattcaactggattaaaaacacttaaggaatctgggtgttatctccaccccaaccaccccccaccttttcccctttctttttagtttttgtttggaaggaagagagccgctctgtaaaccgagaagagcagaaacaagcttccagacacatggaaagacttaaaaattatggaggggcgacttcacgaatagtaaatgttgctattgctctataaagtgacttcatgaaaaaatttctggccttagtcaggcaaagcaggggcatgggggagaaggaggtaagatataactaatgcaaacagaagtaatgggagtggaaagcaggcatctacaaaaaatgcctttgagatgtctgataagcctcttggaatggctttgatgagatgtatacttgattgtccttacagtcttgaggttggcttctcacacaaaagcacctactggctgttggggaggagggagcttgcagctaccaaatggcttgtcaccatgcttcttaccccagcagccagactttgggaggctacttttctctgagccaggtgccccgcccactccaggttctgtgtctcccctcttggaagggagatggccctcagtgacactgtaagaaagtttattgccttgagaattcgggagtatttgagtacaatgggaaagtcttctagagaaagcatgaagaagacctagtggtctttgccaatgtggatttctgggacagaccacttcttccaaatccttagtcagtttcctcctaaggccaactaaattctttttcctgttgttggtgaataacttcccccttcttttcccactcccagctggaaggatcccttctcatccaaatgactgacctagaaaccagtcatttttcagctatgccctcctatgctttaatgtataaccagaataagtagatggtagaggaatgtcttccaactttgagcccatacacgtatgtatttgccattctggggatctttgatcttgatggttgatctttacctgaggatgtaagtgagggaagaaagcacttgttacaaaccttgtctaatttgtgaagggcaaactccagagtttgtgtttctgctaaagacttttatagtttcagattaaactggaagtccaaattcctgtgcattaggcctgtttgttgtctttctccaaaggttgaatggatttcactggccttgtttgggttgaagggtacggcttttaaggcacttgttggcatgaaggtagtacagggacctctggcagctgctgaccagctgtttggggatgatatttactggcctgctcaaccaggcctcgattatctgaaggttaagggagcaggaagatatcttccttgctgagtgctcctggccaagcaggaggctttgctgtgacataggctcttatgctgcttcatttctaactctaccctcatatgtccataaacctaagtttgctaccactgatatttcatctggataattttgaaggctctgcgtgtttctcttcctcattcttttgacctgaggatttaattattgctcttcttaaagacaaagccaagatgctgaaatgcttgggaaagctgctgagagtgagccctcctggggtttgaagttgtcctaatgctcatcagaacatacctccccagctggaaagattcgaaagcttactggccaggaaggtttaggtaactaaccaaacacataaggttttttaccctttagacagaaccagaatgggaaccagattggcaatatgaaacacctgagtaacaggatgtggtattttaaaattctccctggcactgctatgtaattccaaagttgaagctgtgccgctgaattgcacaaaggttggccaaaatcatatttaggtgaaacagatttttgttttgttttgttttgttttgtttgagacagagtctccctctgttgcccatgctggagtacactggcatgaacttgacccactgcagcctctgcctcctgggttcaagagattctgtgacctcagtctcctgattagttgggattagaggtacccgccaccatacctggataatattttttttttttttttgtagtagtagtagagacggggtttcaccatgttggccaggctggtctcgaactcctgacctcaagtgatccacccacctcggcctcccaaagtgctggaattacaggcatgagcccaccacacccggccagatgaatcagatttaacaccagatatgtgtctttaaaggagacccaactcataatatcagcatatcctgactggattaactggtggaaatcagaaggaaagcagactcctcagtctttacttaaagacagaaaacaagcaaattcctggttaggggaacaaatgatgactggtacggacacagagggctaacattcaacactggctgcctccaacagggcacaattggatagtagttgagaactaccttctgaagtaccatttcctgggttcaaatcttagctacagggttgcaggttacatggccttgggcacattccataacctctctgtacttcagcttgcttatctggggagaataatagtacctaccccaggattgctgggaagacagctaatctaatatacttggaatactttttcccatctgattttgaaggttttgtttgtttgttattactcccccctgaacaactgaattaagtgtctttgtgaaaactgaaagcaaatggaaaatttcttcatgaaaattgaatacccttcacctacttgaaaaaggttaattattcaagcacttgattttaataaagccagtgcgtttgcttgtgctcatgctagaacagacagggagttactctctgttttcgtcctggaagcctgcactttggtttggtcaggctgacctcgctggtctcaattaagtcctccccacaccctctcagactcctgacagagaaggagcaatccttccccctgaagtcagcattgtcacagaaggaagtgggaagggagggaccacccggattaaactgaatgactaggctagaaataaaaattcttccgagtgtgtgcaggccccatactatccttgcccacatagctgggcaggttgccatggttactccccttcccgcatccttctaccctggaaggaagcctgcctctctaggggaagtagaatctgaacaaattgcttcctggtctaaaaatggaagttactaagtgaagtagaatctcctctctacttatatcaccccctccaaacttattttaatcccaatacttaattttctaaccttcctagttcttgcatcatctagatagcaaaacatgaaagcttatgaaatttctggaacctaaaagttactacctcaatatagaagcagcctggcaagttttccctactacatttgtactagctagctaggggcaagtgatttttaactaagtcaactggtaaaaattctaagtgaatggggcaggctgagtgagtgttacgttgaaggtaaacaatgtatgagggctgtcacttagattttcaggtaaccatagagtaaagggagcaggtaaataggaagtaacaatcctagaatgctggatttgaagcacctttcaacctagaagaaatctggatgagggaaatatggtttaatgttgtctcttggtaaaaaactaccctattgctacctagcaatatgatgcaaaatgttagtcccaaaaagactttgatctttatatgaaagatgagctgccatacacaagtttgcatttgacaaattaattcagtctttcaaaattggacatttagcttgatgtgtatttcacagcttgagggaactcatctaagacaatagttctcagagctgattcccaaaccagcagcatcaacatcagctggggacctgtcagaactgcaaactctggaagtagggcccatccagctgtatctaaactagctctccaccacgtgatccaagagtaactttcataattcagtggttttaggattcacttcttcagtggaaatcataacaaagtatttgaattccttcagtcatggagataataaagcaaaagcctttaaacacagtgcagtttaactgaatcttaggatgcagaaagattaaaaagcatgggatttggatatttttcccatataccaagtatgactttcttgatcctaggaaatccaatatacttttggtttgatattatcacctcacttccaaatcttttcccctctgctggggtttttaaagagtataattaatcttcatttattaggagactgtcccacttacttcttttaaaaaggattccagtaaactagatcattacccttgaaccagatggttttctctaacctataaaactttttattttgtttttatgccatgtctagaagtgcagatgaagtcctctccataaatgagtctacttcatttagtttttgtaaagtttaatggctaacgaagcactgctcctttctcccattcgactttcactttaagtaacttgaaatagaaaagatatctctatttattggctccaatatgatgagtatcttgcccaaggtgttatcattaagtggtagagccaggattcaattatgaatctttatgatttgcaccttggcgtttatctgaatacttagcaattacctactatgtgaagtctgatgctaggttagcaatggaaaatctcccagtgagcagaaatcaaaacaaaagtcttcctcatgtgtggcaaaggacataggatagagagttaaacagacttacatgtgaatggcagtgctaccatttcttgggcatgctattcaatgtctctggcccttagttgtctcacttaccttgcaaaaacagtcctaagaatgcctgatgtcaaacagagatcacatctcaaactgaaaaatacaagggtgtgatgtacaagtatataattggaactctgattttgaaaagccaacatagattcatggttaagagcttgggttctaagctgcaaatgactgtgcccacagcctagctttgccatgtaagacaagctatataaggcctgagcttcatttctccatcaggaaaatgagttgcctcgattttaaaattaaaaactcttcagaactcctgcggctgcttctgaaatttacctgtcctagaaatgcaattctcaatgcaataactaagctgatattttttaaatggtcttgttctcattgtttttgagtatcaggcaagctaaattctagagatgcacacattcaggctgaaaattagaagactgtctttcctatatatctttaaactattaaatgtgaataatcaaggaggagaatgtggcaatgcttcataaatcagtagaggcacacaaatactaactttaaggtaccacttaaacctcatctgagcagggcagttaagtcctcttaaggtctatagttaatccatacccaaagaactggaaagtgaataacttcatccctaattgtgtccatattgaacacagctgccctctcggttctaaatattgcatccaaatgatctcacttatttttttatattttaagtgtcctattagggggccaagacctggtctagttttctgtaatatgtaatacagatgctaacgtgctttttgttaccatttagtgcaacagaaataaaccaaatgtgtttgaacatatgtcagagggctgacataatcatatgaagaatgctataccagtttggctttgggacgaaatgtgaatctactagggcaacatacaactgccctctgagtcagaagatcagaagttgctgtggctacacatagtaggtgctcaaatatccatcctttaaagggaagggtcagctgtgctttagttatatcagcattaggttttgttgttgttgttacttgattttgttttgtgttgctccctgccccctttacctctaaaattaagcgacttaaatgcaattcatttttgaagtagaaaaaacaagtatgtagctgatagaacaggcttttccatcaattgttggttgctagtaaggagggtcaatattgatttctgcctgggctaaggttcaactatagctgaggcttttcagagagcatacatgtactagaattgaaatgatagacagttatatttaatgtccacgctgtcttctaaaggatagcttgatgcagaaatgcttgcttaactgcctgaaaacctgttctttgtgatttctgatttgtctaactggtctgaagttcccaatgactaaaagttgatagtaattgaaagttgggtgcaaatatttaccttagagggacacatatatgacaagagctgcctataagatagttagagaaaatagtaactactcaactaacatatgattttattgtagttaagtggtacagagtgttgtgtggatccagagggagaaaaaggccattggtgttaatggatttggcttttaaaggaacaatggaagtcaaataagcaaaggtaagaagagaaaatgcattttaggcagcagcgcatatgcaaatcatgcagttggatgaacttaggatatgcctaaagaactctgactggtcagtttggccaagaaacagtacaggtggcatagggctgagaagtgtctgagtttgaaaagtagggatgaattatactgagccatggatgtcaggataagaattttgattttttttttttatttttatactttagattctggggtacatgtggagaacatgcagttttgttacataggtatacatgtgccatggtggtttgctgcatccatcaacccatcacctacattaggtatttctcctaatgctatccctccccttaccccccaaccaggcgccggtgtgtgatgttcccctccctgtgttgatgtgttctcattattcaactcccacttacaaatgagaatatgcggtgtttgccaagcagatccgtcattaaagcaggaaaaccaaatgctgattgggataacttaacctggctctattggcagaatgtgtttgagtggagattgcttagtagttgaagaaaagcctatatttcttcaaaaatcatcaaagtagagaaaagggttgcttaacctaagattaaggtgcaaaaagaaatatttattacccctaatgttttaagcgcactgctcattaacagactgtgtcgagcctagaaaagtagggcaaataattttcggatcccaaaagctttattgaattgagagaagagctctacatgaatcagagggcaatgataggtcatggcaaatgtgaggaaatggctggtaagaggccggtaaagacttccctgagaccacacatcttgagtggccttggaatgaaggttttcacgaaattcaagaaggtgaaggcagtacatattacaggctagcagaccacataagaaggtctggtgtgtctatgtgtctgtttaggggaaacagaagacaacggcctcttcagagagcaggtggccatgtatatgtatagtccacagcctgattagaagggctttgaatctcagcttgaatgtgaatggaggaattgaacaccgatacctgattaattcaaaatcaggaaagctaggaggccagtaaacactcctacaaaaatttagccataaagggagatcagttacaaccagagtctcttacaccttagattctcactgaagccctttggagaaaatggaagaaagagctcatcccataaagagttgtttgtttgtttgtttttcacttcaagtgttttaaatatattaaggagtacttatgctatgtgtgtagaaaagatcaacaaacaccataatataagtccgctaatcatgagggacatgtatgatacaacgtggtatagctttttagggaggaggaactcagggtggcggtgaggcaaggttgaggaaaaatgctggaactaagtaaaaaaaaaaatatgatggggagggaggagaggtgtgaaaataaagggtaattatgaaaagtagactttcagaggtttgactcattcattaaacatgaacagtttaggataaaatcttagcttcattctaagctgcagacagtactgttgtggatcttttaggtatatctgcatacgaagtacattctgtaatgctgttcccacttagtgtatagtgatgcaaatgttcagttttctgcacaagaactctttcatagaaacagtgggcacaaccatgttctgtgttaggatctggactcttacacttcatgcggccaacatttgtggagggctcactacttgtattgatcatgaagtccatttccttgaagactgacattgaccaagtgctgcctggtagccccttgataatgctcttgtgacttggtagtgctctttaaataactaaagcaagctgtagggacccttggttacattttcataagattgtttcactgaaatctgaggttcaatgtttggcctgatctgaaagtgacacgttgtattcttagaaaatctggtaattaaaagtgccacagaacatgtctggttctagaatacagaagttccctgaattgcttgtacttcttaagtgaatgccagactgaatgccaaatgagcatagtgtttccttctggtgtttatgaagatagtgttgattcagaactttggatcttatgataactctgaaggaaacatcactgaaattcttcaataccctcaggtataacagaattgcttccttctgttactgccatacagatggtccttcagattgtaacgtggttataggagactcataaatattaaatgtaaatatcccctcaatttgtgtcataatttaaaaattgttgaagagggttattaacccttcagacaacatttgcatctttccataattgatatcaatacagcaatttatatataattccttgatgtaatactactttttcttccttttatgaagtattattaacagcaatgaagctttctaccctaatcagaaacaattcctccaaaacacatagcatcagttataactgtgacctgcttgttctttctcccctacctaacctctaagcccctttagagtagagaccatgtctattttgtcactctatacataggataatgcagtgcttggcaaatagtaggtgtttaataaacaataaccagatggccaggtgagtgagtaactcaagccactttcatttacaacatcaattgcaatttattatagagtgagcaaaatggaaaactttagcttgccttatcatctgttggtataagtaaaacaattctgaccacccccccccctttttttaactttaaggttatttataatgagcaatatccatatgttcttctagtttatatctgctcagggcctgaggaaggcagacaagctgttactgaaattctccagatggtgtggtctttccaagttgctagtttaacttctaccaatggagtattcatcattgctcatatatctgtctgacctgatggatgtaatcacctggctaataagaattgtggtgaatagatttcagcctgatactttatccacaaacaacttcttattctccttctgtttctccttttaaaagtgtccaccaaattgtttataaaattactaataaaatttgagaaaataggtaagacctttggcttagcactggataattaaggctattgctttgacttaacacaatttctgcccaaatcaaagaatcttgttttgttttgtttcttatttccctgtgcagctgtattgtgaattaagatatccattaggctctttaaaatgctaaaattaggtcacaaactcattactgtctgcacagaccccagcatttccaagaaccccaggctggaaaccaactataggccatccactgaccaactttgaaaatcctagcataagagttttttgacttctacttatcatttgactgaaaacttactgttgaatttttcatatgtcaggagctttccccaacaactctgcctagctatcatttaatgatgcctaagatgaaagtgttgacagctgactatgggcactgttctatgtgatttcagatatgcttatgttctatgtgtggtttcccttcacttttgagtttaattgaaagtgactgaaccctagagcatcttcatgattctgtctttagcccaagttagactgtagacttatgcctacattttaagctttgctgtctaccaaattagcacatctttaaggaatttaatttttaaaatacagaaagcgcatcgccccaatatcacttattctaaatgtataagaagcagaaatctgtcttttcctttcctactgcccttcttaatgagcattttcttggcactggtctttccagactttcaacagttttatggaaaaacatatataaattgggaaaaatcatgttaatacattctgcttcatacaagaggctataaatgcaggactatcttagtaaatagctgccatttacaaaagatgctctttttttgttttaaaggagctcacatttcaaaatgtcattccacttcatatacatttctataaagcagacattaggggggcccttttgtatgatgaaatcgatcttagaatgtagggtgtaagacataatggcctttgactttttaaaaagccacctttaagacattatatttatttgaagtttgagggtcactaagcatcagagcttggcaagatgggataaccttgaatctaatgtttgagattgttagtccttaacctttcaattaaaagcctttgtttccagaagattagccaaatatttgaaagaaaccggcaatgttgaatcactccaaagggcaagtctgtgcaactgtcatactgcagagctctctgactctttgatgccatgtccctgtactcggatttgtcaccaccccaacctccacaccatcactcaaaacctgaaagtcctcccagtcccatctagacaaaacagagtgctatcgcccaccctaatccagtttgacccaccttttaacttttcccctggtataacccagcacaggccctatattatagccaagcagacatgaatatcttttacgcattgctattagttcctctttcctgaaagtactttctggctatgcacgttgccccagtctttgaagaactaaattaattatctcttttgttgtaaagcaaagacattaaagcatatgtattaggctggtgtgacttgcaggttgttgcttcactcctgtgcttcagcctcctctcctgtcaaatagggatgatactgtccaggattaaatgataatgtcttagcatcacatctggtatacaataaacattaggtaaatttaacttttaaaaatctaatattctgtgtttctaaggaacatgtccaggacattctcagtcctggattcccaaatctattttcctctactctcctttctccccagagcatttttcatcttctgaaagtctatactccacttatgttttgctccctgttagatagtaaaccatataagggaacaaatctttattttgctcactggtatatcccaagctctagaagaatgcctggcacttagtagggatgcagttttgattacatgaattaacttgctggtaaagatcactggaattcaggggcaaacttggtttctagtctctaaattgcaatggctttaagttgggatcaatcaccagacccccatgtgctctaaacaacaacaacaaaaaaggctgtcagtgtctgcaggcttttcaagttttgtcataatcatggtttcacagcaaaatctagggtagctagtggcctaccatttgcgtcatctctctggccatgcacaatataagggaaatgacatactcttaagagtcaaagacatttgtttttttcccccttaagggaatgttttggacccaggtgcaaatataaaatagcatttagggtaggaaaccgccccagctctgagagcgaatgacagactcggagaagggaactttattcacatctcacctctgataattaactctaaaagtagaactttgcttattttggaggtactatgcaaacttggtagtgttgtttctctcactgttttccttgatggaactaattgttcatatgcttctgtagtatgttaattaaggaacacattgctagttaaaaaaacactgcaactgtaaatatttttctgatttcacattttgctttactaaaaggctcctgtggagaatggaagggcttggtcattacttttggaggatttgtcttaacttccttgtctgcaatattgagtctttttaataaagattggattaggaacttaatagtggctttcaaagaagacttgtctttgcacagggctatagcgttcagctaaggaaacaaatgatcgaattgcattctctgatgctaaaaatgcctacataggaggactagaaaatagcacatgttaccatggagtggatcctccaaggcttcaaggaccaaatcaagttacttttatttaatgaccatagtaagaagcatacagagaggctacaaatggagcccctatctaatcacttgtgtccatcccacatttcccttaagtattgaaatggcaattgctaataggtacagagttttgcagcaggtcattagtggttcagagaacagaggagactgctctgaaagaaaataaaagctaatgaaacatcttgcttaagtattatgttttttatgaaccaaggaaacttcctttattatgactcattgatgttgacattcccgggtagactaaccagaaacctttttttagttcaatataaatatgagtatttcataaagggccaagaggtctcagctgacactcagctaagtgtcatttgataaagaaccattcctattagttcacctcatgctagaactataaaccagagtggtacccccatgattagttaacttaaagactggtgtgcattcaacaggcctggagaaagaagaacccttatcccatctgcttactctgggaaagtctcccagtgttaagtcagattttttaaccaaccttttgcctaaagtcaaacctggaccattaatgtgatatgtgtgacactgagggctaggcaggtatgtaaatgataaattttagtgaaaaggaaaaatactcaatacaatttctagccaatactctgcaaactagaaaacaatataattcatagttttttttttaagcaggttagacaatacagtaatctcaacattaacataaaccaaactcatttaacatggaaggagtaaagagctggccagtactagatgcactgtaaaattatctacagctggagatgattttgaataacacatattaaaagatacacacatagatctaataaatgagtctttacagcttagaaaaccagaaaaactcaattgtcctagtatataaatttttcatgtcaaataagttaagcccttagggaagtagcagtttatttggtaccctatgatttaatgatttgtttaattaatgcattgccttttaaaatatcccaacagagttgtttatcaggctagtagtataaggtttataagaaacaacatcttgcatgggctattacttcatattaatataaagttaagatactaattacttcaatcttacagattatgtccagatcaaaagtaaaaagaatatgatgttgcctttgggaaagaaaactagatttttctacgatcctcaaaatttgttaataccaaaatggttaataccatctcaagagcttatcttaaaaaatgtaaatggagtagtcaagacttgagcctttgaaactgttagctgatgacataaccaggtagcttttctaggatatcttgtttttatgcaactcatacaaagtttattttttccccttccccagccctggattaattagagatgactaaaatagatgaccaaagaaaacaatccagtggagtgtacatattagaaaatcttcaaagtccctctataaatcctagaataaactttctgaaatctgtacagattaaggtgaaacttgagatctgtccttgtgttcttggagtattacaaccaagaaagaagatgtgtgagctatttaatatatattccttcctaagaagtcttagttctccgaaacactatcattcactttaatcttatctgtagaggtcatctaaatgacttgtgaaaagtggtatagaaattgaattcctgaggtcttctctggattaggaacaatgtttaatggttggggtcaccaaggggtggttcttttctgaaatctctactagacacaaggttccttgaattatgcttccaaacttgctgagtgtgcttcctgatcccaaagatagatgtctagccatgtttgtgaaagggtagaccagtcaatggtgattacttacatgatactaacaggtgtgattttaggtatgtaaacttggatttatataaagaattcatgaaacaaaacctgtctcacttacagactttataagcaaaattctgatattaagtcggtgttttattgtattaataagtgaacctttctatgctcatctatttctgcagttactgaactgtatacagatatttcaatacattagaacactttgttgttcaatgtaaatgctccaattgtgcaacaactaatctgtttacttcagtataaagtagaatactgtcatttggaatttttacatccctcagtttaaaagtgcatttatttattcccacaaaacatatttgttccaatactatttcccaacagatgagagaataatgacagatgtgaactttagctcaagaatacttgtgcatttctgccaattttgttcatcttgtactcaatctgcagcagctttttagagtttttttttttttaataatcataagcacaatttcaagcaggtaggctaactattgggaggccttcttttggatctggaattcgactcatgtggtattattatatgatcacaaaaagcaagacaccaatttgacagattcacctctctcccttgtatacaaaaaacgaaaattacccaggggtttcttatccattaacctatctaatttgtccagtaaccaagaaataagcaaataaggaatatattcttactcgtagaagaactctcctggacttttaggaagcacagtctgatgttgtatattctaggaaacaaactgccaagattctgaccttcagcctgcttgaacactggtatcaagaggagagatggctggttgtcaggctgctggttctctgcaaacctgaaatttgacaaataaatatcaagtcactttttgtttttaaatgactcctttttccttcatctaatttgaaagcaaccatgtcttgtctaaaggaaattaactaaatcatgaagaaccattttttaaatgataatattttgagcacaccagatgacagtaaatagtaagcagtttcaaatcaaaacaaacatagctattcatagccactgggattagcaaggccaccaatattcctggagatgaagcctaactgccatgttggttgtggatgtcttccccaactcgaatagatcatatcagatgtggaaatgtgacccagcggcaagtctctcatggaaggttaatgccaactctatgggtaggttgaatatcaaaacaaaggacatgccacctagaacctagagacaacatattcgaattagattagttaaactgatcttgttttgagtctgcataactgtaagaagtgttttcatggttttgctctctatacagaaatgcaacaaaaaatacgttccacctgtctgtatacaatcactatgtacaccctagtttgctctgtgctgatttacaaggcagctggattcttcttccttcaaactctttaaacagtgtgtccttgaaacatgagttgcaagaaagggtacagcaacactcaagcaatggctttgaggattatataaatatggggcttttcctggaaagggaaaccacattgggattttatataatttagccaggctattaaagaagaaaccaaatatcaggcagtatttcttgcactggttttcggaagaggagaagtttaagattacctgcttgttttaaagtgccctggtgtggtatatatcataaaataattctactagtgtacgtagcccttcatttatagcttaatgtttatagcacagatgcttctaaattacatgctttttaaaaactcttctaacatccgcatagagtttcaagctgactactgtcatggcacttgaatagaaagtgggaagtattcaataattaggatttatatgcatatgcgtcataggtgaagtcacagagggacgtggatgaagaaatgattgtatcctgaagtccacgagtgaggtatgctgcacatctatgttgacttaattcaggattatttcatacggggatgagaatgcacaacctaatgttgtatattctaggaacaaactgccaagattatttgtatcattcattttaaaactagcatggtgggccgggcatggtggctcacgcctgtaatcccagcactttgggaggctgaggcaggagtttgagaccagcctggccaaaatggtgaaaccctgtctctactaaaaatacaaaaattagccaggcagtgtggcaagcacctgtagtcccgacttctcaggaggctgaggcaggaaaatcgcttgaacctgggaggcggaggttgcagtgagctgagatcgcgcctctgcactccagcgtgggcaacagagcgagactccgtcacaaacagaacaaacaaacaaaaaacctagcatggaaataggaagaggagttatttttggtagaaatatctaacctagcttagaaaggacagacatgaaaacagtaaaacatttgctgggtcagtttgggtcagtatatgatgagggaggattgtagtaaaagctatgaatggtgtgagtgcgttgcctctgagtcttaactttttgactaccttttcctgccaggatcaagcataatacattgtatatttagatgccaaatttaaagtaaaactcatgcatttactgtgttttgtatcagttccagagtgcttctcttcaagtcactgccccaaagacactgcaatagaaaaattctagaggtttctatgtcagtagtagttttttttaatattaaaactctaatatttttcatgtaagttgttcgttctttagaaaattgtatgcccttggatttaggatgggagggaagcagaatgaaatataatatcctactttaccatctaatgatacaaaataaagttcttctaaattcaaattttaaaacgggtttattctattgacccattccagttgcctatgaacactttagctttctaaaatcttcttccaaaagtgctttcttggtatatgttctgattaatatcacttcaaaactagaaataccaagccttcctggtcttggggtctcctatgagggtcccttcctgctgttgtcaccatggtgtgaagtcttcagcctcatcacagtcacctagtgcaagtgactgggctaccaccaaaacctggtgggttttagccactgaagaaagtgctctggtgagcggggcaggtttggccatctctggtcctgcagtagtgtctccaggtatgggaagtgctcagtagagttccgccatgtccctacaggccctctggtcacacggctctttcagtgtgataatgcatgccacccaccagccactgcaccaaggcatgcccatgctgcccgagtctgcttggctgggtcagattggacacctaatgcttgtgccaggtctttagttaagactgcctaccttcctgttatgggaattcttcccttgggccctctccactgtgtcagaccacttcagcccattgatcatttcccagaagtgcctcagcttactctatagacttgttcaccagcttcccagatacctttgagctttaaagcctaaagtatatgggaaagagtagcctttgccaaactcttccaaccccataataaagccatattatcctttttcccagaacaatggtttcataatagcttttcctcagaagtaatgggaatcactcatggcttcttccataggtgacttgatatttctctaagtagaaagagaagcagctagtgaggtggttcgagatgacatttaatatcacaactctgggctcaaggttgtagtcattaccttgccaatctctcttccctacatcacttcccagggacaagtacaaaatggagaacagcacataaggaaagacataccatataaggaaagaattatgcatgggcataggtgcctagcaacctccaaatacagagctctgcaaaagctacgttgcagcatgctatgcgctagactgtaattccccattgtcttttccttgtcaagttgtgcccacaacattgtcctacccagcttgcttgagatatatgaaactcacgtaccaaatggtccctgatgtaaagcaggtcatagcccaaatgattcagtgccagcaatgtaaggcaatgacagaaatgtgatttttaacctctgtagtttccctgaagtttcaatgtcacttcctttcctttgtagaagtgagttaaaggagaaagttggattcctgttctgtgtagtctaagccagaggaggttatacttgagaactggggtggaatatgtttcttctcccacattaaagctgaaatgggtgtatactctctaatgccaattaattcaacctcaagcctcatatgtccatattcacaaaaattccacgtgatcaaaagaccaaaaggacattctgacactgctctctttcttagaagctgaataagtgtaaagagggattctagaatcaattgtctctgcatgtctgtgttcatacaagcatattaacttacacccagctttgccgagaggccagaacatgttctcactgtgaagactacactttctattttttccaactttagtgcagttaagtgttcaaactaatagcccttgtgctgaaacaacaaagcaaaaatacaattgcaaaattgatcataaccttaatacttctgttcagcttgtgaacactttcagacacttgccgtgaattgggtggcactgccccgtctaaaggccaagtgcagtggctcatgcctgtaatcccagcactttgggaggccgaggcgggtggattgcctaaggccaggagttcgagaccagcctggccaacatagtgagaccctgtctctactaaaaacgcaaaaattagctgggcctagtggtgggcacctgtagtcccagctacttgggaggttgaggcaggggaatcgcttgaacccgggaggtggaggttgcagtgagctgagatcatgccactgcactccatcctgggagacagagcaagactctgtctcaaaaaaaaaacccaaaaaccaaaatccaaaaacaaagaatgtgcccttatttggatgcataaagcttctttgaagtttaaactcttctaaacgttctttatagaggggactgtttctttcttttttttttttttttagataataatacatgcatttattttttatttatttatttttttaattttactttttctttttttttattatactttaagttttagggtacatgtgcacaatgtgcaggttagttacgtatgtatacatgtgccatgttggtgtgccgcacccatcaactcgtcatttaacattaggtatatctcctaatgctatccctcccccctccccccaccccacaacagaccctggtgtgtgatgttccccttcctgtgtccatgtgctctcattgttcaattcgcacctatgagtgagaacattgactcagcaatcccattactgggtatatacccaaaggattataaatcatgctgctataaagacacatgcacacgtatgtttattgtggcactattcacaatagcagagacttggaaccaagccaaatgtccaacaatgatagactggattaagaaaatgtggcacatacaccatggaatactatgcagccataaaaaatgatgagttaatgtcctttgtacggacatggatgaagctagcaaccatcattctcagcaaactatcgcaaggagaggactgtttcttatgctccaataagagacattcttaataacaagttattaaaaaaaacaaaatgggtagaggtgggtacaaaattaggatgggttataatgagtccagagtattgaaagttgccaattcaagagcttagacttcctatcatgctcaaaaaaaaaaaaaaaaattccaaaaaaactaaaactaaaaggccaaacactgaatagtagagaatgtaccgaaataaatttaaatgctttgatctgcaagtctcagacctaggcaaagcagccaaatcaatattaatgagacagtttgaccaagtaactcctgctacctaggcaaaaaggaatctagtgacaatgtataatgagaccatgtaagatcctttttctattttgattcagaaaacatctataaaataccatgttcaaattaccctgctaagctatcttcttgttcttttgcttggtatatctgctaaatggaaggcattcttggttcagtccccatgtaatgggctttgtacatcctgtttttaaaaaatggtttttaaaaacaaacacaggtaatctctaggaataaggcattacagtctcatgctagatctttcctggtgccagctttgtcccctccagctatttcacaattagacaagtcaaactctctttcttgccctcagttttctaatcattataataaaatgatgtggccaaattattctctatttttcttccagctcaagtctaacccacttggtatttctttaagcagataaagcgttgttaaagtaaaccatcgcacctcacataggtcagtatattgaaatgatttaggaatctttaaaatatattgatacctgggtctctatgcccagagactgtgatctaatttatctgggaatgccatgaatatcaatgttttaagaattccacagtaaaattttcccagatgatgtgaagcagagcttctaaactgtccgtgataatgacgtaggcatgaattttaactcaggattcattggaacaggcatctctgggtaacttagagtagattttgttcccagagtctgtttctatcagaacccaacttttgtaggctcagaaggcagagctgagcaggaggtggctcttacactggcaaaccatctcacttttccacctgggctttactagttaaaatactaggctgggtgcagtgggtcaagcctgtaattacaacattttgagaggccaaggcagatggatcacctgaggtcaggagttcaagatcagcctggacaacatggtgaaaccctgtctctactaaaaatacaaaaaattggccaggtgtggtggctgatgcctgtaatctcagctgtttgggagggtgaggcaggagaatcacttgaacccaggaggtggaggttttagtgagctgagattgcaccactgcactccagcctgggcaacaagagcaaaactctgtctcagaataaataaataaataaagtattacaccattccacctttccacttattagtcatttgagcataggttcttactgttctaaaagtgtttaaacacttactgtggaaatgcaatgttggaaagagcacaagactacacaacacatagcttctgtgacctagctttggtttaatagtagctactgatatggtttggctttgtctccacccaaatcttatcttgaactgtggctcccataattcccatgtattgtgggagggacctggtgggaggtaattgaatcatgggggcagtttcccccatactgttctcttggtagtgaataagtctcatgaggtctgatggttttaaaaggggtttcccttttcgattggctgtctttcttgtctgccaccatgtaagacgtgcctttcaccttccaccacgattgtgaggcctccccagctacgtggaactgtgagtccgttaaacctctttttctttataaattaccgagtctcaaaaatacaaaaaattagccaggcatgatggcaggcgcctgtagtcccagctacttgggaggctgaggcaggggaatggcgtgaacccggcaggcggagcttgcagtgagccgagatcgcaccactgcactccagcctgggcgacagagcaagactccgtctcaaaaataaataaataaataaataaataaataaataaataacccagtctcaggtatgtctttaacagcagtgtgagaacagactaatacagctaccatttgttaagcactttctaagccaggtgcagctgtcgctatgtaagttcttactgattttttttctaatagctcagcaaactatattctcattttaccaatgaagaaatgaacattagataaattgtctcaagccacagagccaggaaatgatgaatcctgggtgggtgggactcacaagcctgagctattagctgctatgctatcccacctctacccaaagttaactgtttgatagaatcttaactctggtctgacttggttccaaaaacagggaaagcatcttggttcaagatttactaagtcctctaagtcctgccatatcattttcaaagattaaaggcaatgatacctcctcgctgtaaatgcataacttgtggatagctcattgactcgggcttgttttgttagtgaggcccctacagtagtgtcagcatttacaagaaaatcttctaaggactccttttcagtatgcattagcatagtctcattcctcagtgaaacaggctgtaaaaatcttactgtctgctcagtttggtctttgcagagcagaagagccttcctaaaagcataagaatccaaaaaagcagttaaaggaaggatttgcataaagtatcagaaacagtctaactttgctacagcatcgctggtaatgacccctattcttaaagagctactttgaagatagcagtgaaggctgtttgctgccctcttggaccccgaggtctgtcttagaggttaatatttcacatgttgtcctaattccgcactttagctgaggcaggcagaaagttcaaagaaacaaggaagcacattctctgtccagtacaaagtactggacattctaaacaaatatgtttatgttgctttcttcttgagtctccttaattcctttccctgtgtctattatatgtggcttcttgctaaaaattaatggtgtgttaatgtcagtgggatgatgactttttgaaagtagcttataaaatccaggttaaaatcagtgggattcaagaaaagacaagagagacagtatatataagagaagagaaaacacagactatgctcactttgagcccaatggcttatggcggattgattttctgttgctgtgtccatttcattattcataaaatagagacacattcagccggatgcggtggctcacacctataatcccagcactctgggaggccgaggcaggacctgagggaggtcaggagctcgagaccagcctggccaacatggtgaaaccctgtctctactaaaaatacaaaaacttagccaggcatggtggtgggtggctgtaatcccagctactcgggaggctgaggaaggagaatggcttgaacctgggaggcagaggttgcagtaagccgagattgcgccactgcactccagcctgggcaacaagagtgaaactctatctcaagaaaaaaaaaaaaagagagacacattctgtttcataggcctttcggaataagtgttcttagtggttggtatactaggtgtttgtcccattccccttaatgttaaaaataaattccctaccatctgttgaatggggctaccactaagtccttaactcaagttattccttttaccagcattttgagactggcaaagcacttttcctgcctgctctgtataattagggtaagaaggtaggcttgggagtcacaggggaggatggttgacacttgtattatgatattgcttcaaaaccttggaatcattaagtagtaccattgctgatgccaacacattcctactggtagaaaggataaggatatataagaagtgccaaccaactttacccctataaagcctagactaatcattgtccaccatgctggcaattgaaggattcaaaacactagacattttatatgaatcactaaggactaagcaacagctgatttttattattgcaaagcccatagtcattctaagatgactcatgcagtcttccagaataaatttctcagagccttctcagaaaccaggagagatgttgcaagctccagaatctcttgcagtcatctgatgctagtcccacagaagggggaagtctctgcattctttcagggagatttgcattaagtccaaaatccaagttagagatcttcacttaaatggaagctaattttattcatatagcagagtttcctttacagctttctgttctatctgaggccttaaaaaggagtcaggactataagataactttagatcttcctttgtttttacatgtgtcatcttacttctcttttcaatcttctaatgaaggaaacagccagtccctgagaaccaggataacaaactagctatttttagatggggaactgtgcttgtgagcctttttatatgtttttgagctttcatttgtaatccttgccttgtgataacaccccttgggtgtatttcctgactaattttgcactttttgaactgaagggacctgagactacacccaacgagtgagaaaattgtatacttcctccttgtgctgcactcacttgcttccctttgtaagaaatttttaccatcctagagctttcaaacagaccccattgcttaacataagctagacactttcttcaacagagccccagtttggaaaggtaatcaaaggaattaactaggggacttttggtcctcagatcccttttctaggcccaatcccttttttaaattcaactcattaaaaaccctgctaaaagttttatggatgcaagtgacaatattcaaatgcattacatttgaatattgactattaagtttaaaccaattattctctacagatggatctaagtctgtaagtgagctgccttctacccactgcatgttaaatgataacttgcctatttgacaagtctatgatggggacgtgctctttaaaccttgggagaaatgtgaattatcactctggtgtatgcataactggatgtacacttttgttaaaatcttgcaataagtcttgaacattttttttgtaaaggggtttgtagtcttggggcctgtaagcagagtctaccttctgatcatttcaggaagtagagatagatatattttcaattgtatggcctacaatggagacttacccttggctattgcaactcaacatacacatccattttcttcagggaatttatattacagaaacttttcctccttatttttttcttccttgtcccttggaattgctcatacccaaatggcgaaaggatatagtcaaaggaaatcaattacctttaaagcaattccaatgctatgaaaagctgtatttaaatatctgaacagagaaatttttgctataaaaacttacagcaaggtaatgccactcaccttagaatccttccatttggcccagtctgccaacgctagattcgatacctggtcttcagctacgtcttgtgttacttttatgactaaacccagatgccaccgttccctcccccaaaacccctcaaagtgctttgtggcacttctcaaattcttttaaaatagtctcatgtaagaatacaaattgccaaatttaatgagctaagtcttttcatgtcagaaataataccttgcagtgaagtatgatatccggcttcaaagatgggcaacagactcttaagcccaggtcactttttcagccagtgattctaacccagttctgggccatcttgctgctgctatcaacacatgcattgatgaactcaacataatactgacctaagcaagacagatctgaaggtatagtcacacacacttcaattgcctcccatgaagaaaatagaatgtattctgttttggaatatattgttgcagttcttgttctgggcctagaaagttaaaagtagatatcgaagtatataaatatagccttgaaagccaaaataatatggtttttaaaagcatataaggattaatattcaagtgaaacacttgaatctgccacatttagggtacccttaaagaatagttttttgatctggaaaatcaaaacagattagccttaccattgtgtcagttggagttcagtccacaccagttattttaaaagattttaatgttaagcattaattcccactcgaatactaaccaggcctgaccctgcttagcttccaaaatcaggcttgttcatggttgtatggccgcagatattaagtgttaactaggtataagttgttagctagaaaactgagagagtaagaagagaagatcaagtcatcactgggtaagtaaactacagaaagcagctaccacctctagggctgaggggacaaagttaagacattggaaccatcaaagtttataaagcttgcaggagggggtctcatggtgctgatactgaggcctctgagaagggagtactgcttagctagtactggagtccctgtgctctgagggcctgggacctgttggcctggagagagtatgccagagggctgatgctgatgtctccaggacaggcatgatgagactagttctgcaagtgttaaaactggattcaggggctgttttaggaagaaactcttgctgctggagtgaagaagttctactagagtcacactcccaggagtctcaagtcataaggaagtccatgtggagcaagcagacatgtccgagtcccttcaccagcttggcagtttccctccagcgcaccttactggcagagccaacatgcagccagcaggcaaagcaggaatgtttgcacagtctagctctggcttcactaaccggagatagaggtggttctgaagctgagacaacttaaatggcacagatcacccctccagctactcagcatccacatacacccttccacacctttcaacttttcctctgacagccacacaagtgtttccatctaaaaaggtgcaactgtctttcattcagagaaagatgttctcaccctctccccaaactgggaagctgcaaagaccccataggcatcacattcatttctggaaaacggttactgtctttgggctacattaaccacccctagacttcagttgcagtcccatctgaataattcactgcctaaagacaaaattgtacatttaacttcaaaaatacttgcattaaaagagaagatagagagataagaaaataggtaatacataccagtgtatacacataacaagcaaggaagaaaatacgcatagctacaactgccctcattaccatctgcatgaatgccatctatatcccagacattgagaaatgagtctcctacattcaaggagattatagtccagtgtgtgggcagacaagcaaatagacttgtgtgtaaaccatgcaatggacatgtgtatttcaagaggactacgtgaagctgtgctggaatacagcttctcagctgagatttgtcactgcagtgttgaggaactctggtttggggccagacagtctgggttacaaacctggttctaccacttagcaggtatgtcgttttaaatatctttgccttcactttgggaggctgagtcaggcggatcacaaggtcaggagcttgagaccagcctgaccaacatggtgaaactccgtctctactgaaaatacaaaacttagccgggcgtagtgcccctcacctgtaatcccaatcccagctactcaggaagccgaggcaggagaatcgcttgaacccgggaggtggaggttgcagtgggccgaaatcgtgccactgcactccagcctgggcgacacagcaagactccgtctcaaaaaaaaaaaaaaaaaaaaaaagaatatctgtgtcttagccttccctctggaaaatgaaatatgatacagtaatactcacaggactactatgaatcttttaaagttatacaattaaaaggttaatagtgcctggttcccacctaagtcctgagttaagaatggctttgagtctcctactgtgtaagactttcatctgtaaacagactgtctccctggttgccaaccagccaggtgtctttgagcaaaattaactactaaatctccaaatgaagcaattcagataacattactcatacatagattgcatgaatgtatgtatttaaagactgttcagattataaagacttttaaaactcacagtgggagaaattaagtactgacccctatgaaaacatgttgacatctgtaaacaagctaagtgcaatttaaattgagtaaaaacttgagacttactttttatttagatattctttaagtatctaacaaacgacagttattcccatgtggtgggcttggtccttcagttacaatgttcacttaaatgggtggtataggcacggaatgaagagggcttttgttgaaggcagggttgtggaggggttagtgtgccagcccacaggttgtcttaacacgattacaaaacaatgaatagcttttctttgcctttggtcatcagtcaatgtagaaagttaatctactcgccctagctctctctacagcatatagaaacattggctcctgggaagtgagagaaccttttggaaagttagctcacttctgcgtggttacaatgactgcattttcctgtttctcctactatgatacattgtgggtagggcagaggttgtgagagcacatgacagactgtttggagtatggtgatgctgaataatagcataaaaatgtactagattaattgcacaattggaaccccctcaatccattatttccctgatacaaataagtgttaatggcaaaaaaggatgtgttttatagtgcttggataaccctggggatcatatgcagaatcctaatacttaaaacaaatttatcaatgtgaataagatacaggtcataactctactctagtcactgcctttatagttaagcaattttccgaagaactgaaatttataatgcccaatctcaaatggcatttgcagtcttaccaggcttaacattcaatttatttctgttttgcaataatgcctagcaagttttcgatccctatctttaatacttgctttttatgtgaaagttctaataaaaactgcttagctagataatcattaaatgttaccagatatcaagtgcttaaagaaaaaactaataggcacacatgttccattttggaaactacaaaggaaacactcctacccactcccctgctttcagtcttcagtctaatacagcaggagaaggaacaaaatgagtccaaagaactacaaaagaaagtcactagttgtaagcctattctggcataaagtctgggtctgctgtgttctgatctcaatatgcctctaaactctgcctacaggtgtctgtgggaggttatgtttatttgagacttctccatcgggatcgcctggtgtcaccaagtgtccactggtactgaggtttgctgcctgccttcttgccatgtctaacgaagtagaaacaagtgcaaccaatggtcagcccgaccaacaggccgcaccaaaagcaccctcaaagaaggaaaaaaagaaaggtatggagaaatccacttgaagccaaggaagggagctagagatggttacccctggagaaatgtgagattcagaataaagtaagggctggctctgatcttccttcaacctcagcttagtctcatgttctcctaataggaaagttgtaccttgggagaagagactggttcatctcacgtgtaataagacatctctggaaacctgcgattatacccacttaagtccagttgggaaacagtcatggcatcttgttcagttaataatgcagtcgttaattattatatggttatcattcagttatttatttaccatttgattttactgaactcattgggaatgggactacacagaccttgtaaaaggagcaaaagacattataaagatgggataattatcttaataattttcaagagaacttaggcataattcctttctgccttattgataatttaaaatgttggtaaattgcttggcagcttatttttcttacattaaaaatacatatattatcatccttatattcctttaaagacttaaaaaaaactatgatgaaaaatgtccccaactcccacctcccatattcccatacgtttcccataacgctgtcaattttgtacttctaacagtttattttctccccacctcaactccatacacagttgattgtggaacatgattttgctcaaaggaagtaagaataagacaggacagaatattacatacatgatcagttgtagtataatcaggatttatattacttaaattttggagagtctagagcatatttggtcataattagaactagcattcttcatcctgtattcctttcttttctcaggccctgaaaagacagatgaatatctcttagcaaggttcaaaggcgatggtgtaaaatataaggccaagctgattggcattgatgatgtgccagatgcaagaggggataaaatgagccaagactctatgatgaaactaaaggtaaaagggaaatgaatgctttatctgtatattaagcaaaagtccaagagagggaattatattagaagctcttgttgacctattgttcaattacttgaaaactgcttttaatcacattatccatcagtagtgccccattttctgagaaaccgtgagtgtttgcatatttggagggatgtcctagatacctaattttatcaagtataataggactctagatgccttttccttctggcaagctcaacattaggacgaaccaagcgtattcctatttctattcctataaaagctgtgtgcaaatatttgcattgcttgtcttactatatgtggagagcacggaatatcctgttttagacctgggaattgttctgataaaattgaggattctacttagacattggtgttccttagcgctagcctttctgttttttgaatttaaaaatttagtactatggcactatgtgaaactgactgaataaataatacttgttcaatagttcaaggcctagaagaaacatctctaaagatcttctagttgagctttaccagtgactattctgaggccaagagaattagagtgacttgtccgagttcgcacagctaactaagggatgccctggttcaacgtcttctatgccgtcttgctgtcccggatgaaaagtgccgaatcctctcatcgatggcagatcaagtcgaaaacaaagctgactgactttgaaaattttaatattaaaaccattgtaggatgtttttaaaaattcaacttctcttgtttttccaccctcatcagggaatggcggcagctggtcggtctcagggacaacacaaacaaaggatctgggtcaacatttccctttctgggataaaaataattgatgagaaaactggggtaagaattcacatttgctgatacctctctgaccacctgagtctgaccaacaatttgctacttgaatttcggctccccttcttcgttctcaaagttctgtggggaacaaatatatcatatattacatctccagaagtaacaggcagaaaacagaataggaggtaaaagtcaagatacttgattttgaatttgtgttctataataaatgtgaatctaagtctgttaagtctgttaataggcttagattcacattatgtctataatatataaatatatatatttttgaaattaaataaatatatataatttatataatatacaaatatacattaaaatataaatacatatataatttataaagtaaaacttctatatatatatatttttttttttttttttgacctcgggtatacagaactagattaattttaacccctagtttgtgacacttttatgtattgcttacatgtgaacttaccggctaacctaaagctagaacctcacccataacacatctacctctttttcatttcttttttccctgccttctcacctcacagatgtaaccttgtttttgttggttcctgttgttctattacttgtgaacagtcttacttattttgccttgtttttaagccttatcagaaagctatttatcatacatcaagtcttctgtgattttttttctgtactcaatgtaacatcataagactcatgttttttaaaatgttgtgtgtggctcattttcattgctataaaatactctctcgcatcacgatactgtgaggagacctccagttactattcatccctttctagagtgcccattatctaccatgcaaacctagggccctggcaccctagtggaccccactcagcctgctagtgctggggtcctcaggcaccactctctttatcagtcgcctttatctgtcaactcttattttcccaagcccatcagagaaaggtggcatgtttctctcacccttctgtgtctcctcaaactttctaagatactctaagatatcttagacattcaggacaaaaagccaagacacactctgccacctacaaatatccctaaagagttcaaccttgttaactgcttgaaaggatcaagaaaaaggagggaaaaatagaagaaaagacactaagccaatacagtccccaccccttataattcctggttactgatgtagtcattatgtcattaacatactgtagttattactacattatgttactatgtattaggctgtctaggtgaggctgagaaacacttgatgacagtatttggtatcctccagaatatactgggaatacggttccaataacacataggatggttcctcggccactctgagccatcgtcaatgaatccctgtgaacactcctctagcttagttatgctgttcttttaagtttgtctttgagttgggaaagtagacctatttggcttggcttaagggctaaatgtctcctcttcacttggtcttctaatcctcagtccttcctggctatgtggcatcatgtctttaaagcagggagagtaaagtatcaatattttaagaaggaacattcttcccacttacgttttctattcttctttcttttgagccctttctagaaagagtaatgctctagccttcaaccagaaatgaaaagtctatcttcaaatggtttaaacttttcatatatgccttcatatatgtgtctgaggcttcggtgtgctagcctgcaaatagattctagttttcttaataaattactctttatgttcttttttaaggtaatagagcatgaacatccagtaaataagatttctttcattgcccgtgatgtgacagacaaccgggcatttggttacgtgtgtggaggagaaggccagcatcagttttttgccataaaaaccgggcaacaggtgagctctaagtcttgacatagacctggggacttgtcctctgtggacattggagtgtctgtcactcaactaaaagatttactggaaataattggatgtaagagggctaaataataattccgagaatgactatttttattggcctatggaatcttttaaaaatgtcattgatagctatgcactgctgtgtgccacaggattgtgagaatggaccttcttataaagtgaatactgacttcacaacagtggtgaattattctcaggaaccttaaaggacttcaaatatgatcatgatacctcttgttttgtctaaatacttattaaccctgctgtcttttatatacctaagggtgaggattgggttggtggtgatcccctataagccagcagagggtagtaaggcgttttaagattaaaaaaaaaatcccagtatgaattataattgatagcagacaaaggaaataaaatactaaaattaaaatacggataacagtgctttcccttactgcaggctgaaccattagttgttgatcttaaagacctttttcaagttatctataatgtaaagaaaaaggaagaagaaaagaaaaaggcaagtactacctgattaaggctctattaaatttaaaactggctgggcatggtggctcacacctataatcccagcacttcgggaggcagaggtgggtggatcacctgaggtcaggagttcgagaccagcctggccaacatggcgaaacctcatcactactaaaactacaaaaattagccaggggtggtggtgggcacctgtaatcccagctacttgggcgtctgaagcaaggagaatcacttgaacccgggaggcagaggttgcagtcagccgagatggtgccactgcactccagcctgggcgacagaacgagactctgtctcaaacaaacaaacttaaaactgtactcaggactatgtttaatattatatataaatatggtctatctgaaaatttggcttctatatgtattgtctattcttcccaatagggcaatggatacatttttatggttaggcacttctaatctgcactccctggcttttattttttttctctctatgagattcatattaattctaggaaatatacaggacaaccaagtttaaatccagtaactctactcaaaccttatattgatatgaaaaggggaggggaacggagggcagaaataatatacaagacttattcttgccttatgcctgtgaaccataggcatacttgtttgtgtatttaactccctttcactatgaatatgaagatcactgaatatgtatctttctttttagatagaggaagccagcaaagcagttgaggtaaaattgcatctttacttcttgttaatcatgtgtgtgacatgcgtaagcccctgttttctacctgcccaaccactctcgccacctcgcttattactatgtgtttatgacttctctgatcatgaaagatgtttagttaaaagatgataccaaaaccattgctgcttagcagactaatagagtggacaaatacattttatagacaaagctcaactaaatccttaaatatttgctatcttttcagaatgggagtgaggccctaatgattctagatgaccaaactaacaaactgaaatcggtatgtattaatatgtgacgtttgacagttcttacttatctgaacatgggttctacttcctgtagatgttgctgataccaaatctgtattgaatctatatgaaaatccaattgagacaactgtttttcaaaatattagtgtaacatctatgtcaatatacaaaagtagtcaaaaaaagattagaaaagtaatctttttagtagccacacctgaatctaatctaatactttttaaggatgtggacaagatagatttgctttgagacatgtctacacttcctgacctaaacagcttaatatgaaatctattagttaaatggaaattaaattgtgacagctactttcctaaactttaggaaacaaatgattacaatatacgaagtaatcttttttagtagacacatctgaatctaatccaaatacttttttaagggtgttgaccagatggatttgtttggggacatgtctacacctcctgacctaaatagtccaacagtaagtgtttgtttttaaatttgcaatgtaataaaatgacatctataactcaaattggcaataaccagaaatcttaagcatctcattgaaacttggaaggtgactgttgatttttgcaaatgaagtgtcaatggtttttagaataaatgtgaatcttaagtcaccatgggaacctatccacactaattcagttatattaatattgcttacagattaaacctgaacaataagtcagcaatgtagtccttcttggtatcacttaggattagaaggaggaggtgaataatagtccttgaataagcctacttgaagaaagtatgactgttagatggttaatcataaagcctcctggcctcttcatttcttttgcattctgtctgttgcaatttagcagcataaatttggtgtgaagtaagatttaaaacaaacaagtggctcagttatattccaccaaagcttgtccttgttagaaagctgcccattctcataggattttataccatatccagtctgctcaatattgaatgatctgtaacaaccctgtaagaacagaacagtattttcctttataaattaaaaaaaaatggtggttcagggaaaaaaaagaagaaaaaaaaataaaaaggaaagaggtccagattcaagacttaggcccaagtcttcagaccttccaaaacatacctctaatgaaaatgtccatgacattttgaatgacttcttgcaacttcttttatttatgtaacagtttcctgagcacctgctatttgcaaggcatagcagtaagatgcacaacatcaatgacatcatggaatttactctccggcagggagaccaacattaaaactaatcacatcgttagtaattgatgttactacagggtatttatctagttcagattcaggtaatgcttctgcaggagtgagtttctagatttgaacataaaagatgagaaggcaataaacagacaaaaagagaattagtctagaataatggggggaaatgtctagaaaggactctcttgtatcaggaaattatcatggaagcctatgtgaccaaggttacaggagttgaagcaatggatcaaagattggataaaattctcccttcagacttctgcagagaatttgaggcctgtgaatccttactgcataaaactttcaggtcaaatgagatggagaggagcagggacttcatgcattcttctctgaccctaaccatatgagtatcacaatgcatggtagcattctaaaatgcctttaagagagaagcctgtttaatattcattttagcagtgagccctaactcacttgcctatagaacctttcattcttcataatttttgttatagttctgaggataaactttttaaagtactagactagattatcctgacaggtccatcctaactctgaggtccttttgatttgtagtcaactttgtgctctcctccattagtgatgttttctcaaataaatcagtatctgaacacttacttcccaagtataaatgacattcaaacaagtaatattcaaagagagcaaagcactcaagatatgaagtggaattccactggaataggcaaggaagtactgcctatataatctacttctgtagacttctagaatgttctaaaaaaggaaatggaaaacaacatggataatcttcagtctcatttttattagactttatgaagtctaagaattttttatttataggaattcaagttttagttaaactaacaataaagtaataaataccatcaaaatatatactctctgataaccaaaagaaggctaacagatctaattatgtgctggttaggctttgacatgttcttatctattgactctatagtcataggtcaaaaatagatttatctctacttggtaaagccagcatgtttaaaaatattcaactctttcaacaattgctctgaaatatgtaaagagagaaagaaatctaaattacctagactttattattggtcctagatggttgtcactcccctcaaatttatacagaaaagttttatgagtttcaaataatgctcatgttgcaaactatgtggtatcccctagaacagaatttttattggcaagccccttgagcattatccttccacactgcatctcaaaaaaggaaaagaaagaaaaacataaaaacccatgttctgcaactttaacaaccacttgaaagcacagttactatggaaagaatataagacatgatctgtgatcaaggagattaaatctggtacaagggatgggatcaggatacaaagcaggagtgtcacttatgtccttgtgtacatgccataagataacacgggtgggcacagggcaagtgcagacagaaaaatcgatgctaaaagctttgtaaagaatctgaatttgagttgggtctttgaagtgtgtaggaaaatagatcatagttgggctagaaacaacgtgggtcttattgtggatcatttggaaatttggcctaaggaggtttattttaatatagggagccagcagtaagccacttaaggctttgagtagagaagtcctcagtctgacaaactggaatggttaggtgagattagccacccagagaagagctaggctatggaactcaggatttatgtccgattactggagctccctacgagcaggttctgtaacgcactgccgtgtctccagtgcgtgcggctcaggtgctcaaacagtggccaactggaggcagtgttgacagttcgacaaagaatgaatgaggcgctgaccaagtgggtggatgaggagtctttgggctctcagttgtagtctgtgaactacacttttaatcttggattaataacaaacccagcctgaggagagccttatacattttacttatagggtgactattcagaagtctaacattgtggctcctgtttggtgtcctaagaacttcttctgaagtatttgaaaacgagaactctaccagctgtgaacactcaactgttctaacccagaggtggctcaaaacaaataaataaatattgaaatcacaagcttttgtaatacattttatcctaccttttgattgtataaagatccctagattaatagctcttccaatccatttctctgattaaatttttttttaattataagctctttcttgtgacaaattcttcttttataaagagaaagcctggctttggcttataaaaactgtatttttatgcctcacagtaaaggaatccaaaagatagattaccatttaggtctgattttgctgtctcttttgtggccatgaaataggacttaaactttctaaacaattgggtatttttttttcttttaaaagccaaggagttctatttgaacccttttgtatttactagtttgcaaattttatattcccttgaagttgtttattttccccaatgatcaaaatatttagtattctgctcagggtaatgcaagataactactataacttgcacttcagcaaggcattttttatcatttatattcttctctgggtagcatagttaagtatttaatggatcaaagtcaagcagaaggaagtgatgtcagtatgaaagttctgttctaggatgagttataattctgtcttttactggaataaagacatgtcggattcatcaaatttactgcttttaagctgagaattttttatcaaacagttgaaaatccaaaaaattaacacaccagagaaatgatagagaggggatagaattagtagagctacatatttgatatgtctttcaaattaactcttaaacccatgtctctaccttgtacaatagtccccctttatctgcagtttcactttctgaaattaagtctgtggtcaaccttggtctgaaaataagtgagtacggtacaatataatattttgagagaagagagacagagagaccacattcaaataacttttattacagcatattgttataatcattctattttattacttgttaatctcttattgtgcctaattgataaattaaactttatcatgtgtatgtatatgagaaaaatactgtatataggttttggcactatgtgccatttcagacatccactgtgggccttggaacatattccctgaggataaggagggactactgtatataaattaaagatcagttgttggttgactttaaccactaaatagatgagattactgtcacaacacaggcaactctaagcaatgttatgaaaagatgtacaaataggagatcttaatgtgtgattgactaaattagatcagtattgagtgtctctttcagaggacatagacaaaaagggtaagcccagaggagagactgggatgatgaggatgagatcctacttgactatcagcttcagcaagagccttaaatattaagagacatacctgaaggccgtgatataaaagaaaagcctctctcccacctctagaggaaagaactggaccgattttagggaaatgcatttgatcttaaatttcatcacagccagaactataaaatatgaatgtattagtcgatgaattttctcatttagagagatgatcctacatgactctgggggtacaatagagaggactgtatgtgtataggtaggaagctgagctaagcttctgaaatcacttactttcaagctcaacatactttgataatcatttatagtgactcacaatcaattccctttaagactttcaaagtcacaaattgaaacaatgctcataatgaattaagccagtctgtatgtgtgaaccagggtgagcagagacatgaagtaagcaacagtaagatttcacctaatgaggttgagacttaaataaaagggcatgatattggggaggaatagaaaggacctagtctatagctagggagtaatggactacgggggttgatggaaggaggtaatgatcaaccgatttatcaagaccaaattcaaatggaaattctgataatcctagtcatcttatgtaattttctcatttgaagtcacaacatggactaacactttctttttttttctttccaaatgtgataggaaagcaaagatatcctgttagtggatctaaactctgaaatcgacaccaatcagaattctttaagagaaaatccattcttaacaaacggcatcacctcctgttctcttcctcgaccaacgcctcaggcatccttcttgcctgaaaatgccttttctgccaatctcaacttctttcccacccctaatcctgatcctttccgtgacgatcctttcacacagccagaccaatcgacaccttcttcgtttgattctctcaaatctccagatcagaagaaagagaattcgagtagctcgtctactccgctgagtaatgggcccctgaatggtgatgttgactactttggtcagcaatttgaccagatctctaaccggactggcaaacaggaagctcaggcaggcccatggcccttttcaagttcgcaaacccagccagcagtgagaactcaaaatggggtatctgaaagagaacagaacggcttctctgtcaaatcctccccgaacccttttgtgggaagccctcccaaaggactgtccatacagaatggcgtaaagcaggacttggaaagctctgtccagtcctcaccacatgactccatagccattatcccacctccacaaagtaccaaaccaggaagaggcagaaggactgctaaggtgaattgtcttctccacatatccattagcagagtgcatgttcggtaccaaagggtggtgtgatgcaagctctctttcctgctgctctcgtagtttcctgtgttgctgtgaaatagaaggtgggataaggcactttggttctccaggagtactttcctctaactgccaccgtttttaagcttctcagcagtgtttttcacaccctgctttccgtgtgcatgtcttgtcacttatgattaaactaaacacaagtttttccatttttaatgctgctatgcttctatacctctggtaagtttgatcatcgtgttctgggttgggagggtgagagttcttgtgattccctttgtacttccctgacactaacacatgccctgcacacccatcatgttgcatcagtgtccatggtggtggtataaaattctcgagcttatctcctcttttaaatactgagtaaatacataagctttttctaagcttatgtatttactattaccactatgatctcagctttatttaagagcaatttaaaatgcagttcccataggtgtctttttttacctctcctaagaatatacaggcttgcctggattaagaccctatgatctctatgtagactgacttaaaatccaatggaatgaacaaaaatatttaggatgcttattggtagttgccccttttacacacttgctcccccaacttcaagcatttagcgatgagaccagaccaatgtgagtgtgtaaaggaatatagtagatttcactttgcaagtcctaggtagtgtcagacactaagactcagtagtccgtccgttgtaggaatctgtgtctttttttggaggactctttttctgtagtagtagttgttgttgttcatctgtcaagaaaaaagttttcctttttgtggctctcaaattggggtatagggtaggagacaaaatgaggctgtatttcactgttagtgagtaactaaggcttctccctccctccctgtcctgtcagtcttcagccaatgacttgcttgcatcagacatctttgctcctcccgtctcagaaccttcaggccaggcgtcacccacaggacaacctacagccctgcagcccaaccctctggatctcttcaaaacaagtgctcctgccccagtggggcccctggtgggtctaggtaggtgcctagagataaaattaagtatgactcttttgcttttgctcataaaatgatgatgcatcggaagagatttcatactcccagagggttttacagcataagatttgagcatcccagggagcccttctcccacttctactatacaaccccacatccatttgatattcttgacttgtaactcacatttggctcctcgaggcagcatgagacaagaaattcattttcagtattgtacttacttgaaccaactggtcatggtttcctgaaagacaattgtaagggattctaaactcagaccagcttcagtagcaaaacagggttgacataagagaggcttgtctgtcaacatgcatgtcttccatgtcttttgccataatagatcgaaggcctatgtcctttcaacacatagccctcttagaaggaatatatgcccaagaaggatgtaagttaagtctgaagcaagaataagtcatagagtgaaagtcctaggttctgggcccagctgtgttcctaggtgtatggtaagggtagatcaggcacacatcctgatcagtctctgagcacttctgccataggagctccttgccaatattttggctagcttgagtgttttactgaagctagaacataagtcctagaaagccaaagttgaaaaaagagagaaataagggaagagatggaattttatcagacagctagtatgcattgacgctcttaattcctaaatgtgtcattagcttgtgtgagccgctgatcactctgtggtaggacagtgggaaagtccacttgactgagggctggccttgctattcttagtccatagcctatagttcttttcagactccatggtacagttttcagaaaccctgacaatagtttttgctgtcctgctatggactctatttttcttctcttggcacctctacaaactccaaatggactctggcttgggaggtggaggactgtagacgaggaaggactctcctctccttcggtaaaatctgaccagggatcctggctttctctgcctcctgcagtcagtcatcaggatccttgttttgttttcctctctgtctctgttgttttcctacaaaggaaaatagtttggttcttttacaagaaatctgtttaatcatatctagaatagggtggccagaggaggactgttactcaactgctgagtggcagaaatccgtgagggtatgaaaagccagcttgtcccaggtctctgctcgcatttaccccatcaagaggctctctctaaagacttcatgtctcttgggggcttccccctttctgcgttgctcttttccttgcacccccaagtggagctggttggtacccttccctcacagaagaccagagtgcttgcaatgcaatgtctgcagcgagatcacatcacagagctttttatctgatatcaatgcccttaagaatttttgcagccaatatttaacaagtcagcctgaaaatacagctggaccctataactgtttatttattcagacgaagtgaagctttttggctaggtgcccctgttgagggcttggggtatacaactgcagaatactgatgattgttccaagtttggacatgggactcaaactgagctctacagtatagtccctgtccactagcagggatcctcagccaaaccatggaaggttgtaggtctggcttccgctagacccagctgggggactgtctcccctggagaactgggggggtggggagagggtattgtagaaagctgagccctcagattcaacttgcttgtattttaatctagcctcagaaggtaataaaattaatgttctatacccatgtcccctttttccttattccttgcccctactttgtcaatgtgttcaatgtgttcaatgtgttaaaacacaatgtggggatttggtgggtaggaatgaagactggtataagtatatactgggaaagccttgaattcctggcaaatgtaatatttttctctcctttttttttttttttttttttgagacagagtctcactctgtcacccaggctggagtgcagtggtgctgtctcagctcactgcaacctctgcctcccaagtttaagtgcctcagcctctctagtagctgggattacaggcatgcgccaccacacccagctaatttttgtatgttagtagagacagggtttcgccacgttggccaggttggttctgaactcctggcctcaagtggtcctcccactttggcttcccaaagtgctgggattacaggtgtaagccactgcgcccagccctaatatttttctcttttacaaataccattctcactaatatgatattttcctaaatgaagacaagttgtccaacatgaaagatgataaaattctaccctcctttttgcacagctaactggtggaaattattagcaagtgatctggcttctgttaatacaatttaattgaatgtgttttaaaatacaagcaacaactttgttcaaactaaacccatttttagagcctgtattgtagaatataacttttctcttgatttgttatgaaaggagtatattcttcagtgaaaatgaagtctaatttctgtatccgtgaaataagtatttgaattaacatagcatttgaaaattaaaattgccccatgccttgctgccaaggaagcagaacaggagaatggggtgccggatttagagccagtgtgcctgattttcagtttctaccatcccagactatgaccttcccaattttaatgaatattcttgcacccagtttcctcacctccaaaaagcatgctgattaagtgaaatggcctgttctgaaacccaccactctctgtgagtacaccatgtgtgcccatggccagatggccagcatgcatgatgagaatggagtcaggtaataccaatgtctcagactaagaagctcgaagatataatcttgtgctccatcactcctaaataccattttcaaagtattccctcttggaaacataaacgtccctaacccaggtctgaagaaaactttcataactaaagaatgccatgcaccaaagctcaaagcaagtagatttcaagagcgaagcatcacccactaatagatatgaggctgaatttaggtttccttcttagcggtgagtttaactgaatcattaatgcacttggaaagaggcaggaaagacagtgccctgtatattagaacaagatgcagggagcgagcctctcaagaatcagaggccatcattggagaggcctggattctggcgatttaacgaattcctgatgacatagcaaggtcgtaggagatggagccattcaccacaaagatcagatgccccaacacaggccattagttaccttgaaagatttttgtttcccattgtcctctctcctcttttaaattctctgttctaacttctggcaaggtttagcaaatggcacatggcaggaagcacttttatttgaaacagtcttcctaggataacatcctttcttccatttttatatataaacgtctaaaactatcttggcattggccaaactttatcttccctttatgtatatagctgtatcagtcttggcagcaataaaaagtgaagaaactttgaaatggtttcttcaggatgcaagcatgttgaggtcttgtgcacatgtgtgattgctggtttccataagactccagacgtgagccagttgccaaatgaaaagatcaaatctgtgactcagagagtccaatggattatcttaattaactacatcataatcagcatggttcatgcataaaaatatattcacttaaataagttcctgctattaacaggctctgttctagttgtttgagatgtatcagacaactagtgtctgtatgataagggcttatttttttgatgagtagatacttatggaccgtactacccttctaatcaggaaagttaaaaagacatggtaggaagaacatgggcctcaaaatgcaaccagcatttgaatgctcactatacagtgttagctggctaacttttacagtgattaatctgtcatattcttcccatatcagcctcagggctcaatggaggtgttagctgtggagaggctttccagagagttgtgctctctgaaattcaagaatcttcttcaagcttgactcctgataagtatttttcttcctcttacttcaggtggtgtaactgtcacactccctcaggcaggaccatggaacacagcatctttggtcttcaatcagtccccttcaatggctccgggagccatgatgggtggtcaaccttcaggttttagtcagcccgtcatttttggtacaagtccagctgtttcaggttggaaccagccttcaccctttgcagcctcaactccccctccagtgcctgttgtctggggcccttctgcatctgtggcacccaatgcttggtcaacaacaagccctttggggaatccttttcagagcaatatttttccagctcctgctgtgtccactcagcccccatccatgcactcctctctcctggtcactcctcctcagccacctcccagagctggccctcccaaggacatctccagtgatgccttcactgccttagacccacttggggataaagagatcaaggatgtgaaagaaatgtttaaggatttccaactgcggcagccacctgctgtgcccgcgcggaagggagagcagacttcttctgggactttgagtgcctttgccagttatttcaacagcaaggttggcattcctcaggagaatgcagaccatgatgactttgatgctaatcaactattgaacaagatcaatggtaagccactcaccactctgcctactgttccaacaactatctccactgccacatggacctaaatgagttccccaaatgaaccctctcccacccgccaacagctttgctcttgcttctgttggtaatcaagggttacggagacaacttaaccatttaccttttggtgataactatttaccttagtcatttctgaggactgacccaatgctgccctctagtgataaatcttaaaagggctgccatgagctattgaaatgtgatgactggtgactcttggagggctgtgtaataaggcgtcatccatgtcccatcagcttaaaatgaggggattctgaatctcttccacttcagataaatatgcatggctttctcttccgagaaggataataattattggggtacctagtatttggtgttgatttttgttccactgatgtaaatttcaaaagtatagaactaaacttcaaaaataagctgactcggggactggcctatatttggggaaagcttgtctactgattgcctggattttttaccttctagaaccaccaaagccagctcccagacaagtttccctgccagttaccaaatctactgacaatgcatttgagaaccctttctttaaagattcttttggttcatcacaagcctctgtaagtatgaactactagaagctcttctccaaagtacatgccacatagagctccagcctcctgaattaaccttgcttttataatagcttttatttatttatttatttttttaagacagagtcttgctctgtcggccaggctggagtgcagtggtgcaatctcagctcactgcaacctccacttcctgagttcaaaggattctcctgcctcagcctcctgagtaggtgggactataggcacgtgccaccacacctggctaatttttgtatttttttgtagagatggggtctcgccatgttggccagactggtctcaaactcctgaccttaagtgatccatctgccttggcctccctcagtgctgggattacagtcatgagccaccgcacctggctataatagctttttgatggtaaaacatgtttagctaagatttgtcaccaagaaccttcacagtataaacattcatttaaactggagaaagattatttgcacaagaactattatcttctgaatttgagaaataatatcacatagaaaacatccttcatatctcacttaacctgacccatgaaagcatttcgggagaaaattgagccaaaatactgtcttgaaaacctttcaaaaatttaagttcttaattttccaacaatatttctatagcctgtgaaaataatacttcccatttcggggaggcaaatgaaatgcatctgaaccttgattttcacataaataatatacactgccatctgcaagcagatgaaaacaaaacactgtaagccccatataatgtttgattggctgattggcctatgacctaagcgatttttaaaagaattttggaagtcttcattgcgatttttttcttatgactgtaactgtatttattgactagatgattttatcttcttaggtggcttcttctcaacctgtatcttctgagatgtatagggatccatttggaaatccttttgcctaaattctgtaagtagaagatcctaataagcctgtctcaggggtttttgtgagaaagggtgacatggaataaagagtgaaattttaattttagaattgggaagagggtaaatatctataatttaggagtaatcgacaggaaaatctctactgagatcattcaataatgactaggctgggcacttaagaatagaattcctaaacacatcaaaaaatagtaatatacccttggggatgtggatttttatcttattccatgttcttggtttttcagttctgtgtgggaagtaaaactcaaaacaacacatcacaggtttctaacctttttactttcatattgaagtggttgcaaaacaacctagtaataatttggtttcctataaagggttcagattccattgactttctgaagccaccaagtcagcaaaacagattatgatcattacttctctaccatttaactgtgagcaatctcaaagttagtctgaaagagtctgatggtattaaatctgaaagttttaacaactattaaagatctccttcataggcagtaggagctcaaaatgagtctgaaggttgattcttctgtctcatgaactttatcttagataagtgattaggtagaatcaccctcagctgaaatcctgggagggctcagtgtaactctttctctacagaaggtgacagcaactttattctgatctcaaaagactgaatttagtagggaaaggaacgctctccccattttagagcaggtaggccagctggtaggggtagaacaatagaaataatgaaaaacaacaacaacaacaacaaaaaccaagcccattttttttccaatcttgtctcatccaaacaggactactaaactgtgatttggctcatctagaatgtaattatttttaatagatagatatcttaaacgtggcgaaaacaataagattgagcttataggcatctggatcattttccctcaactccagttctacaatgactgtgtttcctgtagtacctttccataaactgcttcagagaactgggtaaatcattaaaaatgcaaattcctgggtcctactgcagccctaaggaatttctctttggtgccaaggaaatgcttccttttaacaagagtgcaggtgattctaaaggtaataaagcagtaagtagatatttaagagctagaagtcttaccagagatcattctcaccttccattcaaggggagatatacccaaaccaatagaaggagtaaactacactcagagtcaagatggattgtatggactaaattgaatgaactagacttctctttggaggtccttccttctttaggtcatgaaggaaggatagtttaggtcaacctgctacatcaatagattgggtaaggggaactctcatgggataaaataactaacattgttgagcacttgcgctaagcattttattagatgctctacatttatcatcttcatcaatcctcacatcagccctaggagatactattactgacatctttaataatgacttgatatttaatacattgatattcagttcaaaaattctaaccacaagtttctttcttctccatacctctctaggaacttggtctgcagaccatccagaggaataaaaaggttggccttagtagtcaaaaacaaagctgatagccagacacgttctgatttctgcccttgttccagctttgacgtattatctgttgccttatttctcattgcctcttctacttgtaaaatgcttttcactttctgtctaggttaaagctaaactgaatctatggctttaaataaattaagatcctaaactctctagcttaagtgtaaatgaagtacagtagtttccctactgaaccctgcctcttgtgtccctggaaccttctagaacacctgccttctaccctctggttgggagatgcagccaccacatcccttcatatcatactgttttgaataaattttcaaatccttattgttcagagttgtttgggggttctgtttcagagcataaaacctaaaggttatagtagaacaaggcaccttcttaaaagaaatcttgcttcagaccatcagttacagagaatttctaaagtaaaattgaagcaactacaacttctccttagacactttggaatctaaccacttaaggacctttttaaagagatagcttctcttctttctgaagatcaatttctcccaaggccaagattgtccttttctcccatttcttgctagctattgcaaatgagggaagaacattattcatctctcctccccttttttttctgattcttttttcagtcagttttgctcctgggttcaagtagtattaccaccctttcacaagcaacagactctcacagggcaaaaaaaaaaaaaaatctaatgattcacagacagatctggagcctctcttcattctcagtaattgctagtcccaagaactagaattgcaaatgggcacaacctatatccttcctgtggaagaggaggccactctcttgagctgaagttccagaagagcagttaatgttcaagagaaattgaactcaactcagcaacaaaggactctattttgaagagcaacatatcacaaagctaaatgtgattgtgccaaacacattaggtgcttatttggggtcatgctaggcctttatcaagtaactggaaaacttttcttgcagccacaatctcaatgtcgttagtaggaagataagaggggagaaaaagctgtagaacaaatgtttggggttaccattgaaaatctaatgtctgcaatatttttctcctcacaacttggaaacgttcccagttcattttcagtcctgttgtgagcacagttctgaagggtttattattgtcaaaataagttttgttttgttttgtttatgttgggtttttaatgttgtctcttgacccttaatgctcaggttcttgtgggagttaatcagccacatccaatgttaccttgagggggaagaagagggtgatgctcagaagctaaacaagacaggggccacatgaccctctattgattagccccaagtagaaagtcctgtggttttatgtttaatggtaatagttgatcatatatggcataattttctatcagcttcctactcagtcactataaacacagacttgaaatagtactttaaatgtccaaatacctaaatgtgctaaactggaggtaactatttctaggtagttgaatttttgaaagtcatgatcagccacacaactgttttgtacatacttattttctcatgcacttttctgtatgcaaataaagctataaatttactcatttcaataaactggagtggcagaatatca

SEQ ID NO: 21 - DNA, 54365 bp, Pan troglodytes
  variation 43647..44233: note = n is a, c, g, or t
  source 1..54365: mol_type = genomic DNA
cctgtccttatttgcacccgccccccgcccgcgtcggtctggggcttttgacttcgccccgaacacatttcccctcccgtcgctgggtccctgcgatcgcccccagctggtggggctcgcggagctcagtggagccgggtcctctgcgccgctgcagcgcgagttaataaacagttaagtttggaagactctgcagacacgttgagggggagttaccaagcccaggcagcaaaaacatcctggcacattcctggggagtcctcagctgccagcatctgattagaaccatatctctcgccgggagtggccgcgcggctccgaagctcccggccggcggctatttaagcgaggcccgccgcatccgctgcgctgcagcctggaggctccgggcgcggggaagtcatgctcgcttcacggaggcaatagctagccggtgagtagcttcgaaacccttcttccctctggctctatttttttttttttttaaagatctccttctctcctttgctccccctctctcacccccccgccccccgctacccttctttgggtacagaccttgggctgtggggaatcttagaaatgagaccctgtgcttggggaaaccagcagttttgtggcctgacatctgaggaatgcttccatggaatgtatttacctttcgaatccgactccagatgcccagcttgtgacattgaacaaacgcctccttttgtgtcgtgtgtgtgtgtgtgtgtgtgtgtgtgtgtgtaaaaggtctgcgggcagccctcctaggacactgaggtggctgctgaccgcctaattaactcctcgaagggtgtttatttttgctgtgtgacaaaggctggggacctggcttgtgcccataaggagctttttcctggtgactgacaacatatggcattaaaatgtgaacttttgtcttacaccggcattcctaaggaagtatctacccgagggacttaagaaacttgttttatatcccccggcgcagggagcatggtttatatggtgcttgcctgcctgttgtaagctggttaaaaagattaagtaagaattctaaaaaaggggggaaaatgaatgggttaaaaccgtggagcctcagtcaacatagcggttttcatagcatagagctgactctgttatttgtttctgccgtctttccctcttgacttaattctgagcctggaattctggtccgcagacagtttcagcagggagctgagtccaaagggaaattcaactggattaaaaacacttaaggaatctggatgttatctccaccccaaccaccccccaccttttcccctttctttttagtttttgtttggaaggaagagagccgctctgtaaaccgagaagagcagaaacaagcttccagacacatggaaagacttaaaaattatggaggggcgacttcacgaatagtaaatgttgctattgctctataaagtgacttaatgaaaaaatttctggccttaggcaaagcaggggcatgggggagaaggaggtaagatataactaatgcaaacagaagtaatgggagtggaaagcaggcatctacaaaaaatgcctttgagatgtctgataagcctcttggaatggctttgatgagatgtatacttgattgtccttacagtcttgaggttggcttctcacacaaaagcacctactggctgttggggaggagggagcttgcagctaccaaatggcttgtcaccatgcttcttaccccagcagccagactttgggaggctacttttctctgagccaggtgccccgcccactccaggttctgtgtctcccctcctggaagggagatggccctcagtgacactgtaagaaagtttattgccttgagaattcgggagtatttgaggcttgagccctttgaaatctttggaaaaggacctttttggtggagtgctggacttgtggaaataatgccacacttaagacaacaaggagagtacaatgggaaagtcttctagagaaagcatgaagaagacctagtggtctttgccaatgtggatttctgggacagaccacttcttccaaatccttagtcagtttcctcctaaggccaactaaattcttttttcctgttgttggtgaataacttcccccttcttttcccactcccagctggaaggatcccttctcatccaaatgactgacctagaaaccagtcatttttcagctatgccctcctatgctttaatgtataaccagaataagtagatggtagaggaatgtcttccaactttgagcccatacacgtatgtatttgccattctggggatctttgatcttggtggttgatctttacctgaggatgtaagtgagggaagaaagcacttgttaaaaaccttgtctaatttgtgaagggcaaaatccagagtttgtgtttctgctaaagacttttatagtttcagattaaactggaagtccaaattcctgtgcattaggcctgtttgttgtctttctccaaaggttgaatggatttcactggccttgtttgggttgaagggtacggcttttaaggcatttgttggcatgaaggtagtacagggacccctggcggctgctgaccagctgtttggggatgatatttactggcctgctcaaccaggcctcgattacctgaaggttaagggagcaggaagatatcttccttgctgagtgctcctggccaagcaggaggctttgctgtgacatgggctcttatgctgcttcatttctaactctaccctcatatgtccataaacctaagtttgctaccactgatatttcatctggataattttgaaggctctgcgtgtttctcttcctcattctcttgacctgaggatttaattattgctcttcttaaagacaaagccaagatgctgaaatgcttgggaaagctgctgagagtgagccctcctggggtttgaagttgtcctaatgctcatcagaacatacctccccagctggaaagattcgaaagcttactggccaggaaggtttaggtaactaaccaaacacataaggttttttaccctttagacagaaccagaatgggaaccagattggcaatatgaaacacctgagtaacaggatgtggtattttaaaattctccctggcactgctatgtaattccaaagttgaagctgtgccgctgaattgcacaaaggttggccaaaatcatatttagatgaaaccgatttttgttttgttttgtttgagacagagtctccctctgttgcccatgctggagtacactggcgtgaacttgacccactgcagcctccgcctcctgggttcaagagattctgtgacctcagcctcctgagtagttgggattagaggtacccgccaccatacctggctaatattttttttttgtagtagtagtagtagagatggggtttcaccatgttggccaggctggtctcgaactcctgacctcaagtgatccacccacctcggcctcccaaagtgctggaattacaggcatgagcccaccacacccggccagatgaatcagatttaacaccagatatgtgtctttaaaggagacccaactcataatatcaacatatcctgactggattaactggtggaaatcagaaggaaagcagactcctcagtctttacttaaagacagaaaacaagcaaattcctggttaggggaacaaatgatgcctggtatggacacagagggctaacattcagcactggctgcctccaacagggcacaattggatagtagttgagaactaccttctgaagtaccatttcctgggttcaaatcttagctacagggttgcaggttacatggccttgggcacattccataacctctctgtacttcagcttgcttatctggggagaataatagtacctaccccaggattgctgggaagacagctaatctaatatacttggaatactttttcccatctgattttgaaggttttgtttgtttgttattactcccccctgaacaactgaattaagtgtctttgtgaaaactgaaagcaaatggaaaatttcttcatgaaaattgaatacccctcacctacttgaaaaaggttaattattcaagcacttgattttaataaagccagtgtgtttgcttgtgctcatgctagaacagacagggagttactctctgttctcatcctggaagcctgcactttggtttggtcaggctgacctcgctgttctcagttaagtcctccccacaccctctcagactcccgacagagaaggagcaatccttccccctgaagtcagcgttgtcacagaaggaagtgggaagggagggaccacccggattaaactgaatgactaggctagaaataaaaattcttccgagtgtgtgcaggccccatactatccttgcccacatagctgggcaggttgccatggttactccccttcccgcatccttctaccctggaaggaagcctgcctctctagggcaagtagaatctgaacaaattgcttcctggtctaaaaatggaagttactaagtgaagtagaatctcctctctacttatatcaccccctccaaactgattttaatcccaatacttaattttctaaccttcctagttcttgcataatctagatagcaaaacatgaaagcttatgaaatttctggaacctaaaagttactacctcaatatagaagcagcctggcaagttttccctacatatttgtactagctagctaggggcaagtgatttttaactaagtcaactggtaaaaattccaagtgaatggggcaggctgagtgagtgttacgttgaaggtaaacagaatgtatgagggctgtcacttagattttcaggtaaccatagagtaaagggagcaggtaaataggaagtaacgatcctagaatactggatttgaagcaccgttcaacctagaagaaatctggatgagggaaatatggtttaatgttgtctcttggtaaaaaactaccctattgctacctagcaatatgatgcaaaatgttagtcccaaaaagactttgatctttatgtgaaagatgagctgccatacacaagtttgcatttgacaaattaattcagtctttcaaaattggacatttagcttgctgtgtatttcacagcttgagggaactcatctaagacaatagttctcagagctgattcccaaaccagcagcatcaacatcagctggggacctgtcagaactgcaaactctggaagttgggcccatccagctgtatctaaactagctctccaccacgtgatctaagagtaactttcataattcagtggttttaggattcacttgttcagtggaaatcataacaaagtatttgaattccttcagtcatggagataataaagcaaaagcctttaaacacagtgcagtttaactgaatcttaggatgcagaaagattaaaaagcatgggctttggatatttttcccatataccaagtatggctttcttgatcctaggaaacccaatatacttttggtttgatattatcatctcacttccaaatcttttcccctctgctggggtttttaaagagtataattcatctccatttattaggagactgtcccacttacttcttttagaaaggattccagtaaactagatcattacccttgaaccagatggttttctctaacctatacaactttttattttgtttttatgccgtgtctagaagtgcagatgaagtcctctccataaatgaatctacttcatttagtttttgtaaagtttaatggctaatgaagcactgctcctttctcccattcgactttcactttaagtaaccggaaatagaaaagatatctctatttattggctccaatatgatgagtatcttgcccaaggtgttatcattaagtggtagagccaggattcaattatgaatctttatgatttgcaccttggcgtttatctgaatacttagcaattacctactatgtgaagtctgatgctaggttagcaatggaaaatctcccagtgagcagaaatcaaaacaaaagtcttcctcatgtgtggcaaaggacataggatagagagttaaacagacttacatgtgaatggcagtgctaccatttcttgggcatgctattcaacgtctctggcccttagttgtctcacttaccttgcaaaaacagtcctaagaatgcctgatgtcaaacagagatcacatctcaaactgaaaaatacaagggtgtgatgtacaagtatataattggaactctgattttgaaaagccaacatagattcatggttaagagcttgggttctaagctgcaaatgactgtgcccacagcctagctttgccatgtaagacaagccatgtaaggcctgagcttcatttctccatcaggaaaatgagttgcctcgattttaaaattaaaaactcctcagaactcctgcggctgcttctgaaatttacctgtcctagaaatgcaattctcaatgcaataactaagctgatattttttaaatggtcttgttctcattgtttttgagtatcaggcaagctaaattctagagatgcacacattcaggctgaaaattagaagactgtctttcctatatatctttaaactattaaatgtgaataatcaaggaggagaatgtggcaatgcttcataaatcagtagaggcacacaaatactaactttaaggtaccacttaaacctcatctgagcagggcagttaagtccttttaaggtctatagttaatccatacccaaagaactggaaagtgaataacttcatccctaattgtgtccatattgaacacagctgccctctcggttctaaatattgcatccaaatgatctcacttattttttttatattttaagtgtcctattagggggccaagacctggtctagttttctgtaatatgtaatacagatgctaacgtgctttttgttaccatttagtgcaacagaaataaaccaaatgtgttcgaacatatgtcagagggctgacataatcatatgaagaatgctataccagtttggctttgggacgaaatgtgaatctactagggaaacatacaactgccctctgagtcagaagatcagaagttgctgtggctacacatagtaggtgctcaaatatccatcctttaaagggaagggtcagctgtgctttggttatatcagcattaggttttgttgttgttgttacttgattttgttttgtgttgctccctgccccctttacctctaaaattaagcgacttaaatgcaattcatttttgaagtagaaaacaagtatgtagctgatagaacaggcttttccatcaatagttggttgctagtaaggagggtcaatattgatttctgcctgggctaaggttcaactatagctgaggcttttcagagagcatacatgtactagaattgaaatgatagacagttatatttaatgtccacgctgtcttctaaaggatagcttgatgcagaaatgcttgcttaactgcctgaaaacctgttctttgtgatttctgatttgtctaactggtctgaagttcccaatgactaaaagttgatagtaattgaaagttgggtgcaaatatttaccttagagggacacatatatgacaagagctgcctataagatagttagagaaaatagtaactactcaactaacatatgattttattgtagttaagtggtacagagtgttgtgtggatccagagggagaaaaaggccattggtgttaatggatttggcttttaaaggaacaatggaagtcaaataagcaaaggtaagaaaagaaaatgcattttaggcagcagcgcatatgcaaatcatgcagttggatggacttagggtatgcctaaagaactctgactggccagtttggccaagaaacagtacaggtggcatagggctgagaagtgtctgagtttgaaaagtagggatgaattatactgagccatggatatcaggataagaattttgattttttatttttatttttgtactttagattctggggtacatgtgcagaacatgcagttttgttacataggtatacacgtgccatggtggtttgctgcatccatcaacccatcacctacattaggtatttctcctaatgctatccctccccttaccccccaaccaggcgccggtgtgtgatgttcccctccctgtgttgatgtgttctcattattcaactcccacttacaaatgagaatatgcggtgtttgccaagcagatccgtcattaaagcaggaaaaccaaatgctgattgggataacttaacctggctctattggcagaatgtgtttgagtggagattgcttagtagttgaagaaaagcctatatttcttcaaaaatcatcaaagtagagaaaagggttgcttaacctaagattaaggtgcaaaaagaaatatttattacccctaatgttttaagcgcactgctcattaacagactgtgtcgagcctagaaaagtagggcaaataattttcggatcccaaaagctttattgaattgagagaagagctctacatgaatcagagggcaatgataggtcatggcaaatgtggggaaatggctggtaagaggccggtaaagacttccctgagaccacacatcttgagtggccttggaatgaaggttttcacgaaattcaagaaggtgaaggcagtacatattacaggctaccagaccacataagaaggtctggtgtgtctatgtgtctgtttaggggaaacagaagacaacggcctcttcagagagcaggtggccatatatatgtatagtccgcagcctgattagaagggctttgaatctcagcttgaatgtgaatggaggaattgaacaccgatacctgattaattcaaaatcaggaaagctaggaggccagtaaacactcctacaaaaatttagccataaagggagatcagttacaaccagagtctcttacaccttagattctcactgaagccctttggagaaaatggaagaaagagctcatcccataaagagttgtttgtttgtttgtttttcactttaagtgttttaaatatattaaggagtacttatgctatgtgtgtagaaaagatcaacaaacaccataatataagtccactaatcatgagggacatgtatgatacaacgtggtatagcttttcagggaggaggaactcagggtggcggtgaggcaaggttggggagaaatgctggaactaagtaaaaaaaatatatatatgatggggagggaggagaggtgtgaaaataaagggtaattatgaaaagtagactttcagaggtttgactcattcattaaacatgaacagtttaggataaaatcttagcttcattctaagctgcagacagtactgttgtggatcttttaggtatatctgcatacgaagtacattctgtaatgctgttcccacttagtgtatagtgatgcaaatgttcagctttctgcacaagaactctttcatagaaacagtgggcacaaccatgttctgtgtcaggatctggactcttacacttcatgcagccaacatttgtggagggctcactacttgtattgatcatgaagtccatttccttgaagaccgacgttgaccaagtgctgcctggtagccccttgataatgctcttgtgacttggtagtgctctttaaataactaaagccagctatagggacccttggttacattttcataagattgtttcactgaaatctgagattcaatgtttggcctgatctgaaaatgacacgttgtattcttagaaaatctggtaattaaaagtgccacagaacatgtctggttctagaatacagaagttccctgaattgcttgtacttcttaagtgaatgcccgactgaatgccaaatgagcatagtgtttccttctggtgtttatgaagatagtgttgattcagaactttggattttatgataactctgaaggaaacatcactgaaattcttcaataccctcaggtataacagaattgcttccttctgttactgccatacagatggtccttcagattgtaacgtggttataggagactcataaatattaaatgtaaatatcccctcaatttgtgtcataatttaaaaattgttgaagagggttattaacccttcagacaacatttgcatctttccataattgatatcaatacagcaatttatatataattccttgatgtaatactactttttcttccttttatgaagtattattaacagcaatgaagctttctaccctaatcagaaacaattcctccaaaacacatagcatcagttataactgtgacctgcttgttctttctcccctacctatcctctaagcccctttagagtagagaccatgtctattttgtcactctatacataggataatgcagtgcttggcaaatagtacgtgtttaataaacaataaccagatggccaggtgagtgagtaactcaagccactttcatttacaacatcaattgcaatttattatagagtgagcaaaatggaaaactttagcttgccttatcatctgttggtataagcaaaacagttctgacccccccccttttttaactttaaggttatttataatgagcaatatccatatgttcttctagtttatatctgctcagggcctgaggaaggcagacaagctgttactgaaattctccagatggtgtggtctttccaagttgctagtttaacttctaccaatggagtattcatcgttgctcatatatctgtctgacctgatggatgtaatcacctggctaataagaattgtggtgaatagatttcagcctgatattttatccacaaacaacttcttattctccttctgtttctccttttaaaagtgtccaccaaattgtttataaaattactaataaaatttgagaaaatagatgagacctttggcttagcactggataattaaggctattgttttgacttaacacaatttctgcccaaatcaaagaaacttgttttgttttgtttcttatttccctgtgcagctgtattgtgaattaagatatccattaggctctttaaaatgctaaaattaggtcacgaactcattaccgtctgcacagaccccagcatttccaagaaccccaggccggaaaccaactataggccatccactgaccaactttcaaaatcctagcataagagttttttgacttctacttatcatttgactgaaaacttactgttgaatttttcatatgtcaggagctttccccaacaactctgcctagctatcatttaatgatgcctaagatgaaagtgttgacagctgactatgggcactgttcaatgtgatttcagatatgctcatgttctatgtgtggtttcccttcacttttgagtttaattgaaagtgactgaaccctagagcatcttcatgattctgtctttagcccaagttagactgtagacttatgcctacattttaagctttcctgtctaccaaattagcacatctttaaggaatttaatttttaaaatacagaaagcacatcgccccaatatcacttattctaaatgtataagaagcagaaatctgtcttttcctttcctactgcccttcttaatgagcattttcttggcactggtctttccagactttcaacagttttatggaaaaacatatataaattgggaaaaatcatattaatactttctgcttcatacaagaggctataaatgcatgactatcttagtaaatagctgccatttacaaaagatgctctttttttgtttttaaggagctcacatttcaaaatgtcattccacttcatatacatttctataaagcagacattaggggggacccttttgtatgatgaaattgatcttagaatgtagggtgtaagacataatggcctttgactttttaaaaagccacctttaagacattatatttatttgaagtttgagggtcactaagcatcagagcttggcaagatgggataaccttgaatctaatgtttgagattgttagtccttaacctttcaattaaaagcctttgtttccagaagattagccaaatatttgaaagaaaccggcaatgttgagtcactccaaagggcaagtctgtgcaactgtcatactgcagagctctctgactctttgatgccgtgtccctgtactcggatttgtcaccaccccaacctccacaccatcactcaaaacctgaaagtcctcccagtcccatctagacaaaacagagtgttatcgcccaccctaatccagtttgacccaccttttaacctttcccctggtataacccagcacaggccctatattatagccaagcagacacgaatatcttttacacattgctattagttcctctttcctgaaagtactttctggctatgcacgttgccccagtctttgaagaactaaattaattatctcttttgttgtaaagcaaagacattaaagcatatgtattaggttggtgtgacttgcaggttgttgcttcactcctgtgcttcagcctcctctcctgtcaaatagggatgatactgtccaggattaaatgataatgtcttagcatcacatctggtatataataaacattaggtaaatttaacttttaaatatctaatattctgtgtttctaaggaacatgtccaggacattctcagtcctggattcccaaatctattttcctctactctcctttctcgccagagcatttttcatcttctgaaagtctatactccacttacgttttgctccctgttagatagtaaaccctataaaggaacaaatctttattttgctcactggtatatcccaagctctagaagaatgcctggcacttagtagggatgcagttttgattacattaattaacttgctggtaaagatcactggaattcaggggcaaacttggtttccagtctctaaattgcaatggctttaagttgggatcaatcaccagacccccatgtgctctaaacaacaacaacaaaaaaggctgtcagggtctgcaggcttttcaagttttgtcataatcatggtttcacagcaaaatctagggtagctagtggcctaccatttgcgtcatctctctggccatgcacagtataagggaaatgacatactcttaagagtcaaagacatttgtttttttcccccttaagggaatgttttggacccaggtgcaaatataaaatagcatttagggtaggaaaccaccccagctctgagagcgaatgacagactcggagaagggaactttattcacatctcacctctgataattaactctaaaagtagaactttgcttattttggaggtactatgcaaacttggtagtgttgtttctctcactgttttccttgatggaactaattgttcatatgcttctgtggtatgttaattaaggaacacattgctagttaaaaaaaacactgcaactgtaaatatttttctaatttcacattttgctttactaaaaggcttctgtggagaatggaagggcttggtcattacttttggaggatttgtcttaacttccttgtctgcaatattgagtctttttaataaagattggattaggaacttaatagtggctttcaaagaagacttgtctttgcacagggctatagagttcagctaaggaaacaaatgatcgaattgcattctctgatgctaaaaatgcctacataggaggactagaaaatagcatatgctaccatggagtggatcctctgaggcttcaaggaccaaatcaagttacttttatttaatgaccatagtaagaagcatacagagaggctacaaatggagcccctatctaatcacttgtgtccatcccacatttcccttaagtattgaaatggcaattgctaataggtacagagttttgcaacaggtcattagtggttcagagaacagaggagactgctctgaaagaaaataaaagctaatgaaacatcttgcttaagtattacgttttttatgaaccaaggaaacttcctttattatgactcattgatgttgacattcccgggtagactaaccagaaacctttttttagttcagtataaatatgagtatttcataaagggccaagaggtctcagctgacactcagctaagtgtcatttgataaagaaccattcctattagctcacctcatgctagaactataaaccagagtggtacccccatgattagttaagttaaagactggtgtgcattcaacaggcctggagaaagaagaaccctcatcccatctgcttactctgggaaagtctcccagtggtaagtcagattttttaaccaaccttttgcctaaagtcaaacctggaccattaatgtggtatgtgtgacactgagggctaggcagatatgtaaatgataaattttagtgaaaagggaaaatactcaatacaatttctagccaatactctgcaaactagaaaacaatataattcatagtgtattttttaagcaggttagacaatacagtaatctcaacattaacataaaccaaactcatttaacatggaaggagtaaagagctggccagtactagatgcactgtaaaattatctacagctggagatgattttgaataacacatattaaaagatacacacatagatctaataaatgagtctttacagcttagaaaaccagaaaaactcaattgtcctagtatataaatttttcatgtcaaataagttaagcccttagggaagtagcagtttatttggtaccctatgatttgatgatttgtttaattaatgcattgccttttaaaatatcccaacagagttgtttatcaggccagtagtataaggtttataagaaacaacatcttgcatgggctattacttcatattaatataaagttaagatactaattacttcaatcttacagattatgtccagatcaaaagtaaaaagaatatgatgttgcctttgggaaagaaaactagatttttctacgatcctcaaaatttgttaataccaaaatggttaataccatctcaagagcttatcttaaaaaatgtaaatggagtagtcaagacttgagcgtttgaaactgttacctgatgacataaccaggtagcttttctaggatatcttgtttttatgcaactcatacaaagtttattttttccccttccccagccctggattaattagagatgactaaaatagatgactaaagaaaacaatctagtggagtatacatattagaaaatcttcaaagtccctctataaatcctagaataaactttctgaaatctgtacagattaaggtgaaacttgagatctgtccttgtgttcttggagtattacaaccaagaaagaagatgtgtgagctatttaatatatattccttcctaagaagtcttagttctctgaaacactatcattcactttaatcttatctgtagaggtcatctaaatgacttgtgaaaagtggtatagaaattgaattcctgaggtcttctctggattaggaacaatgtttaatggttggggtcaccaaggggtggttcttttctgaaatctctactagacacaaggttccttgaattatgcttccaaacttgctgagtgtgcttcctgatcccaaagatagatgtctagccatgtttgtgaaagggtagaccagtcaatggtgattacttacatgatactaacaggtgtgattttaggtatgtaaacttggatttatataaagaattcatgaaacaaaacttgtctcacttacagactttataagcaaaattctgatattaagtcggtgttttattgtattaataagtgaacctttctatgctcatctatttctgcagttactgaactgtatacagatatttcaatacattagaacactttgttgttcaatgtaaattctccaattgtgcaacaactaatctgtttacttcagtataaactagaatactgtcatttggaatttttacatccctcagtttaaaagtgcatttatttattcccacaaaacatatttgttccaatactatttcccaacagatgagagaataatgacagatgtgaactttagctcaagaatacttgtgcatttctgccaattttgttcatcttgtactcaatctgcagcagcattttagaggtttttttttttaaataatcataagcacaatttcaagcaggtaggctaactattgggaggccttcttttggatctggaattcgactcatgtggtattattatatgatcacaaaaagcaagacaccaatttgacaaattcacctctctcccttgtatacaaaaaccgaaaattacccaggggtttcttatccattaacctatctaatttgtccagtaaccaagaaataagcaaataaggaatatattcttactcgtagaagaactctcctggacttttaggaagcccagtctgatgttgtatattctaggaaacaaactgccaagattctgaccttcagcctgcttgaacactggtatcaagaggagagatggctggttgtcaggctgctggttctctgcaaacctgaaatttgacaaataaatatcaagtcactttttgtttttaaatgactcctttttccttcatctaatttgaaagcaaccacgtcttgtctaaaggaaattaactaaatcatgaagaaccattttttaaatgataatattttgagcacaccagataacagtaaatagtaagcagtttcaaatcaaaacaaacatagctattcatagccactgggattagcaaggccaccaatattcctggagatgaagcctaactgccatgttggttgtggatgtcttccccaactcgaatagatcatatcagatgtggaaatgtgacccagcggcaagtctctcatggaaggttaatgccaactctatgggtaggttgaatatcaaaacaaaggacatgccacctagaacctagagacaacatattcgaattagattagttaaactgatcttgttttgagtctgcataactgtaagaagtgttttcatggttttgctctctatacagaaatgcaacaaaaaatacgttccacctgtctgtatacaatcactatgtacaccctagtttgctctgtgctgatttacaagtcagctggattcttcttccttcaaactctttaaacagtgtgtccttgaaacatgagttgcaagaaagggtacagcaacactcaagcaatggctttgaggattatataaatatggggcttttcctggaaagggaaaccacattgggattttatataatttagccaggctattaaagaagaaaccaaatatcaggcagtatttcttgcactggttttcggaagaggagaagtttaagattacctgcttgttttaaagtgccctggtgtggtatatatcataaaataattctactagtgtacgtagcccttcatttatagcttaatgtttatagcacagatgcttctaaattacatgctttttaaaaactcttctaacatctgcatagactttcaagctgactactgtcatggcacttgaatagaaagtgggaagtatttaataattaggatttatatgcatatgcgtcataggtgaagtcacagagggacgtggatgaagaaatgattgtatcctgaagtccacgagtgaggtatgctgcacatctatgttgacttaattcaggattatttcatacggggatgagaatgcacaacctaatgttgtatattctaggaacaaactgccaagattatttgtatcattcattttaaaactagcatggtgggccggacatggtggctcacgcctgtaatcccagcactttgggaggctgaggcaggagtttgagaccagcctggccaaaatggtgaaaccctgtctctactaaaaatacaaaaattagccaggcatggtggcaagcacctgtagtcccgacttctcaggaggctgaggcaggaaaatcgcttgaacctgggaggcggaggttgcagtgagctgagatcgcgcctctgcactccagcgtgggcaacagagcgagactccgtcacaaacagaacaaacaaacaaaaaacctagcatggaaataggaagaggagttatttttggtagaaatatctaacctagcttagaaaggacagacatgaaaacagtaaaacatttgctgggtcagtttgggtaagtatatgatgagggaggattgtagtaaaagctatgaatggtgtgagtgcgttgcctctgagtcttaactttttgactaccttttcctgccaggatcaagcataatacattgtatatttagatgccaaatttaaagtaaaactcatgcatttactgtgttttgtatcagttccagagtgcttctcttcaagtcactgccccaaagacactgcaatagaaaaattctagaggtttctatgtcagtagtagttttttttaacattaaaactctaatatttttcatgtaagttgttcgttctttagaaaattgtatgcccttggatttaggatgggagggaagcagaatgaaatataatatcctactttaccatctaatgatacaaaataaagttcttctaaattcaaattttaaaacgggtttattctattgacccattccagttgcctatgaacactttagctttctaaaatcttcttccaaaagtgctttcttggtatatgttctgattaatatcacttcaaaactagaaataccaagccttcctggtcttggggtctcctatgagggtcccttcctgctgttgtcaccatggtgtgaagtcttcagcctcatcacagtcacctagtgcaagtgactgggctaccaccaaaacctggtgggttttagccactgaagaaagtgctctggtgagcggggcaggtttggccatctctggtcctgcagtagtgtctccaggtatgggaagtgctcagtagagttccgccatgtccctacagccctctggtcacacggctctttcagtgtgataatgcatgccacccaccagccactgcaccaaggcatgcccatgctgcccgagtctgcttggctgggtcagattggacacctatgcttgtgccaggtctttagttaagactgcccaccttcctgttatgggaattcttcccttgggccctccccactgtgtcagaccacttcagcccattgatcatttcccagaagtgcctcagcttactctatagacttgttcaccagcttcccagatacctttgagctttaaagcctaaagtatatgggaaagagtagcctttgccaaactcctccaaccccataataaagccatattatcctttttcccagaacaatggtttcataatagcttttcctcagaagtaatgggaatcactcatggcttcttccataggtgacttgatatttctctaagtagaaagagaagcagctagtgaggtggttcgagatgacatttaatatcacaactctgggctcaaggatgtagtcattaccttgccaacctctcttccctacatcacttcccagggacaagtacaaaatggagaacagcatataaggaaagacataccatataaggaaagaattatgcatgggcataggtgcctagcaacctccaaatacagagctctgcaaaagctatgttgcagcatgctatgcactagactgtaattccccattgtcttttccttgtcaagttgtgcccacaacattgtcctacccagcttgcttgagatatacgaaactcacgtaccaaatggaccctgatgtaaagcaggtcatagcccaaatgattcagtgccagcaatgtaaggcaatgacagaaatgtgatttttaacctctgtagtttccctgaagtttcagtgtcacttcctttcctttgtagaagtgagttaaaggagaaagttggattcctgttctgtgtagtctaagccagaggaggttatacttgagaactggggtggaatatgtttcttctcccacattaaagctgaaatgggtgtatactctctaatgccaattaattcaacctcaagcctcatatgtccatattcacaaaaattccacgtgatcaaaagaccaaaaggacattctgacactgctctctttcttagaagctgaataagtgtaaagagggattctagaatcaatcgtctctgcatgtctgtgttcatacaagcatattaacttacacccagctttgccgagaggccagaacatgttctcactgtgaagactacactttctattttttccaactttagtgcagttaagtgttcaaacagcccttgtgctgaaacaacaaagcaaaaatacaattgcaaaattgatcataaccttaatacttctgttcaacttgtgaacactttcagacacttgccgtgaattgagtggcactgccccgtctaaaggccaagtgtggtggctcatgcctgtaatcccagcactttgggaggccgaggcgggtggattgcctgaggccaggagttcgagaccagcctggccaacatagtgagaccctgtctctactaaaaacgcaaaaattagctgggcctagtggtgggcgcctgtagtcccagctacttgggaggttgaggcaggggaatcacttgaacccgggaggtggaggttgcagtgagctgagatcatgccactgcactccatcctgggagacagagcaagactctgtctcaaaaaaaaaacccaaaaaccaaaatccaaaaacaaagaatgtgcccttatttggatgcataaagcttctttgaagtttaaactcttctaaacgttctttatagaggggactgtttctttctttctttctttttttttttagataataaaacgtgcatttattttttatttatttttttaattttactttttctttttttttattatactttaaattttagggtacatgtgcacaatgtgcaggttagttacatatgtatacatgtgccatgttggtgtgccgcacccatcaactcgtcatttaacattaggtatatcctaatgctatccctcccccctccccccaccccacaacagaccctggtgtgtgatgttctccttcctgtgtccatgtgttctcattgttcaattcccaccgatgagtgagaacattgacccagcaatcccattactgggtatatacccaaaggattataaatcatgctgctataaagacacatgcacacgtatgtttattgtggcactattcacaatagcaaagacttggaaccaagccaaatgtccaacaatgatagactggattaagaaaatgtggcacatacaccatggaatactatgcagccataaaaaacgatgagttaatgtcctttgtacggacatggatgaagctagaaaccatcattctcagcaaactatcacaaggagaggactgtttcttatgctccaataagagacattcttaataacaagttattaaaaaaaacaaaatgggtagaggtgggtacaaaattaggatgggttataatgagtccagagtattgaaagttgccaattcaagagcttagacttcctatcatgctcaaaaaaaaaaaaaaaaatccaaaaaaactaaaactaaaaggccaaacactgaatagtagagaatgtaccgaaataaatttaaatgctttgatctgcaagtctcagacctaggcaaagcagccaaatcaatattaatgagacagtttgaccaagtaactcctgctacctaggcaaaaaggaatctagtgacaatgtataatgagagcatgtaagatcctttttctattttgattcagaaaacatctataaaataccatgttcaaattaccctgctaagctatcttcttgttcttttgcttggtatatctgctaaatggaaggcattcttggttcagtccccatgtaatgggctttgtacatcctgtttttaaaaaatggtttttaaaaacaaacacatgtaatctctagaaataaggcattacagtctcatgctagatctttcctggtgccagctttgtcccctccagctatttcacaattagacaagtcaaactctctttcttgccctcagttttctaatcattataataaaatgatgtggccaaattattctctatttttctttcagctcaagtcttggtatttctttaagcagataaagcgttgttaaagtaaaccatcgcacctcacataggtcagtatattgaaatgatttaggaatctttaaaatatattgatacctgggtctctatgcccagagactgtgatctaatttatctgggaatgccatgaatatcaatgttttaagaattccacagtaaaattttcccagatgatgtgaagcagagcttctaaactgtccgtgataatgatgtaggcatgaattttaactcaggattcattggaacaggcatctctgggtaacttagagtagattttgttcccagagtctgtttctatcagaacccaacttttgtaggctcagaaggcagagctgagcaggaggtggctcttacactggcaaaccatctcacttttccacctgggctttactagttaaaatactaggctgggtgcagtgggtcaagcctgtaattacaacattttgagaggccaaggcagatggatcacctgaggtcaggagttcaagaccagcctggacaacatggtgaaaccctgtctctactaaaaatacaaaaaattggccaggtgtggtggctgatgcctgtaatctcagctatttgggagggtgaggcaggagaatcacttgaacccaggaggtggaggttgtagtgagctgagattgcaccactgcactccagcctgggcaacaagagcaaaactctgtctcagaataaataaataaataaagtattacaccattccacctttccacttattagtcatttgagcataggttcttactgttctaaaagtgtttaaacacttactgtggaaatgcaatgttggaaagagcacaagactacacaacacatagcttctgtgacctagctttggtttaatagtagctactgatatggtttggctttgtctccacccaaatctcatcttgaactgtggctcccataattcccatgtattgtgggagggacctggtgggaggtaattgaatcatgggggcagtttcccccatactgttctcttggtagtgaataagtctcatgaggtctgatggttttaaaaggggtttcccttttcgattggctgtctttcttgtctgccaccatgtaagatgtgcctttcaccttccaccacgattgtgaggcctccccagctacgtggaactgtgagtccattaaacctctttttctttataaattaccgagtctcaaaaatacaaaaaattagccaggcatggtggcaggcgcctgtagtcccagctacttgggaggctgaggcaggggaatgacgtgaacccaggaggcggagcttgcagtgagccgagatcgcaccactgcactccaccctgggcgacagagcaagactccgtctcaaaaataaataaataaataaataaataacccagtctcaggtatgtctttaacagcagtgtgagaacagactaatacagctaccatttgttaagcactttctaagccaggtgcagctgtcgctatgtaagttcttactgattttttttctaatagctcagcaaactatattctcattttaccaatgaagaaatgaacattagataaattgcctcaagccacagagccaggaaatgatgaatcctaggtgggtggcactcacaagcctgagctattagctgctatgctatcccacctctacccaaagttaactgtttgatagaatcttaactctggtctgacttggttccaaaacagggaaagcatcttggttcaagatttactaagtcctctaagtcctgccatatcattttcaaagattaaaggcagtgatacctcctcgctgtaaatgcataacttgtggatagctcattgactcgggcttgttctgttagtgaggcctctacagcagtgtcagcatttacaagaaaatcttctaaggactccttttcagtatgcattagcatagtctcattcctcagtgaaacaggctgtaaaaatcttactgtctgctcagtttggtctttgcagagcagaagagccttcctaaaagcataagaatccaaacaagcagttaaaggaaggatttgcataaagtatcagaaacagtctaactttgctacagcatcgctggtaatgacccctattcttaaagagctactttgaagatagcagtgaaggctgtttgctgccctcttggaccccgaggtctgtcttagaggttaatatttcacatgttgtcctaattctgcactttagctgaggcaggcagaaagttcaaagaaacaaggaagcacattctctgtccagtacaaagtactggacattctaaacaaatatgtttatgttgctttcttcttgagtctccttaattcctttccctgtgtctattatatgtggcttcttgctaaaaattaatggtgtgttaatgtcagtgggatgatgactttctgaaagtagcttataaaatccaggttaaaatcagtgggattcaagaaaagacaagagagacagtatatataagagaagaggaaacacagactacgctcactttgagcctaatggcttatgacggattgattttctgttgctgtgtccatttcattattcataaaatagagacacattcagccgggtgcggtggctcacacctataatcccagcactctgggaggccgaggcagtggatcacctgaggtcaggagctcgagaccagcctggccaacatggtgaaaccctgtctctactaaaaatacaaaaacttagccaggcatgatggtgggtggctgtaatcccagctactcgggaggctgaggaaggagaatggcttgaacctgggaggcagaggttgcagtaagccgagattgcgccactgcactccagcctgggcaacaagagtgaaactctgtctcaagaaaaaaaaaaaaaagagagagagacattctgtttcatagacctttcggaataagtgttcttagtggttggtatactaggtgtttgtcccattccccttaatgttaaaaataaattccctaccatctgttgaatggggctaccactaagtccttaactcaaattattccttttaccagcattttgagactggcaaagcacttttcctgcctgctctgtataattagggtaagaaggtaggcttgggagtcacaggggaggatggttgacacttgtattatgatattgcttcaaaaccttggaatcattaagtagtaccattgctgatgccaacacattcctactggtagaaaggataaggatatataagaagtgccaaccaactttacccctacaaagcctagactaatcattgtccaccaggctggcaattgaaggattcaaaacactagacattttatatgaatcactaaggactaagcaatagctgatttttattattgcaaagcccatagtcattctaagatgactcatgcagtcttccagaataaatttctcagagccttctcagaaaccaggagagatgttgcaagctccagaatctcttgcagtcatctgatgctagtcccacagaagggggaagtctctgcattctttcagggagatttgtattaagtccaaaatccaagttagagatcttcgcttaaatggaagctaattttattaatatagcagagtttcctttacagctttctgttctatctgaggccttaaaaaggagtcaggactataagataactttagatcctcctttgtttttacatgtgtcatcttctcttttcaatcttctaatgaaggaaacagccagtccctgagaaccaggataacaaactagttatttttagatggggaactgtgcttgtgagcctttttatatgtttttgatctttcatttgtaatccttgccttgtgataacaccccttgggtgtatttcctgactaattttgcactttttgaactgaagggacctgagactacacccaacgagtgagaaaattgtatacttcctccttgtgctgcactcacttgcttccctttgtaagaaatttttaccatcctagagctttcaaacagaccccattgcttaacataagctagacactttcttcaacagagccccagtttggaaaggtaatcaaaggaattaactaggggacttttggtcctcagatcccttttccaggcccaatccctttttaaaattcaactcattaaaaaccctgctaaaagttttatggatgcaagtgacaatattcaaatgcattacatttgaatattgactattaagtttaaaccaattattctctacagatggatctaagtctgtaagtgagctgccttctacccactgcatgttaaatgataacttgcctatttgacaagtctatgatggggacgtgctctttaaaccttgggagaaatgtgaattatcactctggtgtatgcataactggatatacacttttgttaaaatcttgcaataagtcttgaacattttttttgtaaaggggtttgtagtcttgaggcctgtaagcagagtctaccttctgatcatttcaggaagtagagatagatgcattttcaattgtatggcctacaatggagacttacccttggctattgcaactcaacatacacatccattttcttcagggaatttatattacagaaacttttcctccttatttttttcttccttgtcccttggaattgctcatacccaaatggcgaaaggatatagtcaaaggaaatcaaatacctttaaagcaattccaatgctatgaaaagctgtatttaaatatctgaacagagaaatttttgctataaaaacttacagcaaggtaatgccactcaccttagaatccttccatttggcccagtctgccaacgctagattcgatacctggtcttgagctacatcttgtgttacttttatgactaaacccagatgccactgttccctcccccaaaacccctcaaagtgttttgtggcacttctcaaattcttttaaaatagtctcatgtaagaatacaaattgccaaatttaatgagctaagtcttttcatgtcagaaataataccttgcagtgaagtatgatatccggcttcaaagatgggcaacaaactcttaagcccaggtcactttttcagccagtgattctaacccagttctgggccatcttgctgctgctatcaacacatgcattgatgaactcaacataatactgacctaagcaagacagatctgaaggtatagtcacacacacttcaattgcctcccatgaagaaaatagaatgtattctgttttggaatatattgttgcagttcttgttctgggcctagaaagttaaaagtagatatcgaagtatataaatatagccttgaaagccaaaataatatggtttttaaaagcatataaggattaatattcaagtgaaacacttgaatctgccacatttagggtacccttaaagaatagttttttgatctggaaaatcaaaacagattagccttaccattgtgtcagttggagttcagtccacaccagttattttaaaatattttaatgttaagcattaattcccattcgaatactaaccaggcctgaccctgcttagcttccaaaatcaggcttgttcatggttgtatggccgcagatattaagtgttaactaggtataagttgttagctagaaaactgagagagtaagaagagaagatcaagtcatcactgggtaagtaaactacagaaagcagctaccacctctagggctgaggggacaaagttaagacattggaaccatcaaagtttataaagcttgcaggagggggtctcatggtgctgatactgaggcctctgagaagggagtactgcttagctagtactggagtccctgtgctctgagggcctgggacctgttggcctggagagagtatgccagagggctgatgctgatgtctccaggacaggcatgatgagactagttctgcaagtgttaaaactggattcaggggctgttttaggaagaaactcttgctgctggagtgaagaagttctactagagtcacactcccaggagtctcaagtcataaggaagtccatgtggagcaagcagacatgtccgagtcccttcaccagcttggcagtttccctccagcgcaccttactggcagagccaatatgcagccagcaggcaaagcaggaatgtttgcacagtctagccctggcttcactaaccggagatagaggtggttctgaagctgagacaacttaaatggcaccgatcacccctccagctactcagcatccacatacacccttccacacctttcaacttttcctccgacagccacacaagtgtttccatctacaaaggtgcaactgtctttcattcagagaaagatgttctcaccctctccccaaactgggaagctgcaaagaccccataggcatcacattcatttctggaaaacggttactgtctttgggctacattaaccacccctagacttcagttgcagtcccatctgaatatttcactgcctaaagacaaaattgtacatttaacttcaaaaatacttgcattaaaagagaagatagagagatagaaaataggtaatacataccagtgtatacacataacaagcaaggaagaaaatacgcatagctacaactgccctcattaccatctacatgaatgccatctatatcccagacattgagaaatgagtctcctaccttcaaggagattatagtccagtgtgtgggcagacaagcaaatagacttgtgtgtaaaccatgcaatggacatgtgtatttcaagaggactacgtgaagctgtgctggaatacagcttctcagctgagatttgtcactgcagtgttgaggaactctggtttggggccagacagtctgggttacaaacctggttctactacttagcaggtatgtcgttttaaatatctttgccttcactttgggaggctgagtgaggcggatcacgaggtcaggagcttgagaccagcctgaccaacatggtgaaactccgtctctactgaaaatacaaaacttagccgggcgtagtgcccctcacctgtaatcccaatcccagctactcaggaagccgaggcaggagaatcgcttgaacccgggaggtggaggttgcagtgggccgaaatcgtgccactgcactccagcctgggcgacagagcaagactccgtctcaaaaaaaaaaagaatatctgtgtcttagccttccctctggaaaatgaaatatgatacagtaatactcacaggactactatgaatcttttaaagttatacaattaaaaggttaatagtgcctggttcccacctaagtcctgagttaagaatggctttgagtctcctactgtgtaagactttcatctgtaaacagactgtctccctggttgccaaccagccaggtgtctttgagcaaaattaactactaaatctccaaatgaagcaattcagataacattactcatacatagattgcatgaatgtatgtatttaaagactgttcagattataaagacttttaaaactcacagtgggagaaattaagtactgacccctatgaaaacatgttgacatttgtaaacaagctaagtgcaatttaaattgagtaaaaacttgagacttactttttatttagatattatttaagtatctaacaaacgacagttattctcatgtggtgggcttggtccttcagttaaaatgttcacttaaatgggtggtataggcacggaatgaagagggcttttgttgaaggcagggttgtggaggggttagcgtgccagcccacaggttgtcttaatatgattacaaaacaatgaatagcttttctttacctttggtcatcagtcaatgtagaaagttaatctactcgccctagctctctctacagctatatagaaacattggctcctgggaagtgagagaaccttttggaaagttagctcacttctgcctggttacaatgactgcattttcctgtttctcctactatgatacattgtgggtagggcagaggttgtgagagcacatgacagactgtttggagtatggtgatgctgaataatagcataaaaatgtactagattaattgcacaattggacccccctcaatccattatttccctgatacaaataagtgttaatggcaaaaaaggatgtgttttatagtgcttggataaccctggggatcatatgcagaatcctaatacttaaaacaaatttatcaatgtgaataagatacagttcataactctactctagtcactgcctttatagttaagcaattttctgaagaactgaaatttataatgcccaatctcaaatggcatttgcagtcttaccaggcttaacattcaatttatttctgttttgcaataatgcctagcaagttttcgatccctatctttaatacttgatttttatgtgaaagttctaataaaaactgcttagctagataatcactaaatgttactagatatcaagtgcttaaagaaaaaactaataggcacacatgttccattttggaaactacaaaggaaacactcctacccactcccctgctttcagtcttcagtctaatacagcaggagaaggaacaaaatgagtccaaagaactacaaaagaaagtcactacttgtaagcctattctggcataaagtctgggtctgctgtgttctgatctcaatatgcctctaaactctgcctacaggtgtctgtgggaggttatgtttatttgagacttctccatcgggatcgcctggtgtcaccaagtgtccactggtactgaggtttgctgcctgccttcttgccatgtctaacgaagtggaaacaagtgcaaccaatggtcagcccgaccaacaggccgcaccaaaagcaccctcaaagaaggaaaaaaagaaaggtatggagaaatccacttgaagccaaggaagggagctagagatggttacccctggagaaatgtgagattcagaataaagtaagggctggctcttatcttccttcaacctcagcttagtctcatgttctcctaataggaaagttgtaccttgggagaagagactggttcatctcacgtgtaagaagacatctctggaaacctgcgattatacccacttaagtccagttgggaaacagtcatggcatcttgttcagttaataatgcagtcgttaattattatatggttatcattcagttatttatttaccatttgattttactgaactcattgggaatgggactacacagaccttgtaaaaggagcaaaagacattataaagatgggataattatcttaataattttcaagagaacttaggcataattcctttctgccttattgataatttaaaatgttggtaaattgcttggcagcttatttttcttacattaaaaatacgtatattatcatccttatattcctttaaagacttaaaaaaaactatgatgaaaaatgtccccaactcccacctcccatattcccatacgtttcccataacgctgtcaattttgtacttctaacagtttattttctccccaccccaactccatacacagttgattgtggaacatgattttgctcaaaggaagtaagaataagacaggatagaatattacatacatgatcagttgtagtataatcaggatttatactacttaaattttggagagtctagagcatatttggtcataattagaactagcattctttatcctgtattcctttcttttctcaggccctgaaaagacagatgaatatctcttagcaaggttcaaaggcgatggtgtaaaatataaggccaagctgattggcattgatgatgtgccagatgcaagaggggataaaatgagccaagactctatgatgaaactaaaggtaaaagggaaatgaatgctttatctgtatattaagcaaaagtccaagagagggaattatattagaagctcttgttgacctattgttcaattacttgaaaaccgcttttaatcacattatccatcagtagtgccccattttctgagaaaccgtgagtgtttgcatatttggagggatgtcctagatacctaattttatcaaatataataggactctagatgccttttccttctggcaaactcaacattaggacgaaccaagcgtattcctatttctattcctataaaagctatgtgcaaatatttgcattgtttgtcttactgtatgtggagagcacggaatatcctgttttagacctgagaattgttctgataaaatttaggattctacttaggcattggtgttccttagcgctagcctttctgttttttgaatttaaaaatttagtactatggcactatgtgaaactgacttaataaataatacttgttcaatagttcaaggcctagaagaaacatctctaaagatcttctagttgagctttaccagtgactattctgaggccaagagaattagagtgacttgtccgagttcgcacagctaactaagggatgccctggttcaacgtcttctatgcggtcttgctgtccctgatgaaaagtgccgaatcctctcatcaatggcagatcaagtcgaaaacaaagctgactgactttgaaaattttaatattaaaaccattgtaggatgtttttaaaaattcaacttctcttgtttttccaccctcatcagggaatggcggcagctggtcggtctcagggacaacacaaacaaaggatctgggtcaacatttccctttctgggataaaaataattgatgagaaaactggggtaagaattcacatttgctgatacctctctgaccacctgagtctgaccaacaatttgctactttaatttcggctccccttcttcgttctcaaagttctgtagggaacaaatatagcatatattacatctccagaagtaacaggcagaaaacagaataggaggtaaaagtcaagatactttattttgaatttgtgttctataataaatgtgaatctaagtctgttaagtctgttaataggcttagattcacattatgtctataatatataaatatacatatttttgaaattaaataaatatatataatttatataatatataaatatttaaatatatattaaaatataaatacatatataatttataaagcaaaactcctatatatatatatatatatttttgacctcaggtatacagaactagattaattttaacccctagtttgtgacacttttatgtattgcttacatgtgaacttaccggctaacctaaagctagaacctcacccataacacatctacctctttttcatttcttttttccctgccttctcacctcacagatgtaaccttgtttttgttggttcctgttgttctattacttgtgaacaatcttacttattttgccttgtttttaagccttatcagaaagctatttatcatacatcaagtcttctgtgattttttttctgtactcaatgtaacatcataagactcacgttttttaaaatgttgtgtgtggctcattttcattgctataaaatactctctcgcatcacgatactgtggggagacctccagttactattcatccctttctagagtgcccattatctaccatgcaaacctagggccctggcaccctagtggaccccactcagcctgctagtgctggggtcctcaggcaccactctctttatcagttgcctttatctgtcaactcttattttcccaagcccatcagagaaaggtggcatgtttctctcacccttctgtgtctcctcaaactttctaagatactctaagatatcttagacattcaggacaaaaagccaagacacactctgccacctacaaatatccctaaagagttcaaccttgttaactgcttgaaaggatcaagaaaaaggagggaaaaatagaagaaaagacactaagccaatacagtccccaccccttataattcctggttactgatgtagtcattatgtcattaacatagtgtagttattactacattatgttactatgtattaggctgtctaggtgaggctgagaaacacttgatgacagtatttggtatcctccagaatatactgggaatacggttccaataacacataggatggttcctcggccactctgagccatcgtcaatgaatccctgtgaacactcctctagcttagttatgctgttcttttaagtttgtctttgagttgggaaagtagacctatttggcttggcttaagggctaaatgtctcctcttcacttggtcttctaatcctcagtccttcctggctatgtggcatcatgtctttaaagcagggagagtaaagtatcaatattttaagaaggaacattcttcccacttatgttttctattcttctttcttttgagccctttctagaaagagtaatgctctagccttcaatcagaaatgaaaagtctttcttcaaatggtttaaacttctcatatatgccttcatatatgtgtctgaggcttcggtgtgctagcctgcaaatagattctagttttcttaataaattactctttatgttcttttttaaggtaatagagcatgaacatccagtaaataagatttctttcattgcccgtgatgtgacagacaaccgggcatttggttatgtgtgtggaggagaaggccagcatcagttttttgccataaaaaccgggcaacaggtgagctctaagtcttgacatagacctggggacttgtcctctgtggacattggagtgtctgtcactcaactaaaagatttactggaaataattggatgtaagagggctaaataataattccgagaatgactatttttattggcctatggaatcttttaaaaatgtcattgatagctatgcactgctgtgtgccacaggattgtgagaatggaccttcttataaagtgaatactgacttcacaacagtggtgaattattctcaggaaccttaaaggacttcaaatatgatcatgatacctcttgttttgtctaaatacttattaaccctgctgtcttttatatacctaagggtgaggattgggttagtggtgatcccctataagccagcagagggtagtaaggcgttttaagattaaaaaaaaatcccagtatgaattataattgataggagacaaaggaaataaaatactaaaatttaaatactgataacagtgctttcccttactgcaggctgaaccattagttgttgatcttaaagacctttttcaagttatctataatgtaaagaaaaaggaagaagaaaagaaaaaggcaagtactacctgattaaggctctattaaatttaaaactggctgggcatggtggctcacacctataatcccagcacttcgggaggcagaggtgggtggatcacctgaggtcaggagttcgagaccagcctggccaacatggcgaaacctcatcactactaaaactacaaaaattagccaggggtggtggtgggcacctgtaatcccagctacttgggcgtctgaagcaaggagaatcacttgaacccgggaggcagaggttgcaatcagccgagatggtgccactgcactccagcctgggcgacagaacgagactctgtctcaaacaaacaaacttaaaactgtactcaggactatgtttaatattatacataaatatggtctatctgaaaatttggcttctatatgtattgtctgttcttcccaatagggcaatgcatacatttttatggttaggcacttctaatctgcactccctggcttttattttttttctctctatgagattcatattaattctaggaaatatacaggacaaccaagtttaaatccagtaactctactcaaaccttatattgatatgaaaaggggaggggaacagagggcagaaataatatacaagacttattcttgccttatgcctgtgaaccataggcatacttgtttgtgtatttaactccctttcactatgaatatgaagatcactgaatatgtatctttctttttagatagaggaagccagcaaagcagttgaggtaaaattgcatctttacttcttgttaatcatgtgtgtgacatgcgtaagcccctgttttctacctgcccaaccactctcgccacctcgcttattactatgtgtttatgacttctctgatcatgaaagatgtttagttaaaagatgataccaaaaccattgcttcttagcagactaatagagtggacaaatacattttatagacaaagctcaactaaatccttaaatatttgctatcttttcagaatgggagtgaggccctaatgattctagatgaccaaactaacaaactgaaatcggtatgtattaatatgtgacgtttgacagttcttacttatctgaacatgggttctacttcctgtagatgttgctgttaccaaatctgtattgaatctatatgaaaatccaattgagacaactgtttttcaaaatattagtgtaacatctatgtcaatatacaaaagtagtcaaaaaaagattagaaaagtaatctttatagtagccacacctgaatctaatctaatacttttaaaggatgtggacaagatagatttgctttgagacatgtctacacttcctgacctaaacagcttaatatgaaatctattagttaaatggaaattaaattgtgacagctactttcctaaactttaggaaacaagtgattacaatatacgaagtaatcttttttagtagacacatctgaatctaatccaaatacttttttaagggtgttgaccagatggatttgtttggggacatgtctacacctcctgacctaaatagtccaacagtaagtgtttgtttttaaatttgcaatgtaataaaatgacatctataactcaaattggcaataaccagaaatcttaagcatctcattgaaacttggaaggtgactgttgatttttgcaaatgaagtgtcaatggtttttagaataaatgtgaatcttaagtcaccatgggaacctatccacactaattcagttatattaatattgcttacagattaaacctgaacaataagtcagcaatgtagtccttcttggtatcacttaggattagaaggaggaggtgaataatagtccttgaataagcctacttgaagaaagtatgactgttagatggttaatcataaagcctcctggcctcttcatttcttttgcattctgtctgttgcaatttagcagcataaatttggtgtgaagtaagatttaaaacaaacaagtggctcagttatattccaccaaagcttgtccttgttagaaagctgcccattctcataggattttataccatatccagtctgctcaatattgaatgatctgtaacaaccctgtaagaacagaacagtattttcctttataaatttaaaaaaaaaaaatggtggttcagggaaaaaaaagaagaaaaaaaaaataaaaaggaaagaggtccagattcaagacttaggcccaagtcttcagaccttccaaaacatacctctaatgaaaatgtccatgacattttgaatgacttcttgcaacttcttttatttatgtaacagtttcctgagcacctgctatttgcaaggcatagcagtaagatgcacaacatcaatgacatcatggaatttactctccggcagggagaccaacattaaaactaatcacatcgttagtaattgatgttactacagggtatttatctagttcagattcaggtaatgcttctgcaggaatgagtttctagatttgaacataaaagatgagaaggcaataaacagacaaaaagagaattagtctagaataatggggggaaatgtctagaaaggactctcttgtatcaggaaattatcatggaagcctatgtgaccaaggttacaggagttgaagcaacggatcaaagattgggtaaaattctccctttagacttctgcagagaatttgaggcctgtgaatcctcactgcataaaactttcaggtcaaatgagatggagaggagcagggacttcatgcattcttctctgaccctaaccatatgagtatcacaatgcatggtagcattctaaaatgcctttaagagagaagcctgtttaatattcattttagcagtgagccctaactcacttgcctatagaacctttcattcttcataatttttgttatagttctgaggataaactttttaaaatactagactagattatcctgacaggtccatcctaactctgaggtccttttgatttgtagtcaactttgcgctctcctccattagtgatgttttctcaaataaatcagtatctgaacacttacttcccaagtataaatgacattcaaacaagtaatattcaaagagagcaaagcactcaagatatgaagtggaattccactggaataggcaaggaagtactgcctatataatctacttctgtagacttctagaatgttctaaaaaaggaaatggaagacaacatggataatcttcagtctcatttttattagactttatgaagtctaagaattttttatttataggaattcaagttttagttaaactaacaataaagtaataaataccatcaaaatatatactctctgataaccaaaagaaggctaacagatctaattatgtgctggttaggctttgacatgttcttatctattgactctatagtcataggtcaaaaatagatttatctctacttggtaaagccagcatgtttaaaaatattcaactctttcaacaattgctctgaaatatgtaaagagagaaagaaatctaaattacctagactttattattggtcctagatggttgtcactcccctcaaatttatacagaaaagttttatgaatttcaaataatactcatgttgcaaactacgtggtatcccctagaacagcatttttattggcaagccccttgagcattatccttccacactgcatctcaaaaaaggaaaagaaagaaaaacataaaaacccatgttctgcaactttaacaaccacttgaaagcacagttactatggaaagaatataagacatgatctgtgatcaaggagattaaatatggtacaagggatgggatcaggatacaaagcaggagtgtcacttatgtccttgtgtacatgccataagataacacgggtgggcacagggcaagtgtagacagaaaaatcgatgctaaaagctttgtaaagaatctgaatttgagttgggtctttgaagtgtgtaggaaaatagatcatagttgggctagaaacaacgtgggtcttattgtggaccatttggaaatttggcctaaggaggcttattttaatatagggagccagcagtaagccccttaaggctttgagtagagaagtcctcagtctgacaaactggaatggttaggtgagattagccacccagagaagagctaggctatggaactcaggatttatgtccgcttactggagctccctacgagcaggttctgtaacgcactgccgtgtctccagtgcctgcggctcaggtgctcaaacagtggccaactggatgcagtattgacagttcgacaaagaatgaatgaggcactgaccaagtgggtggatgaggagtctttgggctctcagttgtagtctgtgaactacacttttaatcttggattaataacaaacccagcctgaggagagccttatacattttacttatagggtgactattcagaagtctaacattgtggctcctgtttggtgtcctaagaacttcttctgaagtatttgaaaacgagaactctaccagctgtgaacactcaactgttctaacccagaggtggctcaaaacaaataaataaatattgaaatcacaagcttttgtaatacattttatcctaccttttgattgtataaagatccctagattaatagctcttccaatccatttctctgattaaatttttttttaattataagctctttcttgtgacaaattcttcttttataaagagaaagcctggctttggcttataaaaactgtatttttatgcctcacagtaaaggaatccaaaagatagattaccatttaggtctgattttgctgtctcttttgtggccatgaactaggacttaaactttctaaacaattgggtattttttttttcttttaaaagcctgtttgaacccttttgtatttactagtttgcaaattttatattcccttgaagttgtttattttccccaatgatcaaaatatttagtattctgctcagggtaatgcaagataactactataacttgcacttcagcaaggcattttttatcatttatattcttctctgggtagcatagttaagtatttaatggatcaaagtcaagcagaaggaagtgatgtcagtatgaaagttctgttctaggatgagttataattctgtcttttactggaataaagacatgtcggattcatcaaatttactgcttttaagctgagaattttttatcaaacagttgaaaatccaaaaaattaacacaacagagaaatgatagagaggggatagaattagtagagctatatatttgatatgtctttcaaattaactcttaaacccatgtctctaccttgtacaatagtccccctttatctgcagtttcactttctgaaattaagtctgcggtcaaccttggtctgaaaataagtgagtacggtacaatataatattttgagagaagagagacagagagaccacattcaaataacttttattacagcatattgttataatcattctattttattacttgttaatctcttattgtgcctaattgataaattaaactttatcatgtgtatgtatatgagaaaaatactgtatataggttttggcactatgtgccatttcagacatccactgtgggccttggaacatattccctgaggataaggagggactactgtatataaattaaagatcagttgttggttgactttaaccactaaatagatgagattactatcacaacacaggcaactctaagcaatgttatgaaaagatgtacaaataggagatcttaatgtgtgattgactaaattagatcagtattgagtgtctctttcagaggacatagacaaaaagggtaagcccagaggagagactgggatgatgaggatgagatcctacttgactatcagcttcagcaagagccttaaatattaagagacatacctgaaggccgtgatataaaagaaaagcctctctcccacctctagaggaaagaactggaccgattttagggaaatgcatttgatcttaaatttcatcacagccagaactataaaatatgaatgtattagtcgatgaattttctcatttagagagatgatcctacacgactctgggggtacaatagagaggactgtatgtgtataggtaggaagctgagctaagcttctgaaatcacttactttcaagctcaacatactttgataatcatttgtagtgactcacaatcaattccctttaagactttcaaagtcacaaattgaaacaatgctcataatgaattaagccagtctgtatgtgtgaaacagggtgagcagagacatgaagtaagcaacagtaagatttcacctaatgaggttgagacttaaataaaagggcatgatattggggaggaatagaaaggacctagtctatagcaagggagtaatggactacgggggttgatggaaggaggtaatgatcaaccgatttatcaagaccaaattcaaatggaaattctgataatcctagtcatcttatgtaattttctcatttgaagtcacaacatgaactaacactttctttttttttctttccaaatgtgataggaaagcaaagatatcctgttagtggatctaaactctgaaatcgacaccaatcagaattctttaagagaaaatccattcttaacaaacggcatcacctcctgttctcttcctcgaccaaagcctcaggcatccttcttgcctgaaaatgccttttctgccaatctcaacttctttcccacccctaatcctgatcctttccgtgacgatcctttcacacagccagaccaatcgacaccttcttcgtttgattctctcaaatctccagatcagaagaaagagaattcgagtagctcgtctactccgctgagtaatgggcccctgaatggtgatgttgactactttggtcagcaatttgaccagatctctaaccggactggcaaacaggaagctcaggcaggcccatggcccttttcaagttcgcaaacccagccagcagtgagaactcaaaatggggtatctgaaagagaacagaacggcttctctgtcaaatcctccccgaacccttttgtgggaagccctcccaaaggactgtccatacagaatggcgtaaagcaggacttggaaagctctgtccagtcctcaccacatgactccatagccattatcccacctccacaaagtaccaaaccaggaagaggcagaaggactgctaaggtgaattgtcttctccacatatccattagcagagtgcatgttcggtaccaaagggtggtgtgatgcaagctctctttgctgctgctctcgtagtttcctgtgttgctgtgaaatagaaggtgggataaggcactttggttctccaggagtactttcctctaactgccaccgtttttaagcttctcagcagtgtttgtcacaccctgctttccgtgtgcatgtcttgtcacttatgattaaactaaacacaagtttttccatttttaatgctgctatgcttctatacctctggtaagtttgatcatcatgttctgggttgggagggtgagagttcttgtgattccctttgtacttccctgacactaacacgccctgcacacccatcatattgcatcagtgtccatggtggtggtgtaaaattctcaagcttatctccgcttttaaatactgagtaaatacataagctttttctaagcttatgtatttactattaccactatgatctcagctttatttaagagcaatttaaaatgcagttcccataggggtctttttttacctctcctaagaatatacaggcttgcctggattaagaccctatgatctctatgtagactgacttaaaatccaatggaatgaacaaaaatatttaggatgcttattggtagttgccccttttacacacttgctcccccaacttcaaacatttagctgatgagaccagaccaatgtgagtgtgtaaatgaatatagtagatttcactttgcaagtcctaggtagtgtcagacactaagactcagtagtccgtccgttgtaggaatctgtgtctttttttggaggactctttttctgtagtagtagtagttgttgttgttcatctgtcaagaaaaaagttttcctttttgtggctctcaaattggggtatagggtaggagacaaaatgaggctgtatttcactgttagagagtaactaaggcttctccctccctccctgtccgtcagtctcagcgaatnnnnnnnnnnnnnnnnnnnnnnnnnnnnnnnnnnnnnnnnnnnnnnnnnnnnnnnnnnnnnnnnnnnnnnnnnnnnnnnnnnnnnnnnnnnnnnnnnnnnnnnnnnnnnnnnnnnnnnnnnnnnnnnnnnnnnnnnnnnnnnnnnnnnnnnnnnnnnnnnnnnnnnnnnnnnnnnnnnnnnnnnnnnnnnnnnnnnnnnnnnnnnnnnnnnnnnnnnnnnnnnnnnnnnnnnnnnnnnnnnnnnnnnnnnnnnnnnnnnnnnnnnnnnnnnnnnnnnnnnnnnnnnnnnnnnnnnnnnnnnnnnnnnnnnnnnnnnnnnnnnnnnnnnnnnnnnnnnnnnnnnnnnnnnnnnnnnnnnnnnnnnnnnnnnnnnnnnnnnnnnnnnnnnnnnnnnnnnnnnnnnnnnnnnnnnnnnnnnnnnnnnnnnnnnnnnnnnnnnnnnnnnnnnnnnnnnnnnnnnnnnnnnnnnnnnnnnnnnnnnnnnnnnnnnnnnnnnnnnnnnnnnnnnnnnnnnnnnnnnnnnnnnnnnnnnnnnnnnnnnnnnnnnnnnnnnnnnnnnnnnnnnnnnnnnnnnnnnnnnnnnnnnntattttttttggaggacttttttttctttgtggtggtagtggtgttgttcttctgtcaagaaaaaattttcctttttgtggctttcaaaattggggtatagggtagggagacaaatgagggctgtatttcactgcaggtgagtaactaagggttctccctccctcccctgtcctgtcagtttcagccaatgacttgcttgcatcagacatctttgctcctcccgtctcagaaccttcaggccaggcgtcacccacaggacaacctacagccctgcagcccaaccctctggatctcttcaaaacaagtgctcctgccccagtggggcccctggtgggtctaggtaggtgcctagagataaaattaagtatgactcttttgcttttgctcataaaataatgatgcatcagaagagatttcatactcccagagggttttacagcataagatttgagcatcccaggagcccttctcccacttctactatacaaccccacatccatttgatattcttgacttgtaactcacatttggctcctcgaggcagcatgagacaagaaattcattttcagtgttgtacttacttgaaccaactggtcacggtttcctgaaagacaattgtaagggattctaaactcagaccagcttcagtagcaaaacagggttgacataagagaggcttgtctgtcaacatgcatgtcttccatgtcttttgccataatagatcgaaggcctatgtcctttcaacacatagccctcttggaagtaatatatgcccaagaaggatataagttaagtctgaagcaagaataagtcatagagtgaaagtcctaggttctgggcccagctgtgttcctaggtgtatggtaagggtagatcaggcacacatcctgatcagtctctgagcactgccataggagctccttgccaatattttggctagcttgagtgttttactgaagctagaacataagtcctagaaagccaaagttgaaaaaagagagaaataagggaagagatggaattttatcagacagctaggatgcattgatgctcttaattcctaaatgtgtcattagcttgtgtgagccgctgatcactctgtggtaggacagtgggaaagtccacttgactgagggctggccttgctattcttagtccatagcctatagttcttttcagactccatggtacagttttcagaaaccctgacaatagtttttgctgtcctgctgtggactctatttttctgctcttggcacctctacaaactccaaatggactctggcttgggaggtggaggactgtagacgaggaaggactctcctctccttcggtaaaatctgaccagggatcctggctttctctgcctcctgcagtcagtcatcaggatccttgttttgttttcctctctgtctctgttgttttcctacaaaggaaaatagtttggttcttttacaagaaatctgtttaatcatatctagaatagggtggccagaggaggactgttactcaactgctgagtggcagaaatccgtgagggtatgaaaagccagcttgtcccaggtctctgctcgcatttaccccatcaagaggctctctctaaagacttcatgtctcttgggggcttccacctttctgcattgctcttttccttgcacccccaagtggagctgtttggtacccttccctcacagaagaccagagtgcttgcaatgcaatgtctgcagcgagatcacatcacagagctttgtatctgatatcaatgcccttaagaatttttgcagccaatatttaacaagtcagcctgaaaatacagctggaccctataactgtttatttattcagacgaagtgaagctttttggctaggtgcccctgttgaggccttggggtatacaactgcagaatactgatgattgttccaagtttggacatgggactcaaactgagctctacagtatagtccctgtccactagcagggatcctcagccaaaccatggaaggttgtaggtctggcttccgctagacccagctgggggactgtctcccctggagaactgggggggtggggagagggtattgtagaaagctgagccctcagattcaacttgcttgtattttaatctagcctcagaaggtaataaaattaatgttctatacccatgtcccctttttccttattccttgcccctactttgtcaatgtgttcaatgtgttcaatgtgttaaaacacaatgtggggatttggtgggtaggaatgaagactggtataagtatatactgggaaagccttgaattcctggcaaatgtaatatttttctctccttttttttttttttttttttttttttgagacagagtctcactctgtcacccatgctggagtgcagcggtgctgtctcagctcactgcaacctctgcctcccaagtttaagtgcctcagcctctctagtagctgggattacaggcatgcgccaccacacccagctaatttctgtatgttagtagagacagggtttcgccacgttggccaggttggttctgaactcctggcctcaagtggtcctcccactttggcttcccaaagtgctgggattacaggtgtaagccactgcgcccagccctaatatttttctcttttacaaataccattctcactaatatgatattttcctaaatgaagacaagttgtccaacatgaaagatgataaaattctaccctcctttttgcacagctaactggtggaaattattagcaagtgatctggcttctgttaatacaatttaattgaatgtgttttaaaatacgagcaacaactttgttcaaactaaacccatttttagagcctgtattgtagaatataactattctcttgatttgttatgaaaggagtatattcttcagtgaaaatgaagtctaatttctgtatccgtgaaataagtatttgaattaacatagcatttgaaaattaaaattgccccatgccttgctgccaaggaagcagaacaggagaatggggtgccggatttagagccagtgtgcctgattttcagtttctaccatcccagactacgaccttcccaattttaatgaatattcttgcacccagtttcctcacctccaaaaagcatgctgattaagtgaaatggcctgttctgaaacccaccactctctgtgagtacaccatgtgtgcccatggccagatggccagcatgcatgatgagaatggagtcaggtaataccaatgtctcagactaagaagctcgaagatataatcttgtgctccatcactcctaaataccattttcaaagtattccctcttggaaacataaacgtccctaacccaggtctgaagaaaactttcataactaaagaatgccatgcaccaaagctcaaagcaagtagatttcaagagcgaagcatcacccactaatagatatgaggctgaatttaggtttccttcttagcggtgagtttaactgaatcattaatgcacttggcaagaggcaggaaagacagtgccctgtatattagaacaagatgcagggagcgagcctctcaagaatcagaggccatcattggagaggcctggattctggcgatttaacgaattcctgatgacatagcaaggtcgtaggagatggagccattcaccacaaagatcagatgccccaacacaggccattagttaccttgaaagatttttgtttcccattgtcctctctcctcttttaaattctctgttctaacttctggcaaggtttagcgaatggcacatggcaggaagcacttttatttgaaacagtcttcctaggataacatcctttcttccatttttatatataaacgtctaaaactatcttggcattggccaaactttatcttccctttatgtatatagctgtatcagtcttggcagcaataaaaagtgaagaaactttgaaatggtgtcttcaggatgcaagcatgttgaggtcttgtgcacatgtgtgattgctggtttccataagactccagacgtgagccagttgccaaatgaaaagatcaaatctgtgactcagagagtccaatggattatcttaattaactacatcataatcagcatggttcgtgtataaaaatatattcacttaaataagttcctgctattaacagactctgttctagttgtttgagatgtatcagacaactagtgtctgtatgataagggcttatttttttgatgagtagatacttatggactgtactacccttctaatgaggaaagttaaaaagacatggtaggaagaacatgggcctcaaaatgcaaccagcatttgaatgctcactatacagtgttagctggctaacttttacagtgattaatctgtcagagtctttattcttcccatatcagcctcagggctcaatggaggtgttagctgtggagaggctttccagagagttgtgctctctgaaattcaagaatcttcttcaagcttgactcctgataagtatttttcttcctcttactttaggtggtgtaactgtcacactccctcaggcaggaccatggaacacagcacctttggtcttcaatcagtccccttcaatggctccgggagccatgatgggtggtcaaccttcaggttttagtcagcccgtcatttttggtacaagtccagctgtttcaggttggaaccagccttcaccttttgcagcctcaactccccctccagtgcctgttgtctggggcccttctgcatctgtggcacccaatgcttggtcaacaacaagccctttggggaatccttttcagagcaatatttttccagctcctgctgtgtccactcagcccccatccatgcactcctctctcctggttactcctccccagccacctcccagagctggccctcccaaggacatctccagtgatgccttcactgccttagacccacttggggataaagagatcaaggatgtgaaagaaatgtttaaggatttccaactgcggcagccacctgctgtgctcgcgcggaagggagagcagacttcttctgggactttgagtgcctttgccagttatttcaacagcaaggttggcattcctcaggagaatgcagaccatgatgactttgatgctaatcaactattgaacaagatcaatggtaagccactcaccactctgcctactgttccaacaactatctccgctgccacatggacctaaatgagttccccaaatgaaccctctcccacctgccaacagctttgctcttgcttctgttggtaatcaagggttatggagacaacttaaccatttaccttttggtgataactatttaccttagtcatttctgaggactgacccaatgctgccctctagtgataaatcttaaaagggctgccatgagctattgaaatgtgatgactggtgactcttggagggctgtgtaataaggcgtcatccatgtcccatcagcttaaaatgaggggattctgaatctcttccacttcagataaatatgcatggctttctcttccgagaaggataataattattggggtacttagtatttggtgttgatttttgttccactgatgtaaatttcaaaagtatagaactaaaattcaaaaataagctgacgcggggactggcctatatttggggaaagcttgtctactgattgcctggattttttaccttctagaaccaccaaagccagctcccagacaagtttccctgccagttaccaaatctactgacaatgcatttgagaaccctttctttaaagattcttttggttcatcacaagcctctgtaagtatgaactactagaagctcttctccaaagtacatgccacatagagctccagcctcctgaattaaccttgcttttataatagcttttatttatttatttatttttttaagacagagtcttgctctgtcggccaggctggagtgcagtggtgcaatctcagctcactgcaacctccacttcctgagttcaagggattctcctgcctcagcctcctgagtaggtgggactataggcacgtgccaccacacctggctaatttttgtatttttttgtagagatggggtctcgccatgttggccagactgttctcaaactcctgaccttaagtaatccatctgccttggcctccctcagtgctgggattacagtcatgagccaccgcacctggctataatagctttatgatggtaaaacatgtttagctaagatttgtcaccaagaaccttcacagtataaacattcatttaaactggagaaagattatttgcacaagaactattatcttctgaatttgagaaataatatcacatagaaaacatccttcatatctcacttaacctgacccatgaaagcatttcgggagaaaattgagccaaaatactgtcttgaaaacctttcaaaaatttaaattcttaattttccaacaatatttctatagcctgtgaaaataatacttcccatttcggggaggcaaatgaaatgcatctgaaccttgattttcacgtaaataatatacactgccatctgcaagcagatgaaaacaaaacactgtaagccccatataatgtttgattggctgattggcctatgacccaagcgatttttaaaagaatttaggaagtcttcactgcaattttttttcttatgactgtaactgtatttattgactagatgattttatcttcttaggtggcttcttctcaacctgtatcttctgagatgtatagggatccatttggaaatccttttgcctaaattctgtaagtagaagatcctaataagcctgtctcaggggtttttgtgagaaagggtgacatggaataaagagtgaaattttaattttagaattgggaagagggtaaatatctataatttaggagtaatcgacaggaaaatctctactgagatcattcaataatgactaggctgggcacttaagaatagaattcctaaacacatcaaaaaatagtaatatacccttggggatgtggatttttatcttattccatgtttttggtttttcagttctgtgtgggaagtaaaactcaaaacaagacatcacaggtttctaacctttttactttcatattgaagtggttgcaaaaccacctagtaataattttggtttcctataaagggttcagattccattggccttctgaagccaccaagtcagcaaaacagattatgatcattacttctctaccatttattactctgtgagcaatctcaaagttagtctgaaagagtctgatggtattaaatctgaaagttttaacaactattaaagatctccttcataggcagtaggagctcaaaatgagtctgaaggttgattcttctgtctcatgaactttatcttagataagtgattaggtagaatcaccctcagctgaaatcctgggagggctcagtgtaactgtttctcaacagaaggtgacagcaactttattctgatctcaaaagactgaatttagtagggaaaggaatgctctccccattttagagcaggtaggccagctggtaggggtagaacaatagaaataatgaaaaacaacaacaacaacaaaaaaaaaccaagcccattttttttccaatcttgtccatccaaacaggactactaaactgtgatttggctcatctagaatataattatttttaatagatagatatcttaaatgtggtgaaaacagtaagactgagcttataggcatctggatcattttccctcaactccagttctgcaatgactgtgtttcctatagtacctttccataaactgcttcagagaactgggtaaatcattaaaaatgcaaattcctgggtcctaccgcagccctaaggaatttctctttggtgccaaggaaatgcttccttttaacaagagtgcaggtgattctaaatgtaataaagcagtaagtagatatttaagagctagaagtcttaccagagatcattctcaccttccattcaaggggagatatacccaaaccaatagaaggagtaaactacactcagagtcaagatggattgtatggactaaattgaatgaactagacttctctttggaggtccttccttctttaggtcatgaaggaagtatagtttaggtcaacctgctacatcaatagattgggtaaggggaactctcatgggataaaataactaacattgttgagcacttgcgctaatcattttattagatgctctacatttatcatcttcatcaatcctcacattagccctaggagatactattactgacatctttaataatgacttgatatttaatacattgatattcagttcaacaattctaaccacaagtttctttcttctccatacctctctaggaacttggtctgcagaccatccagaggaataaaaaggttggccttagtagtcaaaaacaaagctgatagccagacacgttctgatttctgcccttgttccagctttgacatattatctgttgccttatttctcattgcctcttctacttgtaaaatgcttttcactttctgtctaggttaaagctaaactgaatctatggctttaaataaattaagatcctaaactctctagcttaagtgtaaatgaagtacagtagtttccctactgaaccctgcctattgtgtacctggaaacttctagaacacctgccttctaccctctggttgggagatgcagccaccacgtcccttcatatcatactgttttgaataaattttcaaatccttattgttcagagttgttcgggggttctgtttcagagcataaaacctaaaggttatagtagaacaaggcaccttcttaaaagaaatcttgcttcagaccatcagttacagagaatttctaaagtaaaatggaagcaactacaacttctccttagacactttggaatctaaccacttaaggacctttttaaagagatagcttctcttctttctgaagatcaatttctcccaaggccaagattgtccttttctcccatctcttgctagctattgcaaatgagggaagaacattattcatctctcctccccttttttttctgattcttttttcagtcagttttgctcctgggttcaagtagcattaccaccctttcacaagcaacagactctcacagggcaaaaaaaaaaaaaaaaatctaatgattcacagacagatctggagcctctcttcattctcagtaattgctagtcccaagaactagaattgcaaatgggcacaacctatatccttcctgtggaagaggaggccattctcttgagctgaagttccagaagagcagttaatgttcaagagaaattgaactcaactcagcaacaaaggactctattttgaagagcaacatatcacaaagctaaatgtgattgtgccaaacacattaggtgcttatttggggtcatgctaggccttaacaagtaactggaaaactttcttgcagccacaatctcaatgtcgttagtaggaagataagaggggagaaaaagctgtagaacaaatgtttggggttaccattgaaaatctaatgtctgcaatatttttctcctcacaacttggaaatgttcccagttcattttcagtcctgttgtgagcacagttctgaagggtttattattgtcaaaataagttttgttttgttttgtttatgttgggtttttaatgttgtctcttgacccttaatgctcaggttcttgtgggagttaatcagccacatccaatgttaccttgagggggaagaagagggtgatgctcagaagctaaacaagacaggggccacataaccctctattgattagccccaagtagaaagtcctgtggttttacgtttaatggtaatagttgatcatatatggcataattttctatcagcttcctactcagtcactataaacacagacttgaaatagtactttaaatgtccaaatacctaaatgtgctaaactggaggtaactatttctaggtagttgaatttttgaaagtcatgatcagccacacaactgttttgtacatacttattttctcatgcacttttctgtatgcaaataaagctataaatttactcatttcaataaactggagtggcagaata

SEQ ID NO: 22 - DNA, 140928 bp, Mus musculus
  source 1..140928: mol_type = genomic DNA
gtgattctctttggcttatctgctgtgcattttcatgtggcagagctcttattagccagcacagagatagaatcaagcttgcaagagatttgttgaagagagaaaagtcaaggtaagaaaattccttaatatggtgatgagcatctagtgccatggaaaaagaacgggaagggagggactgggtagaagagtcttcaatgggagcagaattccaagaaaccttggctagctcaggagaaacttcttggtccttttggaaagtctgatttctcccagaaattggtctgtaccttcacccacagtggacatatgatgctcagtccctgtgttggagtagatctcagagagtaggcctcaaatgaacatggatctagagccagatggatagcatctgcagcttcagccaggagtactcccaatagtgttcagccgggggtgctccctacagcatttgtcatataaaaacactcctcactggccaccactctgtaaacacaagtatcatcaagaccagtgtgttggatgcatttaatcattcatttataatggagttcctacaacatgacaagcatcatgttcagtgttataaactctatgtgggcattaaggtctctgccctcacagactatgttatacacgtcattaattcccttgaaaatattggcttataactgagaattccctcagctagaagtatgcgtcccacctatgattgttaataaaagtactatttctatggtaatccataatatctatctccaaatcaaatttaaattagttttctattcttttattagggaggccatcaagacaggatttcctgtgtgcctttggctgtcctagaactagctctataggctagctctgtaggctgcctcaaacttagagatctggcttcctctagctcacaagcacatctataactgctttgtatggttgccattaacttctgctcagattcttttgttgttgctgaaacggtatctcattctgagccccatattggtttttcctacacaagtacaccaccatgctcagtgtctgtgtatattctaatgagaatatgaagcccagcagtatgactcacacttttaatcccagcacttgtaaggcatagagtatgtaaatactcagacttatgtaaatgttagggaatgcctgcttcttaccaggctacccgtaaacctttagcattaggttctgtctggttcatagctttaacctgaacgacccattgctctcaaggagttcctgatctatctgggtgccttataatacctcagcatcttgccctccaggtttgtgtatctccatctctgcaaaatccctcagtgaaatctgtatttaacttctctctttgcaaaatggtgaaggtttaactttttgaaaataaataaaaaatgatggtgactcatacggaggcagtggttgcatccaaattgcctgggatgcctaagatgcagatttcccagactaatcatagagttaccccagtgtccgaggtggggcctgagaatctgcatttcaggtgagttcccaggatggcgaatgatctctacctgatcctcttgtttcgttcatattcaaacaaatgagatcagtctgcaggaagaaccagttgtgcattttcaaatctggataaagactgtcttattgtatgtgtggttggctactatggatgataatccattcatttaatacatgcatatttattgcctactctgtgccaaggattatgcaagactctggagatatcgaaagcaaaagaaaaatgttttgtggcttcaccgacctttggcgtggaatcctgatacccaaaatgggtcacaaatacacatattccttgagctcttataaaccagcgctttatatagattggttctatttaaagaaaactccatgggctctgaaaggcatgtgggctctgttttgtagataattgttgtttgggcttagaaaggctgatgcactggttaatgctgtgtagctaagaaagatgaaagctgggacacaaaccacccacttccatctaggaaggtgttcttcccattattcttttaaagtaagagcttcccggtacacttgctccccctctccttccctccctccaccgctccctccccactctcataaatactcattaaataatctgactcatgtcctaaagaaacaacttctttattcttcatatatattaatatagaagtggtcacaaaaactgtgctttcacaaaatgacttaaatgatccaaacaccacctgaatgctacaaagacatccgtagaaaaaatagaaaataaatgtctttattgaatgaatgttgcactctaattttacattctctcaacttcacaattaagatgaattattatcgctcttgtaacctaagtgtgtatacaggcaaagctgcctccttccacatatgtgacattttcagtaacgattggagttgcctttggcttctcataaggcaaacctcagctttctggaaaacactgctggcacgtatgatttagttgaaaaccaacttgactcagctggtgcgaaaattaaagctctgcccatttcaatataacataataaaaagaaaacacataactatgcataaaacaattaacaccatgtctggcactagaattgctgaataagttggaagttgaacatttccactttgcctggcatagtttcagtgtacactgtaagaataacagctttcatgtttgattaatacaagtattattaattaaccagcccagttgccaagccagaagagacctatctgaaatacagtgattttgttgaactataaacagaaccgactaaactttgctttgatgactaaaacaatacctacttggtttaagcaggagtgaaacaattccgaagtgcctgtgtctaatccatattctctgtgtgtcactgacaactctacagaacatgttaaaagccagtcttcagaatgttggatcagggaacctagagtttgtggctctttttaaccctggagggcctgtgagttccagttaattcagtggtcttagaaaacaaaatcaagattggttttgaggggaataaggaacatatatattaaagatggtctgaactggtggttgccattttcagacattgagcagtcagtatttgcatgtactgtgtacttctctttgtaggttaatcaggctcagagaccatgccactgacattggtgtgcacaatctctgtatttgagaggcaggttggcgtggctagttactcactgaaggttccagtagcctaagcctccagcacagagcttctcaaaacatgggccctagaatagcagccacgggcttacctgggaactcacctgaaatgcagattcttaggccccacctcggacactggggtaactctatgattagtctgggaaatctgcatcttaggcatcccaggcaatttggatgcaaccactgcctccgtatgagtcaccatcattttttatttattttcaaaaagttaaaccttcaccatttagctgaggtgccacagaatagaaagtttagccacaaacagaaaagcccccgttgatggcagattgactcgctccgtggaatcgctgcaagccgtttcaaaatatggaaaattgggctctgaaacattgcgatgttggtgttggcaagcagtcctgctgatctgcagagaaatacagggtcttcctgctgtttcctttctcctgaattctttcctggcctcttagaaactttcctttgaggcaggcctgaaaatatcaacccctccatgaaaatgagttgtttaccctcccgatcattcgttagaaagcattgaattttgctgaatcaggggtaattgcttttgacaagcatacacatctaacagtaagtgataccgaaaacacttggtgcaaggctcaaaacttggaacattctagattcttaataacgggtcatgccatttggcacatctttgcatgtaatcttaaacagagtcagtccaaccacgacaataatgaaaaatgagtacaaaagggtgaacaaaatgagatgttatcctggtgaaacgacagaaaacagggcacttcacaatgggtgggtgggtgtggggctttcaaatataagaagtttaatctagtctgagtcaattctacttatctagaaagaaggaaatctatacagagaaaaactaggtttaaggaagtgactactttttgagtatgtcaaaaggggaaacaaaactacttctaaaatgcggtatttatcaaatgtagtttcttccttatttagagtaatctaaggcatatcttccttattatgaaaatatgaacatatgacatcatgttaagttcaaatatggttcatgaaaccatgttaagttcaaatattaaaaaacagagagtaaaaggtaaactatgcccctctttcatttctttcttctacctatctgttctctatggataaccactagaaactgacgtgcgtattttctgagtatattctgtgtttaaaccacatttctgtttgttattccattactgtgtgaagctgaacaatcactggatgcacatgggccaagtctagggcatagccttgacattataggtataaaacatatgaaatgtcttcatttgtcttcacatatcatgaacagatgtccatgtcagtatgtatagacttacttcatccctgcagaagtaggaaagcagtcattctataagtgactgcaccatgaatgtcaagcctcttcctcttgaaagtataagatggtttccattcataaatggtccttcaagtcagccatctttacacatcactcctcatttgtttgtatcttgaaaaggtatttccatagaggtaggttgtctagacaaaaaaaaaggggggggcactttagctagtcttcatacacactaaggaagtattctataaaaaagcaacagcaaatgagggcttcttagtgtattatcacctgttctaagtcacatcactattaaaatatatttgttctagttgaataattatgtgtatgttttctcctgagaattttgtaacttaagctcatgtatgtcattgtctcatcttaatattttgcagatgttgtgggagtctagtttcattcttctataaatgtatatcccattttctaacacgtattgctgaaaagtattcttatttcctccagtgagctgtcttgggtccttgtcaaagacagactggctgcaaatgtgaaggttgatttctggaatctctattcttccccatttgaccgtttgtacactagtgttgagtttacacttgctctaactgtaaggattccaaactgagacatagtaaaagttcaagagcttcattctttttaaagattaagtggcctgtctcatttctttgcacttcaataaaaattttatgactgctttgtcatttctttgtagaacctgcctagaaattttacagggaccacactgaatctgttcctttatgcctattttatcctttgtgatgaaatggtaaagaaatttttgcttttaatattcatttttgcattgttcattttaagcctctagaaatgcagtttatttttaaactgtatattggaagtaaaatttaaccttgccaaacttgattatgagtactaacaaactgattacctcgatacaggaacacgtaatctgaagagagaggtcctcaaccttttgcatttagatggcagttgttttcatttcattgcctacgtgcttggtctagaacttccaatacagcatttcatggatgaaaagaacacaaatctttgatttgctccaaatactagggaaagggaaaactttagctcttttgtcattatgtataaaatcaactgtgtttctcatagaagctcccacgaggctggggaagtctctttatagctaagtctgtgtcttagagtctcagctatatagcacaggctgtccttgacctcaagagtctcctacccgagcctgggttgacagagttggaattacagtcatacactaccatgttttcccttttgaggtgttgtacattgaattcactgccttgcaattacactcaagatctgtcagccagctctacttccagcccttgaagttcctcttacctcttagtttgcaagactgtaaattcaatgtgcccccatcactttgttcttgaactgtagaggtttagaatttttagtctgtcttgggtttgtttgtttctatagggaaagactcatcagttttgctgacccttaaaaaattggggttctttaattatctctttagaaaacctttgtttcttaactttttttcctacagtctttactatttctgttttgctttgcattttcatatttttttccttttattttcaggtgccaaggcagaaatttcaattgttaagtagaagtctttacctttttaaatgtagttgtagctgggaggggtggtgcagcctggtttacagagtgagtttcagcacagccagggctacacagagaaaccatgcctcagagagagagagagacagagagacagacagagagacagagagacagagagacagagagagacagagagggagagaatgagaattaaataactgaataactgtggttgtctatggccagaagcttctccaggagcccacacatcttgatgttgttccttcatcctcagtcaccatgaaatacatcgtacgctctctggtgattctcgttcttcatctattgctggcctagaactgttatttaattcccatatgaactttgattcttccttgtttgtttctaattccacactgcacatgatctcaatccctttgtatttatcaaggctttttttttgagggggggggctgttccaaaatgttttgtacttgacagagatgtgtattctagacattttggttgttttagttgttttttgtttgtttgtttgttttctggcagtaccctatagcaaggagtatttcacagtctgatgtgaaatactgggtttgttgatgaggttatgctttgaaaataggataggaggtatattctgacctcacaaggactctcactattttcctctttccatgccccaccctcttctcaagcttcctgccttatattgtgtcctgttgatctcttaaaactctcaggctctccttaacaacttaccatcaataattctatttcttcccatgttctaggaatatcaagcctgtgttcttattcacttctttccttgggcaaaatctcaagtctccactccactctgctccactctgctctgctctcgtcctctccactatgctatgctatgctgtgctgtgctgtgctgtgctgtgctgtgctatgctatgctatgctatgctatgctatgctatgctatgctatgctagcatgagcatagaggacattactagttctctcagaatgatatcctgatttttttttcaaaattctagatcattgattttaaacctgtgggtcgtgacccacattagggtcccatatcagataacctgcatatcagatatttacattgcaactcataagagtagcaaaaccatagttgtgaagtagcaacagaatgattctatgattggggttagccacagcataaggagctataccaaagggtcgcagtatgaggtcgagaacgacagtgatggagcagcagcctctggagctcagcttgtcttttctggcgtggaatcttggctctaccagaaaactgggataaaggcaatctctgactcagtatttacagtataaagcaatctggatactgagtctacccatgtattgggtgaggaaaaaaaaattccgatcttttgattgcagttgacaaagactcagtatgtatagcctagagtcatgtgggaagctgagcaacataaatggcagcccctctagtaagacaggttatctttgactgggaggaacaggcagatggagtcttgcttgttcttcacctacagtgatgctcttcctaagctgagctgggggcagggatgctggagttggggtggggatattcaggttttattcctttcaatcaaatcctggaagtcactgtctattatgattttatattgcttttctgtaattttctgtagggcaaagggaaggaaaaattgcagactctactgaaggaactaaagtaatatgaagataaatgtaatatttgatcatacaccctaagcccaaactgatctcagatctcgctctacagatgccattttctgcttcctgccactgcttcctgtggcatggggaaaataatacatagctcatctttgtatatgggaactaagtgacttaacaaatgtaatcggaacagcattgagcatttaatcaattctgagtaatatgtcacaattatcattttgcttggatgtttctctgactaactaatacatactaaacctgtgaattgcagacatagtggtattctaggcatttgactgaaacaaaacaaaaggagaaaaaatatcagaaatttaacggtccttacaaagttcctcaaatcccagagacaaagaagagggcaaagtccacaggtgatcaatctcattccatcttagcatcggtctaccgaaaatcatatagactcacacctcaatttttaaaaatctatttattttttatttaatgtgtgtgagtgttttggcggcttgtgtgcataggcatcatgtgaacacttggtacttaaagaagccaggagagagcctcagatcccctggaactggaattatagatgatcgtgtgccattatgtaggtgccaggacctgaaacaatgtcctttgcaaggtcagtaaatgttaactgttgaaccatctcatcagtcatccctgaagtttttttttcaattaatttatttttatttcaaattttgtactatgaagtcagctcacactcttctcctctcccaatttattctacaaactccccaaccaaccagtgttcccaacttcatattttcctctttctctcaacaccaccccccattgaaaatcaaaacaaaacaaaaggacaaaaaaaaaaaaaatacccaaacaaaccaaaaagcacaccaaacagaacaaaactaaacatggagtctgtattggtctggtcatgaggccttgcctggagtgtggttgattgacccagtggcacttctttgtaggatgttgactgctcctcttccagtaagcatcaattttgactgccttcttggttaggggtgggactttatgtctgcttccccttctcagtgttgggatatgctttgtctgctttgaacaagagcagatcttccttgtgtgtgctgtcacagtctctgtgagttcatatgtgaactagccctgttgtatctgaaagatgctgtttccttagagtcatccaccacactgagctctcccagactttctacctccccttctgtggagattcctgagctctgaggtgaggagtgtgataaacacataccatctaggactgagtgctccaacacctcttagtgtctgcacattttctagctgtgagcatctgtattaatttccatctacttcatgaagaagcctctctggtgagcgttgagtgatgtgtccatcctagtgtggtggctgtgggtttgtggtagagagtggttctgaagattgaccaagtcacaaaagatagagatggtgtcaaaggcaaagttgaaaggggcaattaaaaattaattaattaattaattaattaaaaagtagcactttgggttccttctaagagggcaagtctctcagagggacagttgggctgggagaaccttaatttccctcaatttttcaaagagctatttacctcatgacacattgttcaagttaaatttatgaaatgtggtcattcattcattcattcattccatcattccatcatgtgtcacacctttatcaaatactcactctgatgaagacattttgtcaaaaaccccagagtgaatcaaatggagcgaatccctccatacattcacttgtgtctgggtatgtcattactccagtcacaagtatcaggatggtcactcagtatgaaagtgatccacgacatccttcgaggaagttcttggtagagttccaagttggcttataaaagtactccaaacattgaatgcagctcttcctagaggaagataaggaatcctcccaccccttacttcagaggattctagagtcttacagctctatgacatttaagataaacacaccctggggagtggggagggggggacatgtttcctcaagttttcaaagcagtcaggagggatgcttccatcacatgtgttagtcccatagatccttctgggttgaagacctggctgcagataccatttattcatctgcttctgaaaaagtggtatacacacaatgccatggatattttcagagaagatattagtttgagagaacacctatgcactgcattactaagctccaaacaggttcaactttgatcaaaaacaaacaaacaaacaagcaaaaccaaacaaacagctgacctggaaggccatgtagctcatgtttggatataatagaggggaaacagagcccagccattcactctgtgtattccgtagaaagaatgtgaaagacagtggagttatctgttcagtcctcagcttgaaatggatcttttcactaaccagattccttatcagtctctcttgtcctttgggagaaggtaaaagaatgaatgcccggcaaaaccatagttgttttaggctggaagtacgtggagaaagacttcctactctccctgtcttggcagtggacttgctggggtatggcagtgagccacccatatattatggaaatggactggggcatagcagcaaccacatatgtggcagggtcactgcctccagaagagctcacggtgccctctcaagaggaacatgtttccacccacattccctggccagagcctctgtatcagacattggggaaaatgtggttaagggctggttcttcttctgaaataaacatttttcctcttgagctcatgtctacttaagtatacactcggtcccttagagagaatgcattgctggtttcaaagaactgtgcataaattgctttgaaagccgaaggagggaggtgccccacatctcctccctagttttgcaattggactgtggaaggagtcttgcctgagtcaaagacacagagacacaaatctttcttgcctgacactttaaaaataaaatgagttgtacttgcatatattcacccagaaatcccctcactactgttcattgagacctcacaggccttctcgaacaattccaatggtcttttcttaggtttaaacctctttcaggatggacagatgttctttgtaacccaacttcaactgcataagacagtactctgagcatctcttttctttatttgaacttataatttattcattccttctacgttcttgcaagatttcattcagcataggacttttacatcaatatttttaatgttgcgattaaatgttatttattttgtttattgggttattggtatctccatataatttgctgccaagaccagcatggtaggcatgccagtgtgctctctcagccatggtcaagagtcatagttctgtgaaagctttactgtgcttatgggttctataaatagactctttggaagaaggattggtaatagtggcctcagaaaagcaataaagtaccactctctcctccctacagctgcgcatctacagaacttttctaggaacactctagcctcaagatacactaagacacattctctgtaacatctctttgttcttgtgttgagtgcaccactgtaaagtttcccagcctacgaacatgtacaatgaaatgaagtccacgtctcccaaaacactgtcttacttattccaagataataatctcctgctggtatgcgaatactaatcaagcaatgctggacacattatggaaaacgaatgatgcagctgagctgagtttattttcaaagcccggagacgtggatcctacaataagtttcctctcttgtggctgtccctattattccacatgattgatgtgtgtttaatgatttttatctgatgtgtctgggaactgtggagttgcaatcacttaggcaagtgcaggcgtcttccttcacaatgaaacttgctttagccacagagcagggatgctgcatttaaagatagatcggcctttggaaagccactgtacagctcctgcaacttgtaacagacctgactcacacatgctccctgagctctcagtagcatctgaatttctgtgaatttttttctgcacatggttttgttcacatgcttataacaccactttacagtatattagaaagttctagttgtctccccaattctcaagaaaggaaaacagctatgcaagactttagtcagtgacagactcaggaccacatacgtgagattatgacctatcttattttagcttcatagacattccatctcttctctctgtcaatattaacatatccacagattcatgggataactattttatatgttaattgcgctctagttttattgcctagagcaaattatgtctgagagctcacttctctgtttctagttatttatgtgtatgtgtctacatgagtttatgtgtaccgcatgtgtgcaagagcccagggaggccaaagaagggagtgaaatcacctggggctaagagatacaggcagttgttagccactgtgtgggttgtgggaaccaaccaggtcctatgcaagagaatgaagtgttcttaatagctgaaccatctctcaaccccatgtttattcttttgtatgatttcccaactttaatggtaccaagaggccctccaactttccagcctagaagagtcatacccttaagagtagaaatacaaacagctttatcaagggttggtctttgaactcatggagcaaacgctagataggatgtacaaaccaccgagtcttgtacacaactcagcaaagattttcctcattgtagcaaatgtctccctctcactgactctgataccctcctcaagcacacacattattcacatttaggatgcttcctatatcttcatgtttaatctcccctgaggccatatttgacattttgctctcttttattctgggacacaatcccagctgtgacgttcagtttattctacttgtttgctatggttgtaactatgttccttgcttccacatgagtgtaatgccatgatcggtttatgttataatactctatttctcaatccccagccatgaaattcattcttaaatccctgtctggtcttaccatgtcaagcttaatgtctgagatcctgaagtctagtgctcctgactttcactataaatcaaagtagatagtggaaacttgatattcatgtctgctgatatctgtagttcccacgacacctctattgacatgttcttccagggattggagctgtgcaatgtatatgtttgttttatttggtgctcataccagatagaaaatggacaatcaaggtgcagaattcctctaaacagggtgggtagatgctccttcgttcttctcctccttcctcctcctcctcctcctcctcctcttctttctcttctttctaatcttttctcatatgttaacttagaggtcttgtaggtaagtatttccaactgctgagaaatcaaggacacaggaaagagacctcacgtataggcgagtcttttgatccatcctgcccctttaccagttatccctctaaagctgcagaggttgactgagtcatggtctacatgatagctgtgtagtccttactgactaggcagccttgtgatccctgggttctgctcactctctctgggactgctactctgcagcctattatgcttctgacatcaagccttcctagaaggaaacagacagtacttagctccatatagttaagagaaatattgggactccccatgtgaggaattttgatgtaactgtgagagtagttaatatttaacctaaactttgggacacctagttatgtgtaaaagtcacccgtggaagtaaaaatttattatcttatcgattagagtcttcacagacctttctgatgccagcactatttatggtcgactttcacatttgtgaaggattagaggattttgcttttagtttgcactgcaaattcttttatcctcagataactgagtctgtgtgaatcatcaggtatggcactccgacccaacaaagaacttcaaacaacactgtagctctcagaaatttttctgagtaacaaacatgtaaagctgaaacatgcaaaggcatgtaaaattgagctgcaaatggcctgcagaagcaggtgaatttctgggagttcaaggccattctagtctacaaaatgagttccaaaacttcacaataaaaccatgtctcaaaaagaagagagaatataaaattaaaacaataaagttaaccttccaaaccctcctaaggtctccctgctatcagcacaattgctggttagatgcgtcactaagcatctgctgagcccttgaactgatgagcagctgtctgatggtgctgtgacatcattccacacagagatgtgtgcatgtgtcactttcacattggctacagaagaaaatttaaaaatccaattccaatgttgtttgtttgtttgtttgtttgattgattgattgattgattggttgattggcttggttaggtttggcttggcttggcttggcttggcttggcttggcttggtttggtttggtttggtttggtttggtttggtttgggtactgaacatttaccctacaaaaggctgtaccggtttatgcttctaccagttttaaataatcacccaacgtaaaaagtaatgtcaaaacaaaataatcatatttgattggtcaattaagggagggctttcttgagaagttttcattggggtactttgcctatgggaaaggattcttacctttttcaaactgatttatagtcattataaacttttaaaactttgctatgcatttcaaatacttttgcttaatacattcaatttgtaatttagttctatacattttctcccccccatcacaaatcaccattttagaaatgaaactttcagttacatagtgtggtgggctctgaaatttcctattgaattgaagtactatgaagctaaaaatgccaaaaccacattacatttcagttcataaatatttgttacatgcctgcacttctgtgttaaatgctgggttgcaaccttcactgctgatattattcctctttcaaacatcaacagagaattgtagtaattcatgattacagtctgtcttccctccacaggataactttaaatcaaatttgaattgttttcaaccatgtacttcattttcttgctactgagctgaatctactccaagtatttcatattcctctttagttatggatactaaaaactgtgcattcatgaagtggggatgagtctaaccaaagatcacatcttcttattagctactctacattccctaccagataaaaactgctgctctcactgaccaaagagagggccacagagaaatggcctggaagaatagactaccatctagagcccaagctatgagaccaacctgtagaggagcccaggcacaataaattcacaacagtcaaggtagtcttctcttcatttctctcctctcttcaccctcatccttcccttcctctctttcttcttctttctctcctctctctccctcctctccctcctctctccctccttccctccttctctccctccctccccatatttgcatctgttcctttccaattttattctctttattcagacttagcagattaccacattagacatcaccacttccttcacggtaactgaaagatgggatcatttcaaggttaaactttcagagctcccagactcaatattttgtgctgtaagtacttaaggtcaaaatgatgtttttgtcaaaatgatttgtttgtttagtcattcattcattcattcattcattcattcattttttatcttttttttaagtattagatagtataagctttgtgcatatgtcttgtatagtgagaattaactttttatttaaaatgttttatatagaatattctagtaaaaaattttttttatatttctgacccacagatcacatcagtataggtcaacccaaccttggccacacactttaaccaaaattgttgagacatgctgattttaataagacattaatgaaggctacaagccaattcatcttcaactatgaagcaaacataatgtggttatatttaagttgtaaaattgcaagacaccagtccaaaggccagccatctaggcaatcctaaagctcccagtggtctcagagcacacgttgagaacagccattttatggctttttgtgcatcccagtagcaaaatttcttttcaaaatggcacagctttgctatttggtcaagaactcttctagcttttacttatttcttgccagatcattttctttctctagtgagaaattgaatttaaaatctattttattactttccctttcaaaaatcacatgaaatatagtttataatgatttatagcaaaagcttcatccacacattcatgaaggcagaatggcagcagcaaagaatacaaggaaatgacctctgcatcctgctttgccccatactactttcctttgatgctcaacgttgaatgtggaactgagcagcagaagcagccattagagtttgcatcccaccaaaagttcactaacaaaaagagactcggaaagctggaataaatgtatcagtgaagaaggggagacatttacacaggatggattgcagagcagagcagcagaacaagtttctagatttaagatttccatccatacaggcaggaagcctgatcatgaaagctggagaggccagtgatccatgggaaatgatgagaagtgttcctccccaagtagcgcctgtttaaagaggaaccaggacacccaagttttctgttgtctccttgaagctctgtctgttgtgttattgttaatgttaaaagtgggtactagagagctaattgcaacagagaggccaaggctaacaggaattgcatccctaaccttaaccttaaccctaaccctaaccctaaccctaaccctaaccctaaccctaaccctaaccctaactctaacataacaaggaaatggcggagggagacctaggatctgtggctgaccagtagtctttttgactctacatggtccacctatgaaccacatatttaaattaaaatctgggtttttgatagtaaatagtttcccttaaggccctcctgggtctagaatcctcttttatccttctgaggcacaatattcttcctatgatctgaagcagacagtttggcactaaaagaaggtgagacgtgttgaaacagtcctgccataaatagcaactttgtctttctagacaaggtttcatggactcctgactggacttgagctcattttgtagtttatgatgagtctgaatttctaattccccagtgatgtctaccacctgaaagagagggctatcagtgtgctagcatactcaatttatggtgtgctggggattcatgcatgctgggcaaacactcttaacaattaagccatattttcatagcattctttatcctctaaatctctgtcagtcatgacactgatcatatagtctcaccctccctttctcaaaccttaataaagaaaaaaaagcatgtagatatatttattaggtataacatatgtacatgtttatttagattgtaatataatctatttgtgcaacaaaagcactaggtttgaaaaccaataaagaatccctacaaattcctaaaagaatttcctatagaaaaatattaagagtcttgaaagggtatatcatatatacacaaaaacatttaagtaagtaaccaagaaacaggaaaattcccaacctctttaataatctatgaaatgcaacttaaaccaggtggtggtgacacatgtctttaatcccaacactcaagaggcagaggcaggtggatctctgtgagtttgaggccagtctggtctcaagctcaggtttcagggctgccagggctacaaagagaaaccctgtctcaaaaatagaaagaaagaaagaaagaaagaaagaaagaaagagaggggagagaaggagggagggagggaggcgaaggagggagggaggggaaggaggatagaagaaagaaaaggaaaggaaagaaaagggaaggggagaggaggggaggggaggagaggggaaaggaaaggaaaggaaaggaaaacccacagtgaagggatgcatagattagcaaatctataaataaataaataaataaataaataaataaataaataggagtaatgcagtgtcaggacatgggagtgtgtacggtgcttggggaatgggatatgaaatctttgcatactctaggtagtcgggaaggctagatgaccactgtggtgacagtgagtgcagcttcagagtgaggctgagggctgaatgtgacccaagactcagtactcacaccacagctatgtgcctgagagatgtgcccaaggagagaaaactaagaacactcacagcaggcgtatcctaagagggcagtgttcagacagccctgctatcaacaacaaaagtaaggctgatgtctttagacactgagataggatagaacaaagccattaaagaggttatagccaaaagcaggaggactcccaataaaaatagtgaatgaaagaagccagaccaaagtgagcatctacacagtggatcccttctcattgctcaaacaataggatgggtaatgctgtgtttttgagatcgagtacataagtatgaaaactaaatgagtaccacaaaataaatacatggagttaaaatagatatcgtagtaaggaaaagtcatggcgttctgggtttgggtttcttgatccgtctgagtgtggaagaatgtagtcacttggtcagtcactagtgtaatgatcctttctgaatgtacttaatagatcgcagtttaaaaatgtttaaaagaaagcaaggaaagggctggtgagatggctcaatgggtaagagcacccgactgctcttccaaaggtcaggagttcaaatcccagcaaccacatggtggctcacaaccatctgtaacaagatctgactccctcttccggagtgtctgaaaacagctacagtgtacttacatataataaataaataaataaataaataaataaataaataaatcttaaaaaaaaaaaaaaagaaagcaaggaaagaaaaaatcctagcatactgatgtgggatttgaaattgcattgtggaagcaaacacttattgattgaaaaatagaagaggtttgaagccagagatttgttgtaggaaaattctaaaaccaggaaaaatccattaacctaagaaacaaatctatttctcagaacaaggcaagctctgtgtcaaaaaaatctcccttttgcttaattttatttttaatttcattgagaaggaattaagagatgaaagctgtattctgttcccagctatcgtgggagtcacccggacaccctagtaaaatggttaaataggccaaatatttcaacatagtaacctctctaacatcggcaaagtcagcacacatgggaaccctttcgtattctctcttaaaaccctaaatcagtgactaacaaccttccttgtgcttcagccctttaatacagttcctcgtgctgtgacgacaccccagccataaaattatttcattactacttcataactgtaactttattattactgttatgactcataatgtaaatgtctgatatgcaggatatctgatatatgacaccaccctccccccaaagaggtcataagctacaggttgagaattgctgccctggctcattatttttattttatttccatcagcaagaacctcctctaatctgggcatattactgcacacctttaatcctagcacttgggaggcagagatagatggatctttgtgaggtcaagggcagcctggtctgcagagtgaattccaggacagtcagagctacatggagagcgaaatcctgtctcaaaaatacagatatagatagatagacagatagatagatagatagatagatagatagatagatagatagatagacagacagacagacagacagatagatgatagatagatgatagatagatagatagatagatagatagatagatagatgatagatagatacatagatagatagatagatagatagatagatagatagatagatagatagatagatagatagataagaatctcccatttccattttatctgtataatcaattacaaatcaccaagttctttcaatgataataaagcctgcctggcccctgctccttctgctcacatggatctgatgagtaactaggaattttcagcagtgtggaatgtttttctatttctccgactgtcttttgttcatcttctgacattcattatatcacctatcactataggatagatacttactttctccttacaattattgcctatttacatataaactagcccccaaaatatctagaaatcattcattacaaaaatctcgacctgatagtggactgacatctttatagtctctggcctcccggattgattggagtgtgagaatcccatcctgcagtctaccagcgtgtagcacctcacattgacaaaaacatcctcggtgggggaggaaaaaagagcaggcagacctgagagggaacagacagcaactaaaacggtgtcacatgtttgcaattcaaaacatttgcttcctaataattcattccgaaagcagagggatactttaatcctgtatgtacttacaacagtatggttctcatcatccaatttaaacacttttattgtgcttctcagttgctttctcacgttgcactttgacacttcataatcaaatttgctcaagcttaatatgtgacatcataaagaataactgtcatactttgaggcagaccataagacaaagacactttgtttcagaaccacaaaaagaagggaattcacaagactcattatctgagacacgagattcatcctgaggggtgaaaatgtgggtgtcaaacttacaaggcttcttcttctacagctttgctttctctgtgtctcactctctgcctgtttatttgtttgtttgtttggtcttttggatttgtaaagagtgtgtgggtccactaggcagcatgtcccaaaaagatgtgtgcagtgggaggaacccagggaggtgttctgttcctttcctccctgactcttctaactggatctttggataaaattcttgtcgtctggcatgaactctacaagcacaaatatcagcttttccttctatcaacaaagccagcccttacaactttcttacacttaaaattcctaaatgtgtagcaggcagaggaatgttatatttcatctggtcatctattccccgctaaaacacagaaaactgtgttcagagaaaggagatcaaagagtctatgttaatgcctccaccaggtttctgttcatctgtagcctggcctgctctggttgaataattccagtgctaagttattctttcactgcactgcagactgaaaggtaaattgttaacacatctcagtggggctaggattgctgatctcccctggtctctgggatgaggctggggttcctgtaattaaaaaccctggagtggtcagactttatcactcatttatttgctctggccttatggggtctctctatgtaggtcagactcccttggaactctccagttttcctgcctccgcctccacggtgctgagatcgcaggtgtgtgccatcttatgcaggtctgctttgatatgtcttgagcagtcctacattgccatcagttcccatccagcctagctttacatcctgacatttccttcgttttctccagcttctaccactcccagtcacacattttctgtctgaacacaagttgacagaggcagccatcaccagctgtatgtgcttggactgcagtttatgtagcagttgtagagtgcttctctgcattctgcatgcacgactgagggtttgtttttgtttttttggtttttttttttttcagggactctctccagtgtcaactagggtaggaatcctgggcataataagaagatgcagaggtgtagcctttcacagttacctcgcttgtgctggataggactgggttttgagggctcttgggtgtgcaaaatcgtatcatggttgtttatcagttgttgcttttatgaattataatgggctaaaatgaaagaattacaaggtatgttctggaagatttggttgctgtgaggtggggagaaggaggtaggagtgatggccaaagcctctttgcccagctcaggatgcacagaagggaggatcaccagaagctccagacaagcctgctctagcaagaccatctcaagttagttagctaactcattaagtaatgtttcaatgacaaattaggtaaagcagaaagaaagtggtcaagaagaaaagaatttccttcaagtgtcggaagacagagtccatgaagtttaatccaagaaaaggccagggtaagggcttaacccaacgtccagacacgtcttcaaggggacacagtcccagcttctgcagtgattctttgaatccgtggcatttcacggccctgttcacaatgctcagcaatcatttccagctgtttctcagacatttcctttccattcctccactgggaagaaagagaaaaaaaaatcccttatgccagtgtttgtagatcatagcattagctgtaaatccactccatagtagtctacaaacctgggtttttatttcattgtttctatttcatgccaaatcatagtagtttctttttaatttatagaaagaaacaaataaaaaggctcttgaaagaacctaaggaacttcccttgcctatgtcataaaaactcactagctcacacttacttaattagtgagagctctggtttgcaagctattgaatttaatgttcatgcttttagcatacagagaagtatatgtgcatgtattcataggagtaatgttttttatttatttatttatttgtttgcttgcttgcttgctttgtttatgatgtttcagacccaaacaagggcttcgcaagtattcaattaccaagctatatccccagtttccctacctttaaaaacaaaaacaaaaataaagaatcattaagttacccagtttagtcttgagttccctctgtacctcagctgtcctgtgacttttcggaggaaatgtgaacattccaaataggggctgactaaggattattagactaaagaaagtattctacctgtttcttgcttgggaactagtgaatgcattggggtccttacagttagtgagtgagaggttatatacaggagcgtggagcctagcatgcagtgtaccgccaaaaacccacctgggaatgggagatgacgtaaaagctgcaggttgtaggcagctcctccaagggttgcctctctccagagtttccagattgcaaccttgtggaagaattccttgagtcctgttcctttagctttccaagtcttaggagtctccttataccccaaagagaaggtttgaattttgaagagctacacaaggccaagcagactttaaactctccatcccactgcctcagcttcctgagtagccaataacagaactgtgtacccaggccagactgactttataatatcagagacagcatagtgtctgacgtttgcgtcaagaattactatttcagagttggagactcctgggctcactgacaagctgtgagacctcagggaagtttccctgcagtggaaggctgaaccagactcggatggatgtgtgtaattgtgcagagacacgttccattccctctcacagccatttgctcatttgcgcactaaactttacgttctccccagaagcagcttcggcacatttcttagcacattgctccagtgagcatccatcaatctgtcagacttggcacatgatctcaagcatttttgtggaactagatgactgcaaaggttcttccaaaacactgcagctccatatgttaatagagtcttaactaacaggctttaaaggagatgcttaaaaatgagcagggcatggtgaactatgcctatagtcatagcattcggagtgctgatgcagatggattgtacatttgaagctagctggggctacctaatgacttggagaccaggctagtctgggctatatagtacaaaattaggtcaaaaagaaaatacataggaagggaaatgagaggagaggggagaagagatggaaggaagggataggaggaggtaaaggatgtagggagaaaagagaaaagagaagggaggggaggagaaaggaggcatggacaagagcggggagaggaaaggggaaaaagtcagtgatggcattgactgtcatctcagcactgaggagtctgaagcaggaagattacactgagtcaaagcttgcctgtgcaacacagtaataccaagtcagccatggatgcatagtaaaacctaatatttaaataataacaatcctctgtttgtgtgtgtgtgtgtgtgtgtacatataaacataaaacttacctgtctcatatcatcttactcttagtagccacaaacctctattccataatatacccctagctactctataggcagactggttgtgcctataatataacagaactaatctacgatgcaattcattgtttttccttctctactagctgaaaaactcgttattgttcaaaaccgcataatcagactggctgatttttgtataaaattttttgagtctcggggcctctgtaaaacatcaataagaatctacagattctctgggaagagttagaagtaggaatgggagtatatatgatcagatcgtacaatctcaaagattgataaatgtatttttacaatgacatacaacaaaagagtcataaatattttgtagcttataagctactttcaaattgctttataagtgctcacgtcattagatggatttataaaacacaatggttttcaccagacaaaatacaaaagctctcctcataagcacaatagttctcatcagactaggagaaagggctagtaataaacggattatgaacccagtgcttgaatcaaccaaagggaatttttgtgttgaacactcaaatatagaacacacggtgtcaagtatcttttaagtcttcaatgaggccaggagaatgtattcacttacaaatatgcttagcaaatgtggatcaacactgctgtccaagttccctgctgaaacctcatttgtatgacttcctttcttgaagtagtgtatcaagtaaaagtggtggccaatatcgttacaggtcttggccaataaaacctacacatctcaagagcataaagaaaaataaaccgggcgtggtggcgcacgcctttaatcccagcactcgggaggcagaggcaggcagatttctgagttcgaggccagcctggtctccaaagtgagttcaggacagccaggactacacagagaaaccctgtctcgaaaaaaaaaaaaaaaaaaaaaaaaaaaaaaaagaaaagaaaagaaaaagaaaaagagaaagaaaacgtgtttcctgatttgctttccctctcctcctggaagcagagattgtattattaagaaaaccacctaacaggatcactggacacttctagtgtttcagtcaaaaacccttacagttgctcttagctggtccctttctctaaacacttcacccagcgtgtttatccagttctgttggctcttgctttacttctgactgcttctcatcaccagctttcctcatgcctgcactgattacacctgtaaccacatagcttgtgccttgctccaatccttcgtctcacctctctgtctgtctgtctgtctgtctgtctgtctctctcgttctgtctctctctgtctctttatctctctctgtatctctttctgtctctcttctctttctgtatgtctgtctctgtctgtctctgtctctatctgtctctgtctctgtctctgtctctccctctccctcctcctccccctccccctcctgctcccccccctctctctctgtgggggggtatggcatgctaggaagaaaacctcttccttaggctaaacaaatattttcccactgagcaatgtgcctagccctccccagcatgtagcacagtgtctagcacatagcaggtgatcggtaaacagcttgtagaatgaagaaataagggaatgaattagccagctgccagtatgactcaggatcagaggaaacagcctactcacaagcaatgcactcctagtacaggcttttctgagaatttatatccaaacttcataattcagtttccttctctctaattgaatcaatctccccaccccctgccccagttttgcagatcatagtttgcagttagaagaaaggattgcatcgtagtgtttcagaaatgattacatcatttcaagatttgtaccactatctcccttcttcggtggccggcactatttcacaatcaccaaataagttggggaaaatgtcgatgtaagcaatcccatttcattacttactcacttctttatgcttaagacaaaaattccaaaacattgacttaaaacaggcaatagtactatatgcttagtaatttatgggaggttgctgagtatgaaggcagtttagagaaagtggaatgacacacatatattttaacaaatacagtaatgggtcaagtttataagcatcattttatcataaggtgttcagataccaaatccacatttcatcttatagccacataaaccctaataagaaataatatgtaaaatcccagcttcaaagccaggtataatatctcataactataatgcccacactcaggagactgaggaaggagagttattgtgcatttaagtccaaccaaggctacgcactgtattctaggcatccacctcatcaatagcataatagcctgcttaagaaagagagagagtgaaaggcagacagaatggcagagagacacagagacagagagaaaagaaaagacaggctggacatggctacccatcctgataagcacaacaattgaaagtagaagggacagctggttcaaagccagcatcagctacacagggaagttgaaattagcctggactccaagacaccttgttccaagcaaaacaaaacaacaacaaagaatgcagtcacctcaaactaaattcattggcacatgtgtgcacacacatacatgcacacacactcactgacacacagtaggatgaagccttgctggggagttggattttacaggaagaaaagaaggagaagaaagatgaatagggaacagagagagtaaaattcattgtatacatgtatgaagttgtcaagaacaaagccaggttttgaaagtttcgagcaaaggaatgtttaatgaaaagacaaagaatgatctggtcaccacccaagctcatttccaaatttggtcaaaacctcactactgtcagcgtgaaaatggtagacattactggatttgcatggtaaaataatttctgagttctaaaataatgataattggctaagcatttttcaaagaaaacataaagttggtattattattactattattaaagttttaaagaacttaaatattgaggcagcagaacaaactgtgaagtccttcttttgaatagtctagagcagaactcggatggaatctcagagcgttacaatccaaactcaaaatccctccatctcccaacatctgtcacattaaagagcaggttagcatgactattttttaaatattttttaatttatttttttaatttatttacaattcaagtgctatcctcttacccagtttaccccctccctctcctggaaatgccctatcccatcgctcctacccctgcttccatgagggtgttcctccacccacccacctacactgggccatctatggagccttcataggatcaaggacctcctctcttcccattgatgcctggcaagctggagccacgtgtactccttgactggtgacttagtccctggaagcgctaggggatctgattggttgatattgttgttcttccaatggggttgcaaaccccttcagctccttcagtcatttctctaactcctccattggggacaccccactcaatgcaatggttggctgtgagcatcagactctgtatttgtaaggctctggcagggcgtctcaggagacaattatatcaggctcctgttaggaagcatttcttagcatccacaatagtgtcggagttcggtgactgtatctggaatgaatccccaggtgggacggtctctggacggtctttccgtcagtctctgctctgcactttttctccatctttgctcctgtaagtattttgttctcctttctctgaaggactgaagtacccacactttgatcttccatcttcttgagcttcatgtggtctgtgaattgtatcttgggtattctgagcttttgggctaatatccacttatcagtgagtgcattctgtgtgtgttcttttgtgactgggttacctcacccaggatgatattttcaagtttcatccatttgcctaagaacttcataaattcattgtttttaattactgaataatactccagtgcgtaaatgtaccacattttctgtatccattcctctgttagcatgactgtcaaaaaaaaaaaaaaagtctcctcatacttgaagggaaacatgtaaaaaataaatcatattgaaacaatgacataatttgttttgtgaggactatttaaaatttgaatattatcaccacagtgaagacagtaaggtcatcaggtgataaaagtccctttttaaagaaagcaggggtagaggtgggagaaattggtccaggcggaagggtactgtttcagcaaaggaactgcctatggtgtggtcttcttgctgatgggtatgttcaagggtcttgggccttcactttcttccttttcaggtagctgattccatcattatttcccatattttttaggctcactttcaaggtctttcaagtttctatcaaggaaaagaggcaccttacaaccatgccacaggatgacctgacaaaaaatttaagttgttaacatcctagatctccctctgtaggagtcatgagtgcttatgtaagacttgtatgtttcctgcattaacttaaggagaaaaatgggttttttcaatcagcttttcaagctgaggctgaatatcagaaacctttgaccagaaaaattcaggccgactcaacagaaccttggattgctttaaataataataatacccaactcttcaggttgaaggatgcataggacagtgcccttgtccttccaggtctctggccagttcacccactattggagagtgggttgtattggacaattcagtccactacaaggatgcccagcactctggcttccacatctgtccacagcagtatccctaatactatgtagcagaattgaaagaacatggctgtcctgtttattttgcttttgccttccaaggatggccaagcaaggtgaatcagcatagttcagtggctcatagtggtatcacagatattcatgatgaaaagacccttagcttattcttcaggttcttatgaatgaaaactaacaccaggaaccatttggttttcagaagaacaaacaacatacatactcaagcccatcccggtggcaacctcctcatcgtcatcaacatccatgaacagcagcttctttttcagagaaatccttaccaaagcaactttttgagttcatgtggcagaaaataacgtgattcacctgcatactggaaaaggttcaataaattgctttaattcttcttcaaacttggcatccaagatacgatgggcatcatcaataactctgtaagagccttatacataaacccctgagcattctgcatatggtccaggagcccacctggaatggacatgataacgttgaatccattgatgcccttctgcacagtgacagcattaacaggtctgcttgtctaaatgagaatgatgggagaaaaatatttcagctcagaatagttccagaaacactaggtcatgggattaaagtgtcttcgttgttcttaacttctaagagttgactataaaaacaaagattgttaacataacaagccagaaagagaaaagctgccttggagtatccttcaccctagaaacctgcacagcacttttcctacactcttaagaacaaatgtatttgcagcataaattaaactgggggttggcatttgtcccattaattggatcaatgagtgatacaaacgagatgactcaactcttacagtgatcttttcttaatttgaattgtcttaatttatgtgtctctagggaatcaggcagctgacactagaaccacaaagtcttcgcctaactctcctgtcttggtgatgacttatttctaagtgaacctattgtgtcaaattagtacaccaaaatgtctttaatatatctgtcacgtgaaattaagcacctattcccctggggcttttccttgtaggagaagggaagaaatggaagatcttcctggagagaatgaagaccagcagaggcttggttggggtaggagggtaagggagatgggaggtgagatgtggggtatatatgtggaccgggtagtgagtgggggtctttcgtctagtgtggcaagtcaacatcggatgtgtgtgaagagggacatatctagaggaatcttcatttccccacactctatatttaacccagccatgtctcccccgtttttacagaagtaataacgaacattttgccagatacacaccaccaactgcattgtgactctcctttcatttttgaagacgttgcttcctttcttttcctggattgtttgtgtggccatactcatactttggatatcatgaagctatttgctgccatgccaagtgagaaaacaacagtgttgttgttttgttttgtttgtttgtttgttgcttgcttgcttccttgcctgttggctttctgttgacaagcttgttgtaatcattagttcaaatcccaagacatctcccagatcagaagatagattacggagagtgtgaatcaatttcaagtgaggagaggatggtgaggaatcttggcaaatttcagagaaagtcaaaggagagtcggtggatagtcaagaaagtaatgagtagtgatggaaagagccccatggaccaatggacattaatctgggtgccgtacttgggtcgtgacctgaataacataagtcctgccacaaagggggtctatctaacctagttgaaatatgtaccctaaggcttttaccatgaattttttacctcctttagtatgtaagtgattatgctaaatgttagccaagaaaaatcaagcacacagagagacctcatactttataatacacttgacactagagaaacaaataatcttacaattgattaagagaggaacacatgatatctttatagtaaagaaaacatggcctccatttggggaaatgccaggatctaagtactagtggaaaaactatcagagaattaaaaaactctactgtatctaagggaagtccatttggaactaagacaaaagcatgtcaccaagaactcttcagttccaaacatcctttcttggccctgcgtgagagactggaatgagtcaagtggaaactttccagggtttcctaggtcaaagcacaggccagagatctgccctctaagagaagctttataaacacaacttaagataacctagacaatcagcaacattgctctggtaccagtctgcccagctgcaaatcgagcttccatcactcactaggtgtgttgtgtttaacatttgaactgtatctcagttttctctcctagaaagtaaaacgaaaaagctttcttcatggaattctctgatgaatcaaaagtccaggtatattaaacactcagcacattgtcttgctgtactatagagtatttattacctaagcaaatggacaatatgagagctctaaacatcactgtatcactgtatcagtaactcctgtgagaaaatggcacaatacaaggaggcaaaacagtggtgacatatggctgaaaataaataaatatgttaaataatatgttaattgaggctcccttgtggctcagaagaattggcaacaaatgtgtgtgtttgtgtacatatacaagcatgtttttatatgtggaaatggcaatgaaaattgaagcaagataaaatacccaaggcatgcactgattgtcagcttcatagctctactgtaaagcagacagcttaacagaacagggaactctttgccaacaacaaaataaataactgcaagttaataaccccagtcctgcactgctgtgaagtttgcattttgactcagatgtttcaggttgcagtcaatggctgccttttaaaagtctagaaatcaacatatattaacaatacatggaatccatcaggtaactctgatgcaacagcccaaaaagaaccgtgactaacacatccccatcttatcttttttcccaaagtaattaagctgctattttaggacagttgaatgtgtgccatcttcccttcccataacctccctttcctaaaacacttttagaagttttgttcatcaagagtctattctaactgccttattcccaggactcttttcaccagcttcagacaataatgacctcatcattctaaaatcgccatgtcccggaagtcatacccaaagtcttgaccatattaacacgttttcaagtttccatccagtcacttccacggaccaagacaagtctacaggacgtagatgatacagcctctgcaagacagtccccaaggtctgttttaatgtgttgggctagatccactgggtaaaggcatgagcagaaagttatactcttaaagtcatcagcatgaagttttctgttgagctaaagccaatgttggggtagtcaatgttgatcaggtagtcaagaggttgacaagacccaagatctcaaagctgctgtgcagcaccttcttaaattttgatgatgttgactgagtcagtgtctggacagtgcacgggggagtgtgagagagtgctgtacagtgagtcaggcagcagacctcacttggtacttcagggtagctccaagatagagctagagcatccagaagcttcatttcttaggataactgaggcacctttcttcaatttcttactcctggacagggcttgaagtttagagcttctctcatctactttaacaaggtctcctcactcatttaacctgtggacctggtagatatattctcctaaaaagaatatgtagtacaaattaaatttctagaattggggacaatataccaaagattacaaattaaatttctagaattggggacaatataccaaagattcctcaaagcatttggatcttcaggtaagcagaatcctaaaaaaggacaagtgtgtgtgtgtgtgtgtgtgtgtgtgtgtgtgtgtgtgtgctgggtgtgctggcacacacccttaatcttagcactccagcaggtagaggcaggtagatctttgagttggaggcaaatctgatctccagagtgagttccagagtagccagggatgcacagagaaaccctgtattggaacagtaacaataaagagaaaacaaaataaattttcatgcaaaaattaaaatatataattcataatagtttagggctgtgaatcatgaaagttaattatgctatatataactgtaaagggtaggatgttatgcttttaggattcagatggatatagcataactcagaatattggttgtattttgacagtggatctctaacctggctccacaaaagaatttactacatacagagcttctgcaaaacgtccatcacagatacattaaaatcaaaacttacagaaaagaaactcctaacgttaacattattatgaatatagtgatctgatataaagctgggggtagggtgagtcagtagcttgaatgatggccttccttggtgcccttaaccagagtttaccaagcatgactgataatgccatggaaagcaaactcctggtacagagagacttagacttaacgggtcctcactaatgggcacataaatgaattggtggtagaggtgatacagttgtcagggatggaaatctctatctttgagagtctcttaaaacaaagctttaaaaaaattatttatttattttatgtatatgagtacactgttgctgtcttcagacacaccagaagagtgcatcggatcccattacagatgattgtaagccaccatgtggttgctgggaattcaactcaggacctctggaagagcagtcagtgctcttaaccactgagccatctctccagcccaaggcaaagcacttcatatgatgatccagagtcctagaaatagttttgatacacatcattttggtttactaagctgaaaccttaactgggtcagactactgggttccggggtgatttcatctttactgaaaatatgactttgaccttgcttgatgcaaaacaactcaaggtttgatttctaaatgggtttccctggttaaatttacaaaacagggagaccgctttgataaaaatatgcttttgatgagattttggaattcattgctggatatactctgtgagtacttgcaccatgtcaacttgaaagaaaagagcaaatatattatattttgggggaaggggagttttttatgttttagacagggtcctattatgaaactcaggctattctcaaactcaaaggcctcctatctcagtctcctggttgctaggacattgtcaagcttaaatgattagactgtcaaactgaactgaattgcgagtaagattcttaaactgtcccatgatctatcactctactcttccattctccacaggccagtgcttctcaggcttttccatttgtgtctgttagatcacctttctccttgtgggaggtccaactcacacagcccattctgagtggagcttaacttcctaatttgcaactgtgtctgtttccactgaccagcagtattttatcttttgtggttttggaggcctctcaatccatccttcctctataatagaaaaagtagaaatagtcactctgcatttttcctctccagtccttctgacaccaaccccacttcctgttcagataggggctcctctactggaggataatgcaacttgccacctgctccctgatttctgtcaaactggtagagtttgaactctgccttgttgtgttctaaggttacctcagaatggaacatttgagagttctttagtatttctaaagtcaacactaccagatatgcctgttccagggcaggggagatactgtttttaaaattgcacttcaatacatcccttgacgtgtccttggacttatcagtcaagacagacctttgaatcaacagttgctagccactaggcatggtggtgcatacctactgagctagcatttgggagattaaagctaaaggattgcatcccagagcagcctgagctatgaaaggaaaagaaaaaaaaattattcttaactcagtagatcatatattttatctatcccaactaaatattcagtttttctagtgtgatcaagtctgcacccatcagctacaaccatataaaacaatactaccgtgaatgttgatcaaacattgagcaagattactactgaaaaagaaatgggagcaactgaaatgttcctgaggaaatggaggtcagaaccagagaaaaagatgctggacattgaaacctcatccatctcctggaagctgagtttgtactccagagggcaatcgatgaaagcagggaggaagttgagggagattggcctggcatctagatgcactcattccaaagcactgagatagaaggaaggactagaaaggagagcaagcgcagggaggaacacagaaggacctaaacgtgctacctagtttctcttagtttagtttacatggaattttagtttagtatagtttatagtttttttaataatcaaaattcatactgtgcccttaaatctgtacaattcctatgtataggggaactcttatgagtcagtgctagagcgactgcctggcacatactgggccctaggtttgacccacagcattgtcagaaatagcaacaataatcagtagataaacattttaaaatacagttccaggaagatagaacaaccatgaaataaaaagacagtgtgctacttgtttaggttctaggaaattggaactgaatagttcagaagttctttttggtaagtcattgtcagcagacaaaatttcagctgattcttcttcaaacttgcagaagtggattataaatgaaacatcgctaagtgactacagctatcctcaggatctcacacttcctcgagatgaacaacagaagacatgcagtgtattcctctgcagttgtttagaattgtctcctacatcacccatagctgagcctaactctctcagatcctatgcacctctgacaggattgataccaatgctggtccaatcagccaagcaaggcttgcaatcagactatgtgactctgcatcaaatcactcaaggaaaccagtctgcgacaccacatgtgttatcacccaggcagtctgcaaactagattccaaactacacaagcaatttggtctgccttctgaagaaaattagtagtgaggctactcagaagaatatatttcaggtcatgcagattattagagagagagagagaagagagatgagggttaaagatacccctgttttatatctgtaacatctgacataattttagaaatccagatttttcttcttcagaggtatttcctataatgtagtgatttcaagacttctttgagctgacttttagtcaaggatgatgactgacttgctcctgccaacttttcatgatgagctcacaatatagaaacagggatctgcatgacacaagaaccaagcctttagaactagaatgtttgtatccttggtctctcacccaggagcccagcacaccttccttaagtctgagactcatctaagagcaagcataatacataatacatactaagaagccacattatctgagcaattcccaaataatagaactattcattttagacatcatcatttagtacttatttgttttatcatttttgatctgggcaaataagtcactaactctgtccagacttcagctggtctgggaatgcgtaagtgacaccgtctatacatctttccagttctaagaagcccatgaaggaaatcacatctgccaccaatattaaaaaataaaaaaagagcacaagttatgaattctgctgagtagcagtcctacttctgcatttcacaactttcttcaagaacacggagcagtgaatccctttcatctgtcctagtctccaaaacacgttgtccaagatgggggctggataaaaatcccagcttggggaagacaaagagtggtgggtttttgaaataacaaaaagagctcaaattattagtataagacttttatgttcatctctgcataagatattgaagttatttttagtgaatttctcaaacactccatgttggtcaggatgatgtagctagagagaagggacaaatttgagggagggaaggagcctggcttggattcttagcctccaccacctactgtgtgacccaggaactcttttttctgctttggggaggtgcagcatgtgagtattgcagaagtcttagatcacagtaaggacttccttccaaacatctctccaccacagctcatacattgtaatcttggttgacaggggtgaccgaactaaatgaccacagaacacacataaaataacaatttgctgagttgaatttgacccagcttggttcaggtgtcagctgagctccagagcaaactatagctattcgttctttaagaagaaactaaataaggacctgcaggcccttttatcctgtacctagaacagggctgattgtattgaaaagagcactgcccaacgtgtttgggtggggactcctgggtaaaatagtctcactttcaaatgtggttgaaatagctagtattctgatggcctgatatccctccacacttgaagattcacagtgtaaaacagctggttaatggcagctaaatctgtactacattcacacatgcatattttctgtatcaaatcctctttcctaggggaatttaaccatagagcctttgaacacaaattgaggaatgctgtcgtttaaagagacaggagaaggtagcagcaagcatgatcagatctgtgaagttagagctcagagagagaaaggcatgttggcagtattaagaaagaatgggaagccagtctgtggtacagaacgaggttttgcattggagcagccatggtggagtggacgaacataggagactactaggagagaggagcatacataggaagacacagggaaagctcagatagatctagatccagagttttccacttctacaactggccagatgatgtcctagccatggggctaaagaacagaagacctggatggtttaagagcccctgtccctagttagacgtgtagaaggtatggagcgaagggccaattacagtgtaacaaacagcatcagaaacatccattcgcctttctctctttcactcagcacttattttagccaaagtgtaatcattggctccctggggacactaagcactgtgtgtctctgaatgaagggggaggggaaaacaacacaatgccaggcatgtaaaaaaaaaaaatagctttagcattgccagatcattcctgcaaacagacaaacatgtacctaaatgtagatcataatagtgttttaacacaagttcttaggaaaacaactgaagcattttttgttggtggtgatgtttaagagcttactaaacaaataacaacaacaacaccaaaaaacccaaaccctagagaaagagtctaatacagtgacacacatacgtagttccaattatgcaggaggctaaggaagggggttcacttgagtggagggggtcgaaataagcatactgaaacacacccatgcacaccccacacacatgcacgcagcagcagcagtaccaccaccaccaccaccaccaccacaattcttcctccaaaaataaattaattaaataaacaaacaaacaaataagagtggtatacatttggcatcaactgttgaccttagaatattttccttgcatttgaaaacaaaacaaaacaacgcagaccaggcagggaaaaaaagaatggcattgcacactcgctggtttacaatggcttgttgcttcccacactccagcactcatgtgaatcacccagggaaatggcaggcatagattcgagttcagcaggtccaggcaaggctccagttctgtatccacagaagtcctgggtactgctggtgctgtgcgaggtatcagacatcagatgatcctgccttcacaggtctgaagagcactgaatccaaatgagagctgttcaaggaataagctgaatcaagagacaatttagctaagcctcagttcccatacctgtgcttctttaggggtggttaatatacgtattctctgagaagattatggccacgtacggtacggtaaaaacacaatttacaaacaaacaatattctgcatggttattaaaagtgtaatttaaaaacgctttttgacataacaaaattttattttaataatcttttaaaacaggaagtacttttttgtttttgcttttggagacagggtttatctgtgtagccttggctgtcctggaattttctctgtagaccaggctagccttaaaagtacctttaaacactaattgctgctcatattagtatcattgaagttctcattccaagacatacaaatcgagagcactaagttgaaggtttaagaaaatgcaccctgtggaatcacaacaatcaaggccaatcaatgattaggcctgaggcaaatcaaaagcacagcacaaatgctggatttaaccagttgagtctccccagcagctgcctgctccagttctgagcacagagcacgtaaattcacatactcagcagcttcatgaggagccgccaggactgcagcagaagactgtgactgactgtgcgccacgtctacaataaaggagggggtgggcaggtgggggagcactcttatagaagcagggggaggagggagggaataggggatttgtggaggggagacttttgaaatgtgaataaataaataaccaataaaaataaaaagggtagccaggcagtggtggcacgtgcctttagttccagcacttgggaagcagaggcaggtggatttccgagttcaaggctagcctggcctacagagaaaccctgtctaataaataaataaataaataaataaataaataaacaaaacaaaacaaaacaaaaagggttttttctttccctcctctttgtatgaagtagtttgtatcctgaaattagagatgcataagtgacttcaattaaatagcacctagagataagaggatgtgttgaaatgcagtgagtttgagagcagccatcactcgggcatactatgtattgcacaggtccacccggaatgcaggaggggaaatgtcctttaacaataatgtagttattgacgtcagcgggtctgaagtgaaacaattcagggctttcacttcatccttttgcagacaactgtgcattgagagctagctttatgtcagacatcactctagaagttgaatgggggccaaagtttaagagtcagttaccagacttctacatgacccacatcaacatgcatgagcgtgacggcaaagcagtgtgactgtgacctctgaggagggactgggatggctgggaaaaggacatcgtgtcagggaactgcacaggactccaaccttgagagggagcttattaatctgaattcattgggccaagtgaggaggtcatttctggcagcatccacagtaacaagtgtgggtttggttttgtatctaaaaaaaattaataatagacaaatggacggcaatatgcattcactgtggtgggaccaggtgatgtcacaggaatatttaagcaatcatatgagaatgctgaacagtgttcaggagaaatagacatgtgatgcatgtatgtatttatactcactaaaatataattattaataatctgagaaaattagcaatatttccattcataatatgataccagatgttgatatcagcacagaggtatctgcagcagggtgcatataaatcggagagatactggagaggtctagagtcacactgtgtagttgtctactcttccacccaagagttaatgtttagcaataaaggagaagatctttcactgggaactttcagattatggaaatatctactaaaacttgactacatctatacactcaagatttggactgtgtagtttcgggctgtaggaacgggtctgatcccgtctgatgcttttccatgtggatacagtgatctaatcactggtttgggatgaacgatccatttcttgctcctgggtccttatttgtaggtccatgttgctgtgcgaggcattgccagctcaagtcatcctttctgtaaattgacttcccaaagttctgcaggaccctcaagtgctgatgacggctttgctgcgacttctctttaacagctgtgtttcctttgggaaagagtggtttactgtctgctgtggcaagcagaagtcacttctcgtactgagaactgaaacctgagtcaccatgtgccatttcctgggcacttcctattaaatattaaagttcctttttgttccccacaaaagctagatttagaagcacaggttcatagactgatatcaagacagaagctcatcaactgggcgctcttggattaaactggatttcagtgtaccagctagcttttccttgttttgtgaatgtgaaaattctggaaccaaccacacaggaaggctgcgaagcacaaatgcattattacatacaaatatccttacagaggtgattggcacctatcattaatttagtgtccagcagctattaccagtaatgtctgtaaatcttaatgtttctaaagtcatgcaaatgtcataggcattttactccccaaataattgttttcccactcaaatagattcaagtattgcatctgtactgttataacatgaccgtgtattagggatgtctatgctctcttacaagaatggcagtatgaagtataagagactagtagactaatatttaattagaactaatttttttgcagagaaaagaaactccctgagaaccaaggaaccatagaattctttcagtgtcttaagcaattgacaaacatgaaaattcactaagtgaaaacagaaaaaatagcataaaatcaggcatttttatagaaaaaaatgtttcctttctgtatttatttaataataattcactgaacatgttcaacttaccaagtgcagaattggatgatatctggcatgcatagatagatagctcatatatgtgcacatgtgtgtttgtgtatatacatggaaggggtactcacttgaattctactactcaaaagacagaagggagttggaggccagcctggactacatagctagaccctgcttttgttgttattatcttgcaaacttctaaacttatgaaatgtatctgttatcactaaggaatttctgagtgtgtaaacaaaagagaatgaacattttataaagcattatggttttctcagttcatcataacataaaaacaaaatgttgcctatgaaaaagtaaaggataaaacaagccgagaaggtggagagtcaggaagaaatgagagcaagtacgtttaaattgtagagtgcagggcatgacacccataccaggaaatatttacaaacagtaaatgctacctactaaaatgggtttcttcaaaaatcttcccaatcaaacctagtctcactgcccagctaattaagaggctaaagcaaaatggtcacaatgatcacaagtccaaagacatcctgaaccagagaatgagttcaaggcaaaccaggacaacttatgaacactacactacagggctagtaatttcatgagaaagtggggaaagtatttgtctagcttgtgtgaggaccaagattcagtacccaaaatagaggaaacacagacacacagacacacacagacacacacagacacagacacacacctttcctaagaaccttcaacaaatgtggttaggtttagttagatggagttctgtcttagttcagtagatcagtggtccccttagagactgagtaagactagagtacttggttagaatactttttggtctttgatgctataattattagaggaatttcttgcactacgtaaattccataggtatgaactgaaaatagatagaggactccaagctacaacgttaccattctcttattatcttgctagtgaggttatgagcagcacagtcttgatgaagttactctaaaaaactgtattatgtgagatcttaattagttttgtgcttacgttgagtaaacactatacatgtgcagtaagaaatgtttctcaggatttgagcatgtgtgagactgtgggttatacaatccccaacactgaaaaaaatcataaacactctcagtatgaatattgagatatttaacttttctagatttcagaaacacttactgaaaattgaaaccaatccacaatacattttgatataaaatgggggctgattttaagacaaagtctcactatgtagcccaggctgaccttcactctcccccttctgcctctagagtactgagatttcaagtcaccatcgtggctgccaaagacattccatatattttaaaaacatgtgatactgtctcagtaaggttatcattaaagaagaatgttggcacaggaaataaaaaacacaaccataagactggaatcaacaggtatttatctaaaaatattacaatgcctctgtagagaacaatgtaacatccccacccccaacacacacacacacacacacacacacacacacacacacccatgactcagccttgcttttaaagtggggaatccataaacaaagtttcccagttgctgagttcatgaagagcttaacttttatttctggttacaatgtgtacatattggaaatttgttaaaagagtaagttatgtatctttcatactgcaatcaagaaaaaaatatgtccattggttgggtgcaaatatctgcatcggactctttcagctgcttgttgggtcttttggagggcagtcatgataggcccccttttgtgaacattccatagcctcagtaatagtgtcagatcttggaccatccccttgagcaggatcccactttgggcctgtcgctgaacctccttttcctcaggctcttctccatttttgtccctgcagttctttcagacaggaacaattatgggtcagagtcctcacttgatgccctgtttttctgctggaggtgggctctataagttccctttccccactgtcgggcatttcatctaaggtccctccctttgagtcctgagagtctctcacctcccaggtctctggtgcattctagagggtctcctcacctcctacctcccgagcttgcatgttttcattctttctgctggccctcagggtttcagtcctgttcccccacccaatacctgatcatgttcccctcttcccctccctgtccccttttccacccagagctctccctttctcccctctcctatgattgctttctcctccctcccaaggtgggactgaggcatcctcaattgggcctttcggcttgttaaccattttgaattttctggactgtatcctgggtatcctgtacatttttttttttttggctaatacctacttattagtgagtatattccatacctgtccttttgtgtctgagttacctcactctggatgatattttctagttccatctatttgcttgcaaaactcaggatgtccttgttcttactaggtgagtagtactccattgtgtaaaagaaccatattttctgtatccattcttctgttgttgggacatctgggttctttccagcttctggctatcacaaacaaggccgctatgaaaatagtctatgaaaatagtgggacatgggcagatatttacacccaaccaatggacagaagatggtgacccctgttgttgaattagggaaaagctggaagaagctgaggaggagggcgaccctggaagaccagcagtctcaattaacctagacccccaagatctcacagacactgggccaccaaccaggcagtataccccagctgatatgaggcccccaactcacatgcagtagaggactgccaagtctgggttcggtcagagaaaatgcacctaaccctcaagagactggaggtcccacggagtggggaggtctggtggggtgggggtagggagggacatccttgtggagacagggggtggggaggagacatgtgaggtggaacagtcagagggtagacagggaaggggataaaatctggagtattaaaaaaatattaaataatttttttgtttttgtttttgtttttttcaagacagggtttctctttgtagccttggctgtcctggaactcagggggaaaaaaaagaaaaatatttcctccttatactcctttaataatttattgggcattcaagattgccaggtgttgtactggacaagatctggcatgcatagataggctcttatatatgtgtacacttacacaaaacacacacacacacacacacacacatttgcacactggaatcctagtactcagaagaatgagacaggagtattttgaattgaaggacatcctgggctacacatcaagagcttgtatcaacagttaatagaacaaagtaaactaaggcaaacaacaaatcacaggatgctactgctgcaatgaaggctgaatggtggcatgagacatgcctggccagggctgctgccttaggtagggtgtgatgggtccatgtccagccagattctgttcagattaacatccctgcatgagaagcagtgctcgtaagagtgcaaagcctaagagagtcgcttgagctgctgatataaatgtaggaatcactattatgtaaatggatatttaaacaatgggtttaactttgcttacaagaatgaagctggaaatgattcttgacaagctgtcagtggttgttctaaacacgcggtctcgaaagggtgacagtcattagcaagaaccacattttttcaaaagtaaactttttaaacatcaagtcaaatgcatatgtgtgtttcaaaaagctagtctgaagccgtaggctaaccctacataattaatctgattaatgtagacaggatttcaaataatttagaaagcaagacagattgcctggatggtctttgccattttatatggcctaagtgaaatttagtactaactagaagctcttctcttaagagccatgttgtcccaaggaatgagtcacagttggtatgtggtctgaaatgaatgtaaagacaccaactgactcggaattactttttccagactgacttccattccctctctacctaccagagcgaagaatgaaaattactctgaggagaatttcccagacatttggtgtggatcatccactgattacaatataagttgtttatgtttggttggccaaacttaataagtttgtttttctatactgtagaatttgacttctaggttttagctccctgatgctcttctctcctgtggaccacctgcttcctctggaaactccttccaacatcataaccaccaaatgtgtctgtacagccaatcccaatgaagcatcttgtccttttttgtagaaattctaagctatatttgtgtttgtttgtttgtttgtttgtttgtttttgtttggtgtgttttgtgttgttttgttttgttttgtagtgatggcagttgagcccaaggccttaccccacgctcagtaaacactctatcattgatctatgtcccggccttccaagggttttcagatttgttcgaattataccctccatggctctcgttctccaaaggagtcttccatgctgccctgcttggaagcactgacctctgacagctctacaaaaccattagctgttgaatgtgagtgaacgtaggctatcagacagtccagcatggttcaaaatgggttttcataccatatttttagatattcggagaatagagaatttgctccattactagagactaaggcttacaaaggggcatttataaagaacagttcattataaatcaaaatttgtcaaagtgttgaagagatggagacggtatgagtcgatgtgtgcctaacagctgccttctctggttagaaggagacctgccaggagcgggtggtaatgttgaaagcagaggggggtccttttcacttattcctttctgattccagtaagagaaaatatagagagcttagtgatgagatgagcaagagaaatgttattttcccaaaagatcatgaggccaactctatttttgaaaaggaagtatcaattttgaaaacaggggggaaaaaaaggaagaagccattgagaaaattcaaaacaagctccaactacaaacaaggatgcatttatgacagccgtagaaggtagctggattcaattcaggagagaatatatttttgaaaacattctagttaattatacaaagggaaattaagcgtagggtaatttttttatataaaaagacacattttaatagtttgtctgcaacagagttgctttgaaagatacaaagtacctttgtagaaaaaaatagcttataagcttgctttgagtgataaaaccaattcttatgccccaaaacagtgtagaaaatgactactttcttaataacttttaggtaagttgttcctcacaataagctgacagttactgagtgtttagaataggaaagaagaaaaaaaaatgggaaggaagtggagagggaagaaatgaatcaggctgagaagcagagccttgatctcaggattccaggagggatccattgataggaaggcatcggtgcaggtatctttatatctggtattggtaactacagagacgtgtgtatatttttatagcttacgcaaatgagtgtctatcattataataggatagcccagcagtggttactaaacagaggggtccagtcttgacttagagttctctgcaatgctttaactctgctctgctcctctacccacaggggaatcaataatccaaccgtgtcaatgttttcagaaaatactgaagtgactggctttatccaagcttagaatagccagcaacagaaacacagaacagcagaggaagtgtggtccccgtgctgcccccaactccatccctgagtttactagagaaaaggaaaaaaatgtgtcttgaagaatggagtcaagttcgtctaaaccgtagagagactctactcccacagtcatttgagttacataagccttcattaatagtggctattttaccagggcatcaaagagcataggtgtggtcctaactcctcgagaagcagaggcaggaagatctgcagtttgaaaccaccttgggctacatagccagaccttaacccacgaaaccaataaatcattaatatcactgggagaattagtaaggcatcggtgcagttatctttatatctggtattggtaactacagagacgtgggtatatttttatagcttacgcaaatgagtgtctatcattatccttgctgaaatctctattgtttattaaagagttgtgatctctctaaggtaaaaaaagaattaagcctcagctgggttgtgaactaagtgcactgggtccagcagtaggcatctaagcagtgttcttggcacactcttctagcctttctgtgtaagtagagataattagtggctcccaactctatatgtttcaggaatgttcatgaattgtattcaaaatgtggatcttctgtctaatcagaagttatcaatattctctaaatacatttatataaagtttcaagggcttcgactctcttctatactaagaattccagtagtattacatcgtcttgaaaataaaaggccatgtttatggaaatgtggctcccaggcattcccacatttaaaccaaattatgctgttctgaagagtgagctcccggaatcctacacctaatgtgttccagtgtcacaagctggttttctttaaaaggaaaaattgccgttttcatgtaaatactctgtggttatgaaagcagtgtacgttgaacttggcaactacttttggactgtgtcttcatccttggtaggaacagaatggtggatatactctccccaggttcaaagacactcacatcctccctgtgcagctccatgctactcaagagttctgaaatatatgacttagccctgctctgtgtccaaccatattcttcaatatgaaagttcaatgttaactttgaaagatgtttccaatgctaacatgttatagcctgtaatacagaatgcaatagggaagtcagcacagtgatgtactctaaacaaagaaggaagtggagggagaaatccaaaatcctgagcaacacagtgagagtttatattttaaaaaatatgttggcatgttattagaacaggtaaatatttcttcttctaataacaaatttccattacactgactgactcggtaatccctatttttttaagtatatgtagagtaatataaatttagttactcaaatgaagcaagaggatacatagatctattcctgattttttttttaaatcacatcgcactatcgttacttgaatatattgtagatgagcaattaattaccaggataattctctatctatccaaatgtgcttctttcttgtacagcagagctagttcagattgttagttcaaggatcatggaaagccacaggagtgtgttgctggattcactagaagctgaagtgtcagaaccggaaaacatgtccactttagtcttttgaaatatgaagtggaatctgaagttattatcatttttaattttttctatggattttttttcccatagaatagaattctggtcgtggtttccccctccccaactctttccaggtcttccccagctctccacccatccagtgccacgccctttcattctctctttggaaaacaaataaacagaccggaaaaaaaaccagaaataatagtaatagtaacaataataatgatacacaatcaacacacaccataaaaacacaaaactggaaatcacactataaaaaacaaagaccactaagaaacaaaaatacccaaacaaagcaataagagacaaaagtctacaaaaataccattgagtttgctttatgttggccttcaactgcctggcattgggcttactcttaagtgtggttaacagacccaatgggattccactagagaaaactaatttttcctttgcaagctgatgtcaattggaaatagcttcttggttacagagcactgcatacccttgtcttagttagggttttactgctgtgaacagacaccatgaccaagacaggtcttataaaggacaactttcaattgggctggtttacaagttcagaggttcagtccatcatcctcaaggtggtatcagggccacatccaggcaggcatggtgcaggaggacctgagagttctatatcttcatctaaaggctgttaacaaaatactggctcccaggcagctaggatgagggtcttaaagcccacacccacagtgacacacctacttcaacaaagccacaccttctaatagtgccactccctgggccaagcatatacaaaccatcacaacccttctacccctctcggcactgggaccccatatgacttgaatctgtggagggcctgactatgctaccacagtctctgtgagtttgtttctacattaatcctgttgcatgtacatttggacatctatcctctctggctctaacaatctttccacatcctgttctgcagagctccctggaccataagggtaggggcttgatgaggatatctcagttagggctgagtgcttcaacatctctcactctatacattgtctagttgtagacccctgtgttaattctcacctactgcaaatgaaagcttcaatgatgactgctgagcaagaccctgatctacataggtataacagaacatgttaggagtcattttactgctctgttctttatgcatagcaatagtactgagttttctcctaggcccatagcctatctggtctcaggtttcaggttctcagccaacagagcagtgtcaggcatgggtcctaagttagtattcttaatattgtaattttttaacagataacagaacactgtcttgctgtatcgtcaggcttgtttgaagcctgttaatctgatgtttcagtgggaattcttgggtaaatgtcttcatgagtatgtttgaatacatgcatataccttcaatttgtgaccacattaacaagatgtatgatgtctattaataagtcacaggtgattagcccaaaggtcttaggaaatacacaaattacatccaagaacgaatcattatttttccgcagtagaatgccctttgaagtcctgattataacaatgaaggaatgctagaacacacttgatgagtgtagcttctgctgttactagaagacaatctcacagcattctccccagtgctcacagcattctccccagtgctcacagcattctccccaatgctcacatcattctcccccatgctcacaggattctcccccatgctcacagcattctccccagtgatcacagcattctcccccatgctcacagcattctcccccatgctcacagcattctccccagtgctcacagcatcctccccagtgctcacagcattctccccagtgctcacagcattctccccattgctcacagcattcccccccatgctcacagcattctcccccatgctcacagcattctccccagtgctcacagcatcctccccagtgctcacagcattctccccagtgctcacagcattctccccattgctcacagcattccccccccccatgctcacagcattctcccccatgctcacagcattctccccagtgctcacagcattctcccccatgctcacagcattctcccccatgctcacagcattctccccagtgctcacagcattctccccaatgctcacagcattctcccccatgctcacagcattctccccagtgctcacagcattctcccccatgctcacaccattctcccccatactcacagcattctcccccatgctcacagcattctccccagtgctcacagcattctccccagtgctcacaacattctccccagtgctcacaacattctccccagtgctcacagcattctccccagtgctcacagcattctcccccatgctcacagcattctcccccatgctctggcccttacaggttccctttccccttctagggtgtttcctaagccatgggtgcagggatgttctatagatgtatccatgattgcaattgcaaaaatataagagatgatatttaaaaatatagaataaaataattttatgagctttaacaaagagagagagagggagagagagggggggaagagagagagagagagagagagagagagagagagagagagagagagaggagagagagagagagagagaaataaagagaccaaccaggagaaaacatggatgttctactgatatccagaagaacagaaaaaaaaaataagtttgaaataccaagaagaactaagtttgaaaatatagggaaaggttaccaagtttttcaaactttgaagtatgataaaataaatttcacaggtgagcagccagggtaagaggcgcaaagtctttccctcagaccctggatgctagcccccagtgctaagaggatgaaatgagtgacttcctgttaggaagccatattataggccctccagtaatgcacagtgtgccctacagagcacagtgatgacctgaactgaatgtctagttgttgtgcaactcatgaaaactgagagggttgaataataaaatttctttactggttaaatgttcttcaacttcagaaaaatttagaattaggtatcaaaatgtgtaggaaaatccaaacaatcttatgagcagttctagtgatacatcatgtttagtaactgtgttcatattgtttaaaagtttctggcttatttattaagatgaaagacgaacttgctgattccaattttaaatgaataatggaagtctaacataattgtggttttaacttataaacagtttttttttaacgttggaccagagaagaggtttaaacgtcactattatttatattcatgcacttttgaaaagactttttaatgatttgttgtgggggtagcgcattcattctctgtagccgaatttgttcaaggacttgggtttgaacctcaaaaacaagcaagcaaaaaaaaaaaaagtttaatattaagatttgaggagaggtttgtttgagttttggttctatgtttattattttcaagtaggatcttactatgtagtccaggctagcctcacagagatgttccttagttttctgagtgccaggattaaagatacacatcaccaccccaagctgagggagttttaagttaaacaactagcacactttttaaaaagttcagggctggagcgctacctcagccgttaagggcttgtattgctcttgcagaggaccccaggttgaccaccggcacccacactcagtgactcacaacgacctgtaattctagttcccagagagatctggtaccaccaggactcatgggtatacacccccacacaggcacaccaggactcatgggtacacacccacacacaggcacacggacatacaaacattcaaaatgataaaaataaagtctttagtaaggtaaatattgaaaagtcagtgtcaaaacatggagcgatttagttaactaaacatttagttaacacaaatgtaattgtacatattcaaatgtcccataacagtagttaattaaactacggggggagggggggatgagatggttcagtggttaatgacttttgctgccaagcctgatgaacagggttccgcccccaagacccacatgacagaaggataaggctgactaccacaacctcttccctgaccttcagctttaccccaatacttgaggcatagcaagcatttagatgagagagagggggagagagagagagagagagagagagagagagagagagagagagagaagaagaagaagaagaagaagaagaagaagaagaagaagaagaagaagaagaagaagaagaagaagaaaagagggtgagaaagaggaataaataaataaaagtaaatataatttaaaaaactaaaacaaaaatgacttaggtttacaattagagtgacagccaggggagtgttctcttatctaggaccccattaggattgcagtccctcataaaacagactttttaaattactcaggcttacaaatataatgggatcagtggatgagctttctgtcaaagtgaagaaatacaggagacgtcagcttcaagcagcacctgtgtgttagtgaccgtgtaaacccagggacctgggctgtaaccccagtactagaggagggggcggggaaatggggcgttttagctggacaaggtggttcatgcccataaaagcagcacttggaagctgaaggcaggaaaatagagcgttcaaggttgtcttctgctacaagacagcctgtctcaaaacaaaaccacctcacacatccaaaagagaaagttttatttgggctcctgtctctgaggtctcaactcaagatcacttggcctgctaatctggattctttgtagcataataaggagggcttggtggaggctcatgacttgatgagcaggggagagcgagagagcaagagagcgagaatgagccaggatgccaactttgatgctttaactataggcagtacctccttaatgcccgcctcctctcagtagccaataggccactactggggacagtttgttcgaatcatagcaatgggaatgctaagttttaaattttaaaatcgtaactaggaactttctacaattttctacctttaataaatcacttgttaaactttttagcaaaaataaatgagggaatactattttctgatggaaaagttactttgggggcaaaaaaccttatttaacaaagtgcaaaatcctttgggaacaaagctcctcccccacattcaataaccaccatataaattcaatagcactaagaagtaagtttttgtttttgagacagggacacactgtttatccctggctggcctggaaatcacaaggtaggtcaggttagctttaaagttacagaggtctgactcccgaatgatgagattaaaagactataccaccatcatgcaagaaatacacttatttttattttttaattcacgttacatcctgattgttgacccctcgcacagttccttcccccatatcttcctccccttctcctctgagaaggtagaggtcccattgggtacccctcttccccccaccacacccccaccacacacacacaccctggtatatcaagtctctgcaggactaggcacatcctctctcactgaggcctgacagggtagcccagttaagggaacagaatccacaggcaggcaacagattcagggtaaacaaagagtatatatacaggagatctaggattagcccttgtatgctcttaggttagtggttcagtctctgagagctcccaaggatccaggttcatcttcctgtggagttcctgtccccttcgggggcctaaattcttcctccaactcttttgtaagagtccctgagctctatccaacatttggctgtgggagcatctacatctgtttcagtcaactgctgagtggagtccttcagaggacagttatgctagactcctgtctgcaagcacaacagtgtcagggagtggtgcttgccattggatggctcgctagttgggctggctattggttgggcattctgaaagtctctactctatccccccatccctgcatttcttgtagacaggataaatttggggtcaaaagttttgtggggagattggtgtccctgtcgctccaatgggattcttgcctgactgcagtaggtggcctcttcaggttcagtatcaccactgctgtgagtctcagctaaggtcaaccccattgattcctgggagctgcccaacccccatgctgggtttctggcatgtcctcaagaggcccccactcccacctctgccaggtgcaggtctccattcattctctggcactctctcctgtctctccctatacctgaaaggacactgtcaatgggacaaaatggcagcctaggcattgggaaatgatctttattatcgctacatctgacagagggctaatattcaaaatacaaaaacatctcaagaagttagacccttacaacccaaataacctgattaaaaaatggggttcatagctaaacagaaatctcagcagaggaattgctaatggctgagaagcacttaaagaaatgtccagtgtccttagtcatgagggaagtgcaaatcaaaacaaccctgagattccatcttacacatgtcagaatagctaacattgaaaactcaagtgagaatgtgaggactgaggatatggagcaaggggaacactcctctactaatggtgggagtgcaaactggtacaaccactttggaaaacaatttggcagttccttagaaaactggaaatatttctatctcaagacccagctagctataccatgcctgggcatatacgcaaaagatgccccgctacaccacaagggcacttgctcagctatgttcatagcagctttatttgtaatagccagacactggaaacaacctacacatccctcagccgaagaatggataaagaaactgtggtacatctacacaatcaaatactattaaattattagatacaaagacatcatgaattttgtaggcaagcagatggaacttgagaatatcatcctgagtgaggtaacccagtcccttaaggacacgcatgctacgtgctcacttaaaagtagacattacctttaccatctgagccatctccttggcacttagttcttatttcataaaatccatttttcaatatctaattacagaaattatattggaatgagttagtcagagcagctacatttccatcacatttctgtgttcaaaagaatgtgtttcaaaaaaaagtggatattaaccataaattacaggatacccacaccacactccactgacccaaagaagctaaacaagaaggaaggcacaaatgaggatgcttggatcgcatttagaagggggaataaaatagtcataggaggcagatagagggaggatagtatgtaggagaggggatggggatagggatgggagggaaggttcaggatcaagaaacgcattcagaatgaagaggaggccatgatggggagatggctcagtaaagtgtctgacatgtgagtctaatccccaatacctatgtaaaagcctgtgaccctgatgctgctggaaacacagggacaacggaatacctggagctcactggccccggggccagtcaatcagtgaggtcagggttcaggcagggactgtctaaaaagaaaagggtggaaaatgataaaggcagattgctgaccattatacacacacacacacacacatacacacacacacacactgggggtgaggagagacacagagagagagagacaaagttgatccatcccataatcagccttcaaacgctgacaccattgcatacactagcaagattttgctgaaaggaccctgatatagctgtctcatgtgagactatgccggggcctagcaaacacagaagtggatgctcacagtcagctattggatggatcacagggcccccaatggaggagctagagaaagtacccaaggagctaaaggggtctgcaaccctataggtggaacaacattatgaactaaccagtaccccagagctcttgactctagatgcatatgtatcaaaagatggcctagtcggccatcactggtaagagaggcccattggacaggcaaactttatatgccccagtacaggggaacgccagggccaaaaagtgggagtggttgggtaggggagtggggggggggagggtatgggggacttttgggatagcattggaaatgtaaatgaggaaaatacctaataaaaaaataatgacaagccattaaaaacctggctactatgtacaaaaatgaaacataagcaaaaagagataagaacctatacatgccatctctaagtttaagaaataccagtgtgctaccaagatctagggcatggcttagtcgtgtaacacctgcctagtatgtgcaaagctcgggggttccctccctaccactcaggggcagtgaaatcctgctagctctagcctgtcctcctttgtaaatccaactgtcagctgcatcaggggctgagctgaggagacggctcagtcagcaactcgcttgtcttgaaagcatgatgaccttggtcctatcctcaacattcaatgtaaaaagccaggcatgggtacacatgagcacacctcccagcaatgtggaggtgaatacaagcagacccctgtctctagggtcaccctagagctcaacggcctggcaatctagccttgtatggcaagctgcgagccagtgcaagagtgtgtgttgaccaaaggatggccatcatctgagaaatgacacctgaggtcgttctctggtatgcacacaagtgtacgcacacacacacacacacacacacacacacacacacacacacgcacgcacacacacaagaacataagctaaaattaccttggtgggagacaacttgccaagaactatcatgttttaaatcgtatatatccttggtcttggtacccctattgcagaacctattatatacacatattggtatgtgctcacgaaagctgtcacccatattggccaccgcagagatgtttgcactatcaaaaatggaataaattaaaaaagaaaacgctaaagctcatgtggggaaagaaaggcttattattagtcactgaaaataacaaaatacttctatggatcaagacgaaaggcttaagctacgttaattaaaacttaaataacaaagccaagtgaagagcattttgggatatgcgtccagtgtatactggaaaggtgaccggggacttcagtctgatctccagcatccatggactgctgtcaagggtcgtggcacacacttgtaatcccagcacttaggaaaggatccctgagtttcctggccagccactctggcataattggtatgctctggcccatgagagatttcagccatccttccagcccagagagaccctgtcataaagacagttgactatttctggggatgaacaaggttgttttctagcctccgcacacatgtgcgcacaggttcatacacccttacattcctaaccctctggacatgcgtattaaaaggaactggagcgtctgcattctcactgatgctggtttgtgaaactgtttgtcaccagaaaatacaattatgcaatttagctcccacttttctaagaaaaatattccatgtaaccataaactctgcaacctttctttaaaggcgcaagtcttatttccagaatatcttttaaaaaaattctcctgagaatagtttttcaaaaaaaaattattctatgtataaataaaaatggaaagccttgaaaataacaagggatactttgtgagaatgctgtccaaggactctggtaagaatttacatttcttatgctgcctcaatagaggtatgggttctgtgtgtcaaaaggactccataaaatcatgacaatttgtttaactcacagtaacactgcaagattttgctacacagtttgaaagacattaataatgtatgtcattctgtcattccttcatgaaacacacccttcactaaaccaataggttagttaacagctacagtgcccatctgtgtgcatgcaacactccatttgtagattcctgatgtatgcatgaagcatcaattcatacaatgctctccagaaccggtcaaaacaacaacccaactgtctggaaattctctggcgtgctattctgatggaaagggcagctgtgaatcacctggacttagcatcatccagagtcaaaatatcaaacagtatgtgttaaagataaagtcataattaaaccgaccgatgtgggtatcagcagcatttcttatgcaattgtataaccgggcggcttagaaatgaggaaggtccagatgtatcccgtttcttgctgtcctgttataaatgagagccttcctatttttctctccctggtttaaagcaaacttctctgataataaaagcttataaagctgggcgtggtggcgcatgcctttaatcccagcacttgggaggcagaggcaggccaatttctgagtttgaggccagcctggtctacagagtgagttccaggacagccaggactatacagagaaactgtctcggaaaaccaaaaaccaaaaataaaaataaaaataaataaaagcttataaaaaaaattcacggtgaaggataaaaaaggctcatcactacagtgagagctccaccagtacggtagtagtagagacagaacacacattggatttaaaatagcccgttagaaaaatgcctgcaagttcagaggtaacgtttatgcctagcacgtgcaaagccctgggcttgatcctcaacaccacaaaaggaattttaaaaagctcgcattaacaatttgtttatatattaacaacacatctctggtcaaagcaacaagagatttctttcctgggtacttagatgggcttctcttaggaggaaactcctggttcagttcctgggactgagcagtttaatctcaaagatcagtttactctgcattagaagggattatcgctcagacattaatagaatccatatttttcaggttgcttgtttacgctccagtttttatgatttttttttagtagagtctctcgtggctgtccacttagaacttaataagcccagagaaaattctagattaagaaaattaaaattcataatcctcagcataaaaaaacaacaaattaaagtttgagctcttaataaaagaggtctgagcagagaaacacgtgcagtcagaatatcagttaaattctgtttagggcctgagctttctgctcatggctgtgtctcctgtagaagctatgaacagatgcgcttttctctgcagctactcactctgggttttctcatgaattgtcaaaaggagtacttttaaatacagttgagcatgtaaggttgctacaacctgctctctctaatagccaccagaagtttcttttcctttaaactgagcattctgtagttcaaaaccaaaaacaaacaaacaaaaaaagcaaataaataaaatgtgagtattgacccttacgtgactgtaccagccttggctggtttgcaactaggtttttgcaaaatcagggcttttacccaacaatgactagtttgggttttggttttggcattgtggcctataagaacatctagggcttctagtttctaagttttcttaactgactggggacacatcctgaaacaagagtcctggatttctcttctcagtatttttcctccttctagcatggtggtttctgaaggtttgttaagatgtgtcatgttaatacaactaaacactgggtccaagtagcttttgcatttcaactttatcataaactgggtcagtctggtaaaacaagggggcttaggcatctgcaacctgccttgctcatttagaaaagagagtaggaattgtctacactgttctcatccttccttcaggaatgccccccctttatctcctagccaaaggaaaagttgaaagcacccatcactcttagggtttttgccctccacacttagtacaattctcaccccgaactccagttccattctgttcccttcagatagtatagatgttatatctgtttagttaacatgggccatggtccaccgagtctaagactctcttagttctgaaagacatcactatttttatgtaccactaaggaccaaaagataccaaagaaaaatctatgcagagggcatagaggaccacaaccatatctcaggccttgggaacctgagacacaaagatggtaagcttgaagccagtctgggctagctatgtagtgagatcttatctcaaataaaaattctatggctgtcatcaaaggtatgatatattctaatgtaaaatgcaaatgtaatcctcttacctcttctattgggagcatcttcctggctgtggctttctgtacctgagaagaatggtgttagaaggaaagtgatgtcgaactatacaaatcatttctgtgatgcgcatagctctaggaattcttctggaatgggtttgatgtattccctctaccctttgggtacttcatacttttgaacctctaatcactttctccattgatttagttataaataaagttcttgtctctggtagtaatgacaggaaagtcagaataatgatagggattgctattccattttaggtgagtactgggactttggaagaaccgggctatctgaattccctcctcagggaatggaatctacccactggtctgtccagctctatcactctagctgtgtctgtgtttctgcttagtgtcctgcttctactgggttccctacttgtatgtgagatctttattcctttgccttaataaagtggtggctataccatcatccatatcccaccattcagtgctgcactcaggtagtttacctgccaaagcccctatcctgtactggtgccttcaaggttaacattcctttattcacatcataagtttagtgagggcttctctcatttgaagaaggggcccagggcaggccatggctgctccattctctaaatgagcaaggcagtctgcagaccactgaggatcctcattctaacagactgactcagttgatgataaagttcaaaggcaaaacataaagggcttggggcttgagtaaaacaagcatataagttcaattttccttctttcactaagtactgtatttgcaatttaatatttgcagtgttttagctcaaagaattctcttatcacatacatgaattgaacatattttcatttatttatttatttatttatttatttatttatttatttatttattttaaactccatattttattcccctcgcccctgtccaccctcctactgctccacatcctatacctcctacccaccccctgtctccatgtggttgttcccagcccccatgccacctgacctctaaattccctggggcctccagtcccttgagggttaagtgcatcgtctctgaataaacacagacccggtcagctacttctgtgcgttggttgggtgcaaatatctacatctgactctctaggctgcttgttgggtcttctggaggggggtcatgctaggtccctttttgtgagtgttccatagcctcagtaatagtgtcaggccttgactttgacctgggtcccactttgggcctgtcactggaccttcttttcctcaggctcctctccatttctatccctgtaagtctttcagacaggatcaattatgggtcagaggtgtgactgtgaggtgcccctcccccacccctacctcacttgatgtccttcttcctgctggaggtgggctctataagttccctttccttacggtcaggggcgtttcattttatttgttatttttaatcttttttgtagaacattattgtaatatttcaactgttaatatttaacagacagaacaattattttaagatatgtctccctttttgtttctgattttattaatttggatactgtctctgtgccctctggttagtctggctaaaggtttatctatcttgttgattttctcaaagaaccagctcctggtcttgttgattctttgtgtagttctttttgtttctgtttggttgacttcagccctgagtttgactatttcctgccgtctactcctcttgggtgtatttgcttctttctgttctagagctctcaggtgtgctgtcaagctgctagtgtgtgctctctccggtttctctttggaggcactcagctatgagttttcctcttaccactgcttccattctgtcctcattttcattaaattctaaaaagcctttaatttctttcattatttcttccttgaccaagttatcattgagtagagcattgtttaccttccatgtatatgtatgtgtactttctgttgtttttgttggtatttaagaccagccatagtccatgatgatctgatatggcgcacgatattatttcaatcttcttgtatttgttgaggcttgttttgtggccaattatctggtcaggcttggagaaggtaccatgaggcgctgagaaggtgtatccttttgctttaggatgaaaagttctataaatatctgttaggtccattttgttcataacttctgttaatttcactgtgtctctgtttagtttttgtttcatgatctgtctattactgagagtgaggtgttgaagtctcccactatattgtatgaggtgcaatgtgtgctttgagctttagtaaagtttcttttatgaatgtggatgcccatgcatttggagcattagatgttcagaattgaaagttcatcttggtagatttttcttttgaccagtatgaagtgtccttccttatgttttttgacaactattggttgaaagttgattttattcaatattagaatgtctactccagcttgtttcttgggaccatttgcttggaaaattgttttccaaacttttattctgaggtagtgtctgtctttctcatttttcctgtgtgcagcaaaatgcttgttcttgtttaaatatccagtctgttagtctatgtctattttttgggggggtggggggattgagtccattgatgttaagagatattaaagaaaagtgattgttgcttccaggtgtttttgttgttagagctgggagcatgtttgtgtgactgtcttcttttaggtttgttgaaaggtaactttcttgcttttttctagggtgtagttttcctacttgtgttggtgttttccatctattatcctttgtagggctggatttgtggaaagagattatacaaatttggttttgtcatggagtatattggtttcttcacctatggtaattgagagttgtgcagggtatagtagcctgggctggcatttgtgttctcttagggtctgtatgacatctgcctaggattttctagctttcatagtctctggtgagaagtgtggtataattctgataggtctgcctttatatgttacttaacctttttcccttactgcttttaatattctttctttgtttagtgcatttggtgttttgattattatgtgatgggaggaatttcctttctagcccagtctattttgcagttctgtaagctacttgtatgtccatgggcatctctttctttaggttagggagttttacaagaaaatcaagaaggaagaccaacatgtggatacttcattcctccttagaatagggaacaaaacacccatggaaggagttacagagacaaagtttggagctaagacaaaaggatggaccatccagagactacctcacccgggaattcatcccataatcagccaccaaacacagacactattgcatatgccagcaagattttgctgaggggatcctgatatagctgtctcgtatgaggctatgccagtgcctggcaaatacagaagtggatgctcacagtcatctataggatggaacacagccccccccccccatggaggagctagagaaagtactcaaggagctgaaggggtctgcaaccctataggtggaacaacaatatgaactaaccagtaaccccagagctctagctgcatatgtagcagaagatggcctagtcagccatcattggaaagagaggcccctaggtcttgcaaactttatatgccccagtaccgaagaacaccagggccaagaagtgggagtgggtgggtaggggagcagggtggggggagggtatagggaactttcaggatagcatttgaaatgtaaataaagaaaatacctaataaaatttaaaaaattaaaaaggttaagggaagttttttctataattttgttgaagatatttactgaccctttaagttgggaatcttctctctcttctattcctattattcttaagcttggtcttctcattatgtcctgaatttcctggatgtttggggttaggagctttttgctttttgcattttctctgactattgtgtcaatgctttctatggttatcttctgcacctgagattctctcttctatcgcttgtattctgttggtgatgcttgcatctatggctcctgatctctttcctaggttttctaactccagagttgcctccttttgtgatttctttattgtttctacttccatttttaaatcttggatggtactgtttatttccttcgcctctttgattgtgttttcctgtaattctttaaggaatgtttgtgtttcctctttaagggtttctagctatttacctgtgttttcctgtatttccttaagggagttatttataaccttcttaaagtcccctatcaccatcatgagaagtgattttagatctgaatcttgcttttctggtgtgatggtgtatacaggacttgctgtggtgggagaattgggttctgatgatgccaagtaaccttggtttctgttgcttatgttcttatgcttgcttctcatggtctggttatctctagtgctacctaccctcacaatatctgactgggtctgtctttcctgtgatcctggttgtgtcagaactcctcagagttcagctgtctctgtgatactgtgatcctgagatcctgagtgtgtcaaaggtcctgggagtcaagctgcctctggcaccctgagatcctggtgtgaccaagctcctgggatcctgggatcctgtggtcctggacatgttagaactcctagaagtggagtttcttctgggtgttgtgagactagctgtggagttcgaaccgaaggtctgctcagggcaccagcccagaccagaaggctgaacatattttctgagccataaattagtaaacatgacagaagcacattgcgaggggaaaagacaaaccctctactgtaagagccatcctgaagagtcaggagtatacagcattggttcttgggtaacatctatttttggtttttgctttgtgtttttctgattttatgttggtggtattcgccagatcttccagtcacaggccaaaatggaatagttacatatgagaaaactagaacccataaaatgccccatctctccttcctcacttctcccaaagcatgtttgacaacacttcaaaggcttcttttatagaatcttcagactccaacattaaagaccagtgtttccactcttccctcaggaggatggagactgttgtacttgcagtggcctgggtagtgaggtccagtgtctttatactcaattgatctgtacttcccccctgtaaattccataagtgaaccctaagtggggccatcaccagtaaggctgtcaaacagtacaaaaggtatggtataaattcccaaagaattaaattaataataaaaaatatagacagtggtagtgcgtgtctttaatcccagcactcgggagttagaggcaggcggatcttgcctacagaacaaattacaggatagtcagatatagccagaaaaacccagtctccaaaaaccagataggtaggtagatagatagatagatagatagatagatagatagatagatagatagatagatagatgatagatggatggatggatggatagatagatagatagatagatagatagatagatagatgctaggtacagtgtaattgagggaaagaaagcagtatcatcccctggtctctataccacgagagagagagagagaaagagagagagaacaaatggcagctggggatgttaacccagtgggagaatagttgctagtaagtgcaaggtctcagtgttcaatccccaacataagagaaatagaggaaaatgtaatattgatatattatgcagtgttggtgcagcataaacagcaatataattatatatgatcattttcaagtaacatgtggtatatacgattgtatgcactctacatgtgtataattggtttgcttaaatgggcaccacaaccattggggcaccagtaagatctccattctgatcatatggtatcttttgtatgtgcagtcttttgtttaccagaacagcatcatacatgtcaacctatgcttttattttaagattatattaaacattaagtttactggatacatatgtgcatgggcacgtgtgtgtgtgtgcgcgtgtgcgtgtgtgtgtttatgcatgtctgaataaatactattttttccacactttcacatgagactaccactggcacaggggctctttcagataattttatgtaaggatttagagtgaaggaaggaggttaagcttggcatgtggtcaaagacagcaggcaaggaaggactcagagaaacacacgctgacaaacaaacaaacaaacaaacaaacaaaaacccacacatcacaaataagagcctcaagccagagatgtcagggcaaattgtaaagcaccctgaagactccctagggagactcaagatttccatccccgttcagaatacatcaactgaaatccaggtttgtttaactcattgtttctaagccttagcaatgcagtcaaaccccagagctcgctagcacaggctggaattctataatgtgtctgctttgggtgagaggccaatggaaaagttatttaacctaaacgacacagtaaaaaatccctttgctgaaagtcttcagagttaaggtgaaaaagttctcgggcaagaaacaatacatctactctgctgacgtaataatgtgagcgcgtgaccatgtgatgggggcagggcttggctagaagagcctagaatttccctttctctatctttgtgttgtttcattcattcgtttgtttgttttgttttgtttttgcttcctgtggttgtaaggatcaaacgcagtgcatcacacatactagggaggcatcgaaccactgggatatatccccagtctgacactgcactttaagatttcaagagaagacttttcagcggctttgaggatgccttttttttctttttctttttctttccttcttagtaaacagcctctatttatatcactttaaaaacaaaactacgtaatttatcaccctccacccatttcaactttctccaaatgaaactccagctaaactgattgacaacttaatgccccaaagccttcttagaggaactcagtaaccacgcatggtcgtcccaataatactgttccagacagtgatggggaaatggaaatcttacaaaaacgcttccagtatttcctgctggacaaactctgtcatcctctaaaaacactgaaacgggaggagagaggtttatggagtctgatgtggaaacatttttcaaagccagggctggctgggccaggttgagggtgcagagcctgtctcttccaaagagctgtttctcttctgtgagggtccccaggctcagttactcttcccatgtatgctgctgtctcggaggcagtctttctggactagtattttagttcaagaaacactccttatttggaggataaatcaatagaatgggtctacacgctaacctgtcattactcttttattttgaagctctgtgggagttaactccacccccacccgacccccccccccccaaaaaaaaaagtatttggaaaattcctagtgaagccacttgcttgttttgtgaatgacgtttgtggtcagctataacatatctggcatgtttcttcttattgctgcctttttcatgcatgtttttataatttgggagtttttatggaagtgattaaatattatttggcttcaagctggtgcagaaactgtagagaggcagagagaattctccctagctagaatccagcatgaacatacccatgctctcataacacacacacatgcatgcaacatttccaatgtacatccacacagtttcttgcttgctaagtagttctctctctctctctctctctctctctctctctctctctctctctctctctcccactcttccccctcccttccctctccctgcttctcttctcttctctttttccctccctccctccctccctccctccctccctccctccctacctccctacctccctccctccctcccttcccccctctctctgggaaatgaaaacagctatgatttccagctcattttaggtttgcttctaatagaggcggcattgttcacatgtccaagccttctgctcttacccagcattaatgttgtataaatgttgttccaagtcttgctcataacgattgaagtatttttgtagaatgtcaccttccaaactatccttagcgcttacagtttgaacagcaagcagccttgcttgctgacttgtataggggctttctttccctgccctagcctacctcccccaaaggcataaagccacagggaaagtaaactcttgtatgtaaatcaaagctggtgtttagtagttcccaaatggcatcccccgaaattaactgtttcttgctttattaaatcaattttatatagtagcatggaacaacaaatgaacaattttgagaaaaattgtagttttcttcttggcaaaattctgtcaatgctgagagaattgggatttatgttcagagaaatattataaggaattatacagatattagaaaaataaaaatatctaatcagtgttccatgtgtgtatatgtacttaaaaagagacagtgttttctgggtgaacacttcccaggtttaattaggtatctgtattcactggcatatagtccagtaatttggtctgtgtattgcttacaagtaaagggtggttaagagtgctgactgctcttccaaaggtcctgagatcaattcccagcaaccacatggtggctcacaactgtcaataaacatattaggaactctttttaacctgttcacattatctacttgctaaaacacttgaacaaattatctaaaattagtactgagcagattataatcttccttcattttcacattgccagatgttttggggtatatctaacccaactccacagtcataatatataaccaatacaaataccagcacctgtccctacctgggcttttatttccagtgtgagtaccagttaaaaccatgaacctcgccaggagtagtggcatatgcctataatcccagcactcaggaggcaggggcagggagagtcctgtgatttcaaggctagtctggtctgtatagtgaattccaaaacagaaatacctatgtagtgagaccttttctgggataacaacagcagcaccagcaacaacagcaatcatgaactatacaaagtaccataaaatgtataacctttaacacagagactggaggtgtggctccgtggtaaagcactaaactaacatgtgagcagtactaggttcaatccctgtcaccttataagagtccattgaatgcaaaaccccaagttacggaattctcacttgcacagcagaaaatggatagtatcagctgctttggaacagaaggtttttcatgtgcatgtgtgtgcagtggtcacacttatgtgtatgtgtggttgcaagtgtacgtgggtgccactgcacatgtgtgtgcatgtatgtgcatgcgtgtgcatgtggaagccagaggatgcagttgggtatcttcttctgacattccccatctattggctgaggcaaggtctctcacttgaacctacagttcaccaatttaactcctccagctatccattttgttccagtaatgccatctctgcttcctctctgccagaacagcgagagggccacagtaacctcccaacatttacatgggttctggggattcaaactcaggtctttacatttgcagaacaaatcttttacctgggagccatctcccccagggaaaccaggttcttttatacaatgcctcatcatgcatgactttaattcttttttctatgacatataaaatgggcattttgcaaaatcagaagaatgctaatgtgacattaaagaattgaggttataggtttgtcttttgccataggataggcagtgtggtgttcagtactagacagcagataatccacagtccagtgtctttagaaaagagaaataatggtaggttgcaaaatgagaaaaatcgaactttcatctcccttgcaatgaatgaatgatttcattttatttcctccccagtatttgtgttctttttagcatcttagattgtatttttttaaaagacccacctagttaggtaatgagtattttttttcttccttagttaacataatatttttttcaatatgcattttattttatttcttttactgagttctgatttacattacaatgcagcccagaagctattcaataaaaatgaattgcataaattctccaaaaagaatatgtcagcagcaaaagttttctagttcaaagggcaagttttccacttgatttatatccggtattacttttttataaacaaccttccctcccttccttcatgttgttctctgtgttgggatggaaggccatgtctctctgtttcgttcagcagtgttgtgattgctggccattcctcagctaaaaagaaccagatggccatgaaacactaaggtcccctccaagtctcttctagacaagtcttttacatagagcacaagggtgctggcctaataccagtgagagcattacacaagccaaacatcatgccggctaagtcagaaggggccacctttcggttacaaggaatcaatttgcttaagaagaaaatattctgggctggagaggtggctcagtggttaagagcactgactgcccttctagaggtcctgagttcaaaacccagcagccacatggtggctcacaaccatctgtaatgagatctgatgccctcttctagtgtgtacttatatataataaataaatgaatctttaaaaaaagaagaaaacattatagagatgagaggttctaagtcatattaatatattacaaaggacaccaaaataatttgctggctgcattaaaatatctcaggatatgttatatataaatatatatatatatatgcatacatatatataaaaccatttttattataatgcagatatttagagattacacgttcagagaaaagaacatagctaaatcccaaaacatcttaacagtgaacacattgcagataattagaaactaggtaacattagtttcctttttaaaaattggattgtctctctgtatctcagagtcggtgccctccctttcctgcagtggtccctgagccttaggtatgggagttatgttatgaatgcatcagtttggactgggttccacaactctacactttgatcaattgtggctttctattgtggaaagattgttaagaaccagagaaatagggagttcttttttataagattgtttgtctcctaaaaaggtcagaaactatacccataatgtctcaccaacacagccacctaaatgtgacctgaacatgaaaaatgccgcatggcaagctgatgtggaaaagggaaagagcaggtgacctcaaccatagacaaggaaccaagggtagctgaggaacgctaagagttggagaaatagtcttccccagggaagagcacacttggttaatatatatatatatatatatatatatatatacatatacatgtatatatatatatatatatatatatatatatatatatatatatggtggctcatggatagatttggagacacaggaagggaagatgatgtaattatattataatttaaaaaaatatttttttttaaattggattgtctggatgcttgggtttttgtggttgttattgttgttgttgttgttgtttgtttgtttgtctgtctgtttgagataggttatctgttgtagctcatagtagcctggaattcaaaacatagcccagcctgccctcaaactctcaaaccctttgcctcgccttcttagtagaattgtgtgtgtgtgctaccatgcccagcatcttcctttgtgaaatgtttttcaggtcacatcttataagttagaaagatttggggtgggataataagagtcacaaaatgatatcctaaagttgacaacatcactagccgtgggcagactgctatgcaaaaagttctttaaccctgagtgagatccaacttcatcatctgttgggtaaggatataacatccctacttacgagatagacgcaagactcaaacttaagtaaggctagagtctattaaactataaaactacccaggaaaaagtcaaaactgatgccttctttatcaagataaaactgcttgtcaggcagcagtggcacacgcctttaatcccagtactcgagaggcagaggcaggaggatctttgtgagtttgaggccagcctggtctacagagtaagttccagtacagtcagagctacatagagaaattctgtcttgaaaaatcattaattaaaggaagggagggagggagagagagggagagggagagggagagggagagggagagggagagggagagggagagggagagggagagggaaaaggagagggagagggagagaaagaaggaaagaaagaaagaaagaaagaaagaaagaaagaaagaaagaaagaaagaaagaaagaaagaaagagttgacaagttctatcagtttcctgttcctgtcccgccatacaggcgcttttgacgattatgtaacaagacacaaaagaaaatgttcgcgacacagtcaaaacgtagagcccgatttccaaagatgcttcggaaagccaggcttcttggaacttgctttgtacacaggtgtcctgacttcccgaagcctgaaaggcggaaaaacagactctggaatgtctaatcagacaagcacatgacagagacaccgggtggcctcttcctaaggcccaggaaccaacagactttggacctatttgttttcctcactcccagtgccttaaaccagagcggaaagcctgggtcatttcgcaaatcacctgacttcaaactgaaatcagtaacctagagaaacaagtacttcgggagcataggggcgcccaaggggcttagcctacacgttctgatgagatctgatgttgaatgattaataccaccttattcatccccgaccccaggaggtgcgcctctgcacacattcaaactccccaggtgaaggacacacaggaaagagccaaacacaaatctaaagaatgaggttacaaagttatctctagcatccagctgataactcagcagcagctagcaggtagaaaatgacaaggaacaaaagagagggagacagagaaacagagagacagagagacagagagagaactccatggcaaacagtggagcatgatttccttcctattacaaaacactttggttataaacaaaaacagaattatacgttgagtccaatccacatatacagatcactctgccttgcccatctcgagtatgtttttgtttgtttccctatttgtttctccttttcctctatttcctttagatttgcgcgggggggggggatgatttttttaaaaatttaagggtttaagagttagggatttagttcagtggtaaggtttttgtttagcaaagccacagccaggttcagtcccagaatagaagtgaaatggatatgtctcatttcacccacaaatccactgtgtcgctaatataacgtattagtaataaaccttaatatctacttatatttcaatttctccttctcagaaatgcccttcagcaattggttagattctatgagacacaaaattgcttggttttgcttcctttccagtccctctgagtggctggagaagcaggtcatttgacctgtagaataggctgcacgctggatttggctgggtttagctgggtttggctggagcgagctcacgtgacttgctcccttacccttgcgattcctctagcctgataggtaaagctagtgtttgaatccatgtactttgtattgtttttacaaatgactatgcagttccctactttctcacggaaaccatctttttaaaaagcttaagtcagaaggaacaaatgtggcttgtctgtgtgaccaggatagacgctggcagagatgaggcacgtgagggggggcgctagaggttggggggcggagatcagtgatacattgcacactgcatggatgagaccctgggttccacaaagctcacaaacacatacactccacagagaaaagaacacaccaggtctatattctaaacctactagaaatcagattttcaaattgagcaaatgctctctgtctccccctgtgtgtctctccttacatgtctttccctcctccactgttccccctgacaccacttccacttctatctcaattctttcaagcttttattgatcaactccatgttacacagcatgtatgaatgtctgaactgctaaattattgcttttagtattttaaaccacatacaaatggaattatgccttatgtgtccctccgtaccttggtctgcctactcgttccatcttcgctcacacaaacagctcagagtatctatccgtctacagcactgccgccatagtgagggcagtgaagttgtctccagcggcgaaggcaccatagtgtgctaccacgtttaaactgttctcgatttttgctaattatttttttttctcgtttattgagacagagtattatgtaacacaggctggccttgacctctccacgtgggtaaggctggccttgattcttgatttcctgcctccacctccctggtacaggaattacaagaatgtgccatcctgctctggtagaattcttcaacacatttctagggaatgaatgggaattccctccaggctgtctgaaaagtgaaatttgtgggtttaggggtaaacttgttttcaaatgtatttgatatttttaaaactttaagtgtcagaaaaaatgaagtgctatcagcaacctagaactaggtgctgagaactattgctaaccctttaggtgccttagcttatctaatctgatagcatatggggaggatgcttcgatatttctctttttagaagtgagtgctattccacaagattgctaaatcacagagctgggatttgtacctcagcatattgtgtctagagctatactaaatcgaaagcaacatagtaaaagagcaagacattctaaccaaacggcagtatacaacacacaagagacttcgcagaagagaccacgagtgagtttgtttccaccaaccatacttgcaaagacaacatgtccaaagaagcatcatttgaggcactaagaagacattatttgtagagaggcaataattcagttcctgtttctgtctgtggataaggagcgggatggaatccacttgtcatggcaaagcttcacttatttagaaggaggtttacacagctctttgccaacctgctgtacaggtgtgaggtcagcctagtcctaactgtccatgcccgttataataaggctacactgggatggctcttagcaattcttatcgactgtgtcatctcttgtcccagtggccctgatgtggacactcttccacttagcaatgtctttctcatgaaaggaaactcttttctaagcatagacagacaaatgcaggatacagagaactctaaaatcgtctactgaccactagaattatggtcatggcagtaagagcagaataattctagattgttcaaggatgtgggttatatcctggctctgtctttatctctgtgaaaagaagtaagccaagatgtttgtgcttaggaacaagaatacttggactaaccagtttgaccatgatgttgtgaggatacatatcacatgagaacaaaagacacagataaaaatcttccgttaaaaatgggcagaaagaatgtggaatggccataaaccttaggtactgtggaatttaactttattttatagtatgaggtcctttgatgacctagtaaaagctacaatgtgcttttcctaggaaatgtacacacacacacacacacacacacacacacacacacacacacgttcctaaacattgagggaattaaattactctgcagtacaaaaagtgtcttatttccactttccaattatgaagtgactttgagttgagtgtggtggtacatacatgtaattctagcagatcagagaaaggaacagagagaatgcttcatgtttaatgctggtctcctccatataatgagctccagaccagcatctaggaatatatagttgaggcccccatctaaagggtagtgacaccttttggctgggatcaatagtatgtcctacagtctcagccctgaggcaggaaggcagggggtcacttgagtccaggagtttgagccccattctggtagcatggagagaccacttctcaaatttaaaatcaacaacaacaaaaagtgtcttttgaggctttgaatgtgtatatcatgtgacgttggtcctgggttcaaaagcaactgttgtatttcagagctgaagagactaaggttgtctaagctgcaccttgctgggatcccccaaactgtttggattaaactgaagagctgagacaaccggggcctcatcttcacagtggaagaagaagatgctgtcctctatttgaatgtgccccccccccccatgcaaccattctccattctgttaaagtagccctcacccctgtgataacagctggggcggccaacccaacaggcagttctagtcacataagcgcatggcttcgtaatgatggggcgtatggtattagtgctggaaatacctttttatttcttagaaaataaaagcaaacaaacaaaaacaaaccccttttttgagatgggtttctctgtgtagccctgactgtcctggaatgtgccctgtaaaccagactagcttcaagttgagagatccaccaacttcttcctcctgatggctgggattaaaggtgcctaacactaccacctgtcaataatttctaataatcagtacctttgtaaggaaaaactctgcgtttcacattttttttctgtgttatttacttcactttcagcatcctagtatcctttcatgagtgtgaatttactggattgtcaccaaaagccaaaataggatcaggagatagggaaacaactgttttacaattgggtcgctgaaaactaggcttgccagcctctcaggtgcagaactagtagtttgtcccagatctggtcccaacttctggtctcacttgttaaaccatggaggttattgtgcatctaatacagtttcaattttcaaacagccactgggcaccttgagatcaaaggacaataagtacaacttcagagaaagcaaaactgcccccacactagaagtctattagttgatcacttttctggacagttttaaacaggggacaagatagagttgagaactgcttcccaactcctcccaggtcttacaaacatggctgggaggcctgaactttgacctgtgtctgctattccatagcaaaggccagagtggaaaccataaacctatatgtttatgtcaacacaaacggctactgtcagctccttttcttgaaaacaaacattgacaggtaaggggccagggatagaagctatcactggagccaggaccctgcctggggcttcagagagccaaagagaaaaaacaaccgtggggctttgattgtgtaggattctgcttctccactcttctcatcccacagagaacaacaaaatcaatttcctcttgccctcctgggggaaaacacagtgtttatcaacgtgttggccccaaaacctcagaaccagaagaaccacaccaaagtgctgttgagcaatagattccaggtacttcacacatccgggatccctgacactgcacctgggaggcaagatgactattgtgaatgctaaagtctgagctcccttgggaatagtaatggatactctgagagtgtgtgcgcacattgtggtgtatatgtgtatggtgtgtgtgtgtgtgtgtaggatgtgtgtctcaggtatgtgtgcccatggacagacatagagaactgtatactctgtttcagctaggcttactggccacagagctcttggtatctccctgtctctatttcccaacaccccaaggctctaattaacaagcatacacaaccatgcaagccaatgttgttatttgttgtttgttctatggatattagagattcaaactcaaatcttcatgcctgcataacaaacactcttatctaccgagctatctctccatcctccattgaaagatctagggctatgccttcataaggatgtttggggggatttcttctgcaccccttctttttcttatcataaaatttctggatttatatcatacatttttctagattgcacatatttcccttccatgtactgacgctcctctgtctctggacacctctcatttctttacctttgcaccttcccctcaattacccccacctcttccagagctctggtgatctatatcttagcctagtttctattcccttattatcctcaagacacatccatacacatatacaacactatacatataggtgttgctatttcttttcactaaaatagaaactcaaatttccctggtttctgctttcttcccacccaacaaaacctgatagaaaagctcctaaactcttaagattcagcttcaatttgatctttttaaaaggtggcatgtgactcaacaccatgtgtgaaccgtgacgtgactccttcttgctgatggacacactttgttttcaccttcatatttctatgaacactgaagcaatcagcatctctgtatatggtgcttgctttctgtctggttcacagattcttttttttttttaattagatattttcttcatttacatttcaaatgctatcccgaaagtcccctataccctccagagactgccccacccggggtccatcccataatcagccaccaaaaggagacactattgcatattgtccccccctccccccgtcctgctctcctacccactcactcccacttcttggccctggtattcccctgtactgggtcatataaagtttgctagaccaaggggcctctctttccattgatggctgattaggccatcttctgatacatatgcagctagagacatgagctctgggggtacttgttagttcatattgttccacctatagggttgcagaccccttcagctccttgggtactttctctagttcctacattgggggccccgtgttccatcctatagatgactgtgagcatccacttctgtatttgccaggcactggcaaagcctcaccggagacagctatatcagggtcctttcagcaaaatcttgctggtgtatgcaatagtgtctccttttggtggctgattatgggatggaccccgggtggggcagtctctggatggtccatcatttcatctcagctccaaactttgtctctgcaacttcttattttattccctattctagggaggaatgaagtatccatgcgttggtcttccttcttgattttcttgtgttttggaagttgtatcttgggtattctaggtttctgggctaatatccacttatcagtgagtgcatatcaagggacttcttttgtgattgggttacctcactcaggatgatatcctccagatacatccatttgcccaagaatttcataaattcattgtttttaatagctgagtagtactccattgtgtaaatgtaccacattttctgtatccattcctttattgagggacacctgggttctttccagcttctggctattataaatagggctgctatgaacatagtggagcatgtgtccttcttaccagttggaacatcttctgggtatatgcccaggagaggtattgctggatctactggtagtaatatgtccagttttctgaggaaccgccagactgatttccagagtggttggaccagcttataatcccaccagcaatggaggagtgtttctctttctcacatcctggccaacatctgctgtcacctgattttttgatcctagccattctgattggtgtgaggtggaatctcagggttgttttgatttgcatttccctgatgattaaggatgttgaacattttttcaagtgcttcttagccctttggtattcttcaattgagaattctttgattagctctgtactccatttttaaatggggttatttgaatttctggagttcagcttcttgagctctttgtatatattggatattagtcccctatcagagttaggattggtaaaaatcctttcccgatctgtcggtggcctttttgtcttattgacagtatcttttgccctacagaagctttgcaattttatgaggtcccatttgtcgattcttgatcttacagcacaagccattgctgttctgtttaggaatttttcagattcttcttcataaggtagaaaacgggctacgtggttgctatcaacgttcttgcagggctgtgtgccttttatcattttatttgcaatgctaagtatattttaatttttgataactcacattggcttggttgctaaataaaacaatatttatttgagtgataaatcatattaaaatactctcttcctttattacttgtcattatgtacaaagtgtagtgaagtgtgattagctatataaatatatgatattgaattttatttatttgtatttattatagtttttgtgtatgcacacgcatgcatacttgctcatgtgtgtggaaccaaaagcacaacttttaggagtcagttctttcctgtcatgtgtgtcctgcagctgggactttgcaaggactttgctgcactttgccaggctttgcaaacagcaccatcttgctggcccaatattgaatgctaaatgtctgtttcaaggtgttccagtttccccaagtattctagtggcatcatcagagtttcactattactacaggccacatgcaaatagattgaatcctgtggcatcgtaaggaatgtagcaagaaaacaaatgtcagaaaaccgaaagacaaaaaaaaacctgtcttccaaggttccaaaaatattctcagagagagagagagagagagagagtcagagacagaaacagagagagagagagagagagagagagagagagagagagaggagggagagagaagaagggagagagaatgcggagggagggaggaaaaaagcagagttggatgggatgaatggataacaaaaataaagaccaactcccaatatttggttatccctgtcagcagttgattctgatggcatctgtttttcttcagtgttaaatatataggattagtggagggcaaggaactttttgtagaaacaacagtctttttgtttgtttgtttccttttggggattttcttttctttccttttcctttctcacttgacagcctatttatttatttatttatttatttaaaaaattgaaaacgcagaaagaaggaccttacccgataaatctcagtcaactcttctttgatattttttttcccctcttgaacttactcatcctcctgccccagcctccagaatagttaggactagagacagatcccatcttgccatgcttgctttgtttggtttgaatagctctatgtgtccaataagcagagaagtggacagtttccttgaggccgatacgatctatcgttcacgggaaataagcacaattcaaacaggcagtgtgaggaacactgagcagctgaggaataggcaggggtgaggggtaggagagaaagggccagacgtttgagctaagaatcgacagttttcatcatggaagaacagacatacataggatagcctgcataggcagagctgctgtgagagtacattccaggaaaaccttaagagattactttaataataaaccatgcattcttcagcaagctgtcacgggattaactacccctttctcggctgggaacacagtccagactccaccccaccctaccacagggcaggtttttgtgcaaacgactgtccttatgtggggaccttggtttataaagcactgcatttaatttttttcctactttaattctctaaacaaattttagtggtgatgaacaccggggtggactttggtgtgtgtgtgtttcttatgtggagatgttcattttagacttactgaaaagttatcaacttagatgtggtaggaatggtaagaaacaggacctcctgggataaaaagagttaaatttattttcatccccccccccccccataatgtgagcaggacattgaactactgccaagaccaatatcagcaccctagaggtataaaaatacactgcaaaaccagaactctctactgtgggctctttagatttctgtctaacacaagggtgttcgctttaagcagccactatgagcctgctgctcacaaatgagctctttgggtccacatcactgcttcacaactgcagttcacagcagatgaaatcgttttctttctctggtttctaaggcaaatccattccatctagtgggagcaagttaacacattttgataataatctttcaactatatagataaagacaaaggcctaagtggccacttccacattgagaaatgattcatgtctgtctgtagacttgtttcttttatattatcagagcccctgtttgtgtgaatgaactacctttttttcccctaatttttgaactttttgaaatgacaccatttctctagactactagatttgagaatcaaagtgtgatgttctcagagctagcagaattaaagttcgcacctatgtcttgtgccttcatagaactgaaaagtagaccttccatcattcactgaaaatcctttttttttcaaccatagaaaattacctcagaggaatattggaagcacacacacacacacacacacacacacacacacctctactctgcacacccaagtgtgaagggaatccagaggtcaggtaggggcagcacctggaccagctgtgttgctctgtgtctcttactctccctgcatgagggctgctccaagcctgacctacttgcaagcagaaactgccactctcattgagctacctcaaattacagtgattttgcagctggggctaggcatggaccacaaaatacatccttggtgcaccataagcccaatttgaaccctggattctcagtggtaaaatgcaaatccattgtgttgcttactcaataaaatcaataacccgtttccatccaagtcacaatttgtcattttcatagtcagtacattctgcttacaacaggggaggaggggcaggagggagagggaagaagaggaggagcagaaggaaaaacagacaagaggaggaggaacaagaaaaaaaggactaaataagaaagtggaagaggaggaagggggaggggaaggagggaaaaggggggaaggagggagaagggggaggggaaggagggagaagggggaaggagggagaagggggaggggaaggagggagaagggggaggggaaggagggagaaggggaggaggatcttcccaaagcttaatttcttaagtacttgaaaagcaccactgtttctgtgactatttaacaattgtcccctgactttaaaatatacagaaaagaaattgtgagattctataggattcccaaggtctgctctgccgggctatccacagctgagcatcgatgaaacaccttccaatacttattcacatatctcaatattttcatgaaggaataagaaatgctgtagaaactagcagacaaagtcatgttatctacgtgtgggtggatatacactgaaatgatcacaaatgtagatcatttatatggaggctaacttgttttgtttaggccagtttaatagcgagaatatgctcgagcgtgatattaaatttcaataacagggcatctttttacttgggcacacatagatttccctcctgtttaagcacgttcacaattaaagaatagtgattttctttaaaggtaacaatccagtcacatgcccagctttagaaaggacagactggacccgggaacggaaagtcaggagtaaaggcgcgtctttgttcaaaatgccccaggcggtttaggatgagttcgcagttcgcgtgccacgccactcgaagtggcaatccagggaacggatctgcgaaacgcagctcagaggatcccatccttttcctccagaatttcccttttcctgtccttacgtgcaccctttctggcccaaggcagtgtggggctcctggcccgggttgtgtgcacgctcctttttccgggtctctgcgatcgcccccagctggccgggcgcacggggcgcaggaggcgcaggaggcgccggatctccgtggctttagttcgagttaataaacagttaagtttggaagactcggcagacacgttgagggggagttaccaagtccaggcagcaaaaacatcccgccgccacattcctggagagtcctcagagccagcatctgattagaaccatatctctaccgggagtggccgcgcggctatttaagtggcgttctccgcgtcctcggcgctgcagccttgaggcttcgggcgcggggaagtcatgctggctccacagaagcactagctagtccgtgagtaactctgccatcccccttcccttcggtcccttctttctttctttctttctttctttctttctttctttctttctttctttctttctctttttttccttttttttctttttttttcttttttttctttttttgcgacctacttctctcctttgctggctcctctcttcccatccctgccttggctgcagaccttgggcgctggggaaatcttacaaatgagacagtgtactccggggagagcagcgggttttgtggcctgacatctgtggaatgcttccaaggaatgcattttacctttggggtcggactcaaggcgcccatcctgtgacatttaacgagtccctgtgtgtgtgtgtgtgtgtgtgtgtgtgtgtgtgtgtgtgtgtgtgtgtgttgtacacgagccctagtttttagggcttaggggacatcccagggaatgcgcggtgtggctgctgaccacctaataaactcctgaatgatgttcagttttactgtgcgacaaaggctggggacatggtctgtgcctccgaggagctattttctgctgactgacagcacagggcattaaaaatgtgaactttgtcttataccagcattcctaagaaaagtatctgcccaagccacgtaacaaacttgttttaaatcgtgaagcgtttgaatgctgtttttcttgactgttgtaaattatttggaaggattaagaattcaagaagagggactaaactgtgtttaaaaccttggagaccctgccaacgtagcggttctctttgcggcatagagctggctgttatttcttcctgcctgctctcctccacttaatcctgagtctggaattcagctctgtagtcggtttcagatgggagctgtgtgaatccgaagggaaatttaactggattaaaaacagttaaaaaatatggatgttatctccacccgaggcaccccctcccaccctttcctctttcttcgcctgtgtttggaagaaagggagccaccctgtaaaccgagaagagcaaaaacgagcaagcttccaggcacatggaaagctttaaaaattatggaggggcaacttcatgaatagtaaatgttgctgttgctctataaagatgaaaaaatttctggccctaatcaggcaaagcaggaggggaagggtggaggtagatataactccaacctaagtaatggcagaaaatttgccaaaatcccttggagatagctgataaggctccaggaacgcttctgatgggatgtctaacctacctagtttacaatcttgaggcctgggttctgcacatagtagcagtgactggttgtttagaaaggagggactagccaggactcgggagccactgctaccaaatggcttttcatggtgctatcttgtcctggattaggctgccctgttttagctagctaccccacccaccaaggactctacctctctccactcccttggttgaggcagggcacagcagtactgaaagaaatgtactggcttgagaatttaggagtgttggggattcaggctttggagaggaaaacagctatctagacaaagcaatgctagaggaacacagctcagaaggcgagattagcaagagcccttgagaaagcaccagagaggtgtggtggtctcttccagcactcgcatcagacacagaccacttcttccctagttcgtagtcactgtctcctaaaactcgctgggttcttcccaagccttgtttaaaaacctaatcacaaaccccttcttcctctactgcaaactcaagcccttttgtccaaccgcgagtctagaaactttttccctgtaggctgctatgctccgtctttgccctgagttctggagaaggaacccaggaccttgggcatgcttgacaagccatggagctgcgcttctcaattcctggttggatggtcttactctgtaaacccagtctagacttaaactcatcatcctcctgcctctgcctcaggagccctaggactgtaggcggaggtgagcacacctcgctaagctgggccacttgtattatggcagaagagagagattgtggaggaatgggaggaatgtgttctgtctttgccctccagcacccatgtatttatagaactgatgatcccgattctattgatctccacctgaggatgtaaaggaggctgggaagataaccacaggatgcttttaggccttgctgacttgagaagaaagaacaaaatccagaggttagatctctctctctctctctctctctctctctctctctctctctctctctcctttcctctttttcttttggcattttgacactgaatcccaaaacttatctctcttctcagtgggagattgaacaccccccccccccccagtcatcgagtcctggaatcccaggcgagcgccaccacacccagttcagagtttgcatttctgctaaagacttaaaatttccaaggttaaactaagtctaaattcctgtccttgggcctatttatttcttgtcttcctccaagggttaggtggattttagctcactttgaagatagttgttgacgtggtgaatggtgcaagagcctccggaagctgtggaccaactggtctggactgctcagccatagttctgttacctaaaaattaaacgagcaggaaaacagggcttgctgggtggcttgtagccaccaggaagttttgtgggaaactgtgctcctggtgagaccatgaggaagtcccttcttcatttctcccccagactaaacctatcaccactttgatgaagccaacttggaagtaccctgcgtttcttcgcctcttctctctgttggggtttcattccttttcttctaggacagagctaggatactggaatgggtggagaggctgctgaagggaactcactaacaacctaagttcctccagctgaaggcttgcaagggtccaccatttaaacctccctaccctgggcagaattaggctgggaaccagactggcaatctgaaacacctgagtagcaggatgcggctgttttgggttttgggttggtttggcttcctcctccttctccttggagttgtaataaaagttgaagcactgttacagaattgcagagggcggcccaagtctcatttagatgacaaagtattcacatcagataagtgtgtttaagggaaagctaaattatggtaagatatcctagtgggttaatcatagcaatcagaagggaagcaaatgaccaggtctcctgctagagacaaagcccaaacaaattcctgattaggggtacaaatggtgctggatatcttaaaggcttagcagttcctatatgcattcatgtgctagccgtgtccctccttctgccaacacagcccagttgggtagtagttgaaagcatctgcacaactgttagtaaaatgaccgtggacacacagaataacctctcggtaattctgttttcttatctggggaagaacaatagtacgaagggctgctgagaaggtaagttaatctatatccttagaatactttattctgtttgtctatttgtttctgccctgtgaacaattgaatcaagtgtctttgtggcccctgagagcaagtggagaatttcttaatcagagtggaataccacccacctatttgaaaaatggtaatcattcaagtattcaatactaaaaaagcctgtgtatttgcttgtgttcacgcaagaacagacagttactctctgttctcagtgtggaggactgctatttggtttggtcagaatgacctctggtctcatttaaatcttccccacactctctcagactcccaacagagaaagagtgacccttctcctgaagtcagcattctagccaaggaagtgggaaagggagggaccaccctgactaagcagtgactaggccaggacacgggccccaatactatcttggtccacatagctgggcaggttgccatggttactccccttcctgcatctttccaccaccctggaaggaaacttgccttctctagcacaagcagaatctgaacaaattgcttcctgctctaaaaatggaagttactaagtgaagtagagcctttcgttactcatatggcccttccctcacccctcaaacttgttttaattctaatatagactttctaatctttgctagctctcacatcatctagacaacacaaggcagcttataaaatttcagttattacctcagtacagaagttgcttggcaatttctttctcctctttaacctgcataaactagctgggggcaagtgacctgtggctgatctaagctggtaggaattctcagtaatgggtcatgccaatttacggtttagttctcgggaagttaccaggaaacagaaagtatgaagaacatctcagatttttcaagaaatatctgagtaaagggtgagggaaaaacaggaagtaaggatactagaatgttgggtctctaatcctgtaagagctaagagttgttgcaactgtggagtgggtgcctatgtgtagaaaaccctggattcaacccccaacactacagaaaaggaaaattaagttaaaatgctcttaaacctggaagaaacttgaatgacaagtaggtttaataagccttgggagaaagcaaagctagtaaaagctagtccgtttcaccacagtgatgtgatgtaacacattaggctgaaaaactctgctctctgcagaggacataaactgccacctgtaagctgatttgtaacaaatgaagtcacctgcccaagactgcactcttggggtgtgattcacagctagagagatctcttcttcttcttcttcttcttcttcttcttcttcttcttcttcttcttcttcttcttctcctcctcctcctcctcctcctcctcctcctcctcctcctccttcttctccttctcctccttctcctcctccttcttcttttaaaggtttatttatttattatatgtaaatacactgtagctgtcttcagacactccagaagaatgcacatcagatctcactacagatgttatgagccaccatgtggttgcagggatttgaactcaggaccttcagaagagcagttggtgctcttaaccattgagccatctctccagcccgagagaccacttctgagaaaggttctcagagtgtggtctttccactccagatggactgaaccaagctggcagaagggcttacccagccgcattctacatacctttcatttgatctaagagtaacacttatattatagtccagctttatgatccagtcacgcagtggaaagcctaacatggtacttcatctcctgccatcatggaaatagtaaagcaaagctatttaagtatgtttagctgcatcttcggttgcaaagagatgagacagcacatatttatgttttacccagaatcccaacattgctttcttggtccaaagaaaactattgtaaaccttagttttatgacattgctgaacatctaaatcctttctcctaggccaaagttctttaaagagtataattaatgtcacttaggagactgtctcagccaacacttttttttttttttttctaaaaaggactccagtaatctacatcattacccttaaaccaggtggctttttctacctcatagcttttacatttgcttttcatgccgtgtccaggagcgcagacaagagcctccactgtaaatacactatctactgcacttgagttttagagagctgtgtgtctcaggaaggatcagtccattctcccatttaacttctataacttgtaattaaaaaaaaaaaaaaaattcctggactttgggtttagctcagttgctggagtgcttacccagcatgcacaaggctctgggttcagtccccactgctgaactaattgtagctcatactagtaattccagcattggggaagtggaggcggggaaggcccaaagttaaagagcatcggcattatacagtgagtttgaggccagcctgggctacttactgtctcagaaaaaggtgtctccattacttagctcctgcatgatcagcttgctccacatcagccctaaaggggaggctttagtgtttctctgagtgttgatgaagaacctctgtgatccatgatgctgggttggccatggagaaacaacaatcccagcgagtagcagtaaggaagaagtctgcatcaggtgaggcccgtctagagttctgccaaccttccgtggaatagcaactcctggcatttctcagaaacaatactaaaagccaggcaagtgactcattggtagaggttctaccgagcacacatgagacacgggatttgattgccagttttaaaaggaggtggctcagtgtccctaacttttagctatcacattcaccttgcaaaacagtcctaagaatgattggtgtgggggctggagagatggatcagcagttaagagcgctgactgctctcccagaggtcctgagttcaaatcccagcaaccacatcatggctcacaaccatctgtaatggaatctgacaccctcttctggtgtgtctaaagacaggtatagtgtgctcataaataaaataaatcttttttaaaaaagaagaagaagaagaagaattaatgtgggtagagatcccacttgagactaaagtatgtatggtgtcatccagaagtcgattagagaactctgcttctgagatgaatgaggttagtggttcaaagctcctacaaatgcccatgtccacagtccagcttcgccgtaacacaagaggtgtaacacctgaatttccttcttcctctcggtaaaatgagctgactcaaagttacagctaaagggaatggaaagttcctgagggtgtctgctgacacagacagatgctcctttcaaactgtcattcccagtgcaacagctgggctgatgtgtgggaaacattcttattctccttcttgctgagttttagataagctaaattctgatgctgaacacattgcggctgagagttagaccaattttccttcatatgttaaatccattaaatatgagggtcaagcagtagagtatgactatatgccattaactggtagagacctacaaatgctacctttcatggttccacgttggtctggccaagacaatacggtcatttttaaagtctagagttgatctacacctaaaaatctgggacatgaaaagtaaccaattttccttcttgtatcaggcatagctgttttcctatgtaacctccttccctccctcctctcatccacttctttctccctcccttcatccccccttcattccttccttttctccctactttcctatgggacagggtctctcagtagcccaatctggagtcaaacttctcgtccttctgcttgagtctctcaagggctccataggtataggtatggtaccaccacatccaacttttacactttacctttcagctgctttgttcaaggctaaagtctgttctgatttctatgacacacaattcagagtaagcttttatattatcttctagtgttatagaaataagccaaatgcatctgcaagtatgacagaggcattaagtaggttgggaagaatgcagggcccacttggctttgggttacaatggtaaagtcctttgagtcaggatcagaaatcacaatgaatgtatacactaagccttccaggacccttgctttagggggaggccttaggtgtgctttagttatatcaccattgactttgttgctattgctgtcttcacatcagcagtgtttgcttcccccatcccctccaaaattaaagattataaatgcaacctcaactttgaagtagaaaacaaatgtagagctgacaaacacagttcttccattaatagttattgatatttaaacataattctttcactagtagttaatgatattcaatattgatttctgccaaggcaaaggttgaactatagatagaatctttcagaaaacatatagatagatgatagatagatagatagatagatagatctaaattgaaatgataactaattttacttagtatccaaattgtcttcggaagtataacttgatgcaaaatgtttaattaattgcctgaaaacctgttgagggaataaaattctgatttattgagctgcctggaattataataattaaacattggttgaaattcaaaatcagatgcaactatttattttgtgcatgctaattaccatccacaaaaaaaaattagctgggtatggagatatacagagagagagagagagagagagagagagagagagagagagagaaaatgctcatatagtgccacacacctatggtcccagaactaaggaagcagagacaagaagagcttgagttaaagaacaacctgggtgacagagtgaaatcctgtcttgacaaaataaaagaaatttagagaaaaatgagaatccaacagcaggatttgttccaattgagtggtgtagggaatttacatgggtccaagtaaagtcagtggttgtaatgatggagttgtcctttaaatggctaaaggtgtcaactatgcaaaggtaacatgagaaaagacattgtaggggaaagtaaacaagggaatcatgggaagggcagagtatactctagttactctggtcactctgacaggtgcagagctaagagatcataacgtatcgaatgaaaccatggagtaggacagtgctcatggaagttagggttttcctaagagtatctcttcatttaagcagaaagacatgttgactcaaaacagctaatccgtctaagctagcaagatgagtatgagcaaggattgcttagcagttgacaaaaatcctaccagcaaagtacagcaaaaggtttgcttcatttaatattaaagaacaaaagggaaacaggtttaatgtcctatatttcttttgatttgtttgagacaggttcttgctatgtagctcaggctagctagccaccagttcactgcataatctgagctggatcaaagtcaacaaaccctccagccattgacctcctccactcccaccctccagtgctggaattacaggcatgcattaccacctcctatctgtacattagccttaatgttttaaagtactgtgctctttaccagactgtataaagcctaggaaagtagggtaactaattccctcacctcataggctttactgagttaaaagaagaattccccaatgagtcagaaagcaacaataggtcataatgtggggaacgatacagtgcgtaagagacatctctgaggtcatacacttgagtagactttgagtgacaggttgagacttaagtgggagaagaccatcagggattcaagctgggagagcagcagcagaggcgtggaaggcgtggcacatccatatctgtttggggaaacagaaaagaatgtcttctctagagagccagtaaccatgaatccatatgtctgcgagtgggttaaggactttgaagcacaaatataggtattgagcactgacacttgactaatacaaaatcaggaagactaatccagtaggcacttctttttttgggggggggtggtttttgttttggggttttttttttttttggtttttgttttgttttgtttttgttttttgttttgtttgtttgtttgtttgttttgagacagggtttctctgtgtagccctggctgccctggaacttactctgtcgaactcagaaaaccgcctgcctctgcctcccaagtgctgaggtgaaaggcatgcaccaacactgcccgcagtaggcacttatatataatgtctccatagaagttgacccaataccactagaatcacttagaacttgggttatcattggaattctttgcgaagatggaaagtgcttagcgaatgcacctttcgactttaagcattttaggcatagtagggaatagcatagtatttatgtagaagaggtaacgtacatataccatgaagcagacactcataaggagtaatgtgacaatgaggcatggctgaggaagaacgctggaactcaggaaagtgtaagaagcaggagaaggatgagaagcagcacgacaaccagggacaactgcaaaacaaagcaacaaaacagtaagtcggagccttgctggataagtagatacctgaacaggtgaggatattccaagctacagacaacactctcacaggttctgtaggtacagaacaaatcccatcaaatctcgtcccagcccatctacagtggtgctaacgctcagctcctgatgtgggaactcttctgcagcgtatcggatgcattcgtgctctgtttgaaagtctagatgcagaggcttcctgcaaccagcatctgtggaagcttcatgagttgctgctgtagactactttcttatttctatgagttgctgctgtagactactttcttgctgtagactactttcttacttctatgagttgctgctgtagactactttcttgctgtagactactttcttacttctatgagttgctgctgtagactactttcttgctgtagactactttcttacttctatgagttgctgctgtagactactttcttaagaagactgtcctaacaggaggctaatgctttttgtaactaggtagtgcactgtaaccaaagctagcttgagggaatgggaaggagaaatggttacattttcctgataactgttttcatttaaatctcaggtcaggagtttgcctcatctgaaaatgcctttcttgagattttaggatcagctagcacatttggtactaagatgtacccattgacatgtcctctgtgacattcctggtggttgaaactgattgccagatgcatgtaatgttttcttccggtgtttatgaagctagtgatggatcagaaccttgagttttaagttaactttacagaaaacaccactggtattctttaacaaccctgccttgcacaattcttcctctcagagatcactgccacaaaggtgttccttgagattgtagtatggctacaggagattttacaaaattgttggacagatagtctatacattgtggtagtcttctatcattgttcatttagaattccttgacatagtgctaattttttttccttcctaaatgttgatggcaaagatttttatgctaactagaaacatctcctccaaaccactaagcatcaactttagccagcactttcttgtcttatgcaacaggtacctatgggtaaagaccatgtcttcttcgtcattgtatgcatagcctaatacagtgcttggcacatagtaggtatttaataaacagccagatggccaggtggataagtaactcaagtcactctcatttatgactcgtaattttccccttagctattagaataagtgaaacatttctgaaccctgtcctaactcttgagcaatttataatgagcaatatccacatgctcctatagtttatatctgctcaggtcttaagaaatacagacaaggtgttactaaaattctccagatggtgtggtgttcccaagtcatgggtttaagctctgcatcatctgctggatgcaagcacttggctaataacaattgtactccactgtttccaggctgccattacatacaaagacagcttttcattcttcctttgtttcagcacctacatatgttcatcaaactttcgaatacagatgacccgtcggtcatggctgataattgctttgatttaacataatctctgcccaaatgagaaaaacttaaatgtatttattttgttttgctttgcattttttgagataggagcgggcactatagccaggatagcctgggatttactatgtagcccaaactgaactcctcctggcttagctggtcccaccccacaccagtggagggattgtagccatgagccaccacacccagtgagaaacttatttttgaaaatgtgcttgtgcagctggcttgtgatttaagatgtaatttccactagcctttctaaatgttgacgacattagactgccaactcattactctctgccttgccctcagtgtgtccaagaacatagctggaaaccaagactaggtcatagcctagccagcttcaaaatcacaccatcaaagcaatttttcaaagtttaattatttgattcaaaacgcactgctcggtgattaagctgcttgcttattcagctgaagtccagatcctggcagccatatgagcaactcataaacacctgtaattctagttcccaggtcaatcctgtgtggctcctggcctcccaggcatttgcacatgcgtgttcgaacacacatacattagacacgcaaataagtcataatgaaataagtttaaaaataaccttattaatgaattactttttttttaaacacagagtttctctctgggtgtagttctggatgtgccaggaccaaggtgacctcaaaccaatgctgagattaaaggtgtgtgccaccaccccctggcttgaatctttaatttgtcaggagattgttctcagcaactttacataggcatcagttaaatggtgacggagatgtattggtgtaggctggctatgggcccctttctagatacattcaggtgttctctgtgttactggatcctaagagacttacctaatttcctttgttgggtgctaaaattaggcccagcctcttacactcgatagcaccctaggcatgtgccccatttttgtaatgctccaagttctacctaaatgttaaatattgctctctgatatattaatacatctccaggacatttagttttaaaaatcaaagcacacaccatgccagtgttatatcctaactgtttaaggattagcaactgcctagccttttctcagcgctgatgtttctagattttcaatagttatataagaaacactgaatgggcaagagcaatactgcttcaaataagtcagtgacgtggttatttcagtcagttgctgcctttgacaaaagatgtccttgttttgtttcctaaattgacacttcaaaaatgtcatttcactgataaaataggcattaaaggagacttctttttaaagataagatggatcgaagaatgaagggcgaactatataatggcctttgacttttatcaaagccacatttgggacacagtttatttgaagtttgagggtcactggcatcactgcctgcctagaaagaataaccttgaatctgacatttgagattattagaccttaacattttcattaaaaggttttgtttccagaagattagtcgagtatttaaaataaaagaaactggcagcgttgaatcgctcaaagtagcaagtccacgcagctatcatactacaaagctatctgactctttgaagccttcctgcatgcactcagatttgtcgctgccccaacctcgacaccatcactcatcctcagtactgtctagacaaaatagagtaccgtaaactcactgtaatcctgcttgacctgactctcaacctttcccccagcatcacgagggccagtcctgtatccttactcagatgatataaatactctttattccttgctaagaatttttctttcccaaatagattttctagtttttgcaaattacacctagcttaaacaaaatatacatttttaaatttttttaaaaaggctctttttctttgccagtgttactccatagcaaaggtttaggtaaaagcatcagaaacaagcacacttaattctttcaagccagcttttcccatcaaaattttttcctggtggacctaattaattgcatgtttttacaaaatgttgcttacagaagatgttaccagctaacacagcaactgtagacgttcaccaaatttcagatgtccctcaaagtctctgtagagtttggaagagttccatcacaacctttgaggatctgccttaacttcctagtctacagcattgagcctttttaataaagattggattagggacttaataatagctttcaaaacaagactttggataaagctatagagttcagctaaggagacaaatcatggaattgcactctttgatactaaaagtgcctacataatatgggtgaaatcagttgctactgtggagagacttcaccgaatgcttgcagaaccacctcaggttaccttgaattgatgactttaaaaaggcccacaaagaaaccctgtctaacccaggttttcggtgcatattgggtgccctttgattaaaaggcacagaatctcaagtcctcagaagtgcaaagagcagaggagagtgcttgctatggaggagcattcaggctaatgagcacttgtttgaacactgcatttttcactaaccaaggaaacatccattaaaagtgactcactgagattgttgttcctgtgtgctctaaccagaagcccttttagtttaaaacaaacaggacaaaaaacaaacaaacaaacaaacaacaacaacaaaaaaccccaggactatctagaccatcagtggcctgataggtatcggttgaagcccagcaaggtggctttcttgtcagttcatctcgtgctgggacgatatacttagtagacatccccatggtgctcttgggatcccaagaaggtaacaaacctggtcagaaagaagagtgaactttcaacaaagaaaaagtacctcatcctacctgcttattgtagaaaggcacttagggcaaagtgtgtgtgtgtgtgtgtgtgtgtgtgtgtgtgtgtgtgtgtgtgcttgtctgtgttgagacagggtctctctctgtagactgactgtcttggaactcaccagattgacaaggctggcctcacagccattctcctgcctccttcccagtgatagcttagacaagcctagtttaaatcagggtttttaactattcttttgccctaaagccaagctttcatcatttaaaacatttgaatgcttgaaaggtttataaataatagcctaatataagaggaaaatatgcaacataatttctagctaattgttagtacctagaaaacatacatcttgtagggctttgttctcagtcccctgttagatagtaagactttgatactctgcaattgatggtgactttgaatagcacattttaaaacaatacaggcataagtttagaaaactacagaaatggttttaatgcacacatttaatatttcaaatgtgttaagcactttgggaagtagcaatcccttgatgctatatatgatctaataggccagcagtacaaggtttataagaaaccaatgttttgtgggtagtctttatctaagcaaagctaagacactaatcatgttgtgtgtggcagagcacacctttcccaccacttgggaagcagaggaaggtaggtctctgacaagttccaggctagcctggtctacactagtcacttccatttgaagtgtgctatctagatgagcagggaggaaaagaaatcacatttttctaggatctttaaagctatttggctaatatcatttcaagggtttttattaaaagcaataaataaacaaacccacagcaaataaaattaatatttaagaatggaactgctgaactgtttctagtgatataaccagggtagtgtgtgtgtgtgtgtgtgtgtgtgtgtgtgtgtgtgtgtgtgtaagagacatacagacagacttgattattttgttttgtttaatttagagagagtatcgctatgtagccctgggtggcctggagcgcagagatttgctatctgtcttccaagtgctggattaaaggcacttgctattatgtccagcagataaatttttattgcacaactgcaactctagaataattatactgttagaaggcaacagagtcctctctcacataaatatatattccatttttaactctggagcaaactttttgaaaccatacagaataaagtaatttttaatattcttagaaatttacagtcagaaaagaaagccagtgagctctgtctttatttcctggaaagtcctagttctctgaagcacttccattcacttccctctttcttgttgaaattatgcaaccaatttgcttaaggcgacatagaaattgaatcccggaaggctaatttagatgacgcctattgttttaatgactagaacctcgtaggtatggctctgccctgaaattatctttcctttgaattatctttccacagttagtaattgtgcttatatgccaccttgtatttcatcttatatttagtctgcagtagttgtgtgtgtgtgtgtgtgtgtgtgtgtgtgtgtgtgtgtgtgtgtgtgtggtggtggggtggtggtggttgtttttaaataaccataaacacaatttgaaggcaggtgggttagctatcccaggatatttttggatcatacattctaaaatttcaggaccagaataatatctgtataatactcaagaaacaagtttctatatcaaatcctatagcagaacccaatattaccaggcattttttatctagtgacctcctagtttgtgcactagtcaaggtgtattaaatgagactacacattcttatttcttcagggagagttctggctttttagacagtactttggaagctccctaaccttcagtttgctaggacactagtattaatataacaggattgggtctcaggtccctggttcctctataaacctaacactcagcaaataatagaaagtctcatgttatttttgttttgttttgttttgttttgttgagatgaaatctcttcatttcccaagctgatctctaacttttaggctcaaataatcttgtcttgaccccaacagaagcaggaactgaagggacacaccagtatcatcagcttctagatatttttaaatgacctctttatgtgtctttgtatttaagagcaaaaaaatctgctcaaaacaaaatcagctgaaccattaagaacaatctttaatattaatatttattatttagatgtttaatatttagatatttaatattctgagcacaggaaataacagtaaaccgtagatagattaaaaaaaaaagcattagccattgaagttagcacagtcaccaggattcttggagacaaagcttgatgctttgttggcaaaatcgtatccagattgaatagattgtatcaaggaaatatgggccagtaaggttctcatggtgactgccagccctaaggatagactgagcaccaaaacaaagggcatattctaccagaaaggcaacctagaatctagaggcagcatttcagaattgcagcatttaaaccggtcttgggttgagtctatgcaatcgtaatgctgccttcttcctgaagtctggtctagacatagaaatgtaatcgacacaggagttagtcctagtgactataaacaattgttgcacacaccccagtttgactgctctgcactgatgtgacagggcagctgggtccttcttcctaaaactcttaaaacctcagcatgtgtctgaaacctgagttggagaaaggtgggggccacactcaagggttggctttctggattctgtgaaggcggggctctgccggggaagggaaatctcattggggtttatatcattcagccacaaagaaaccaaatagcaggcagtatttcttgcactggtttgtggaagaggaaaggcttaaggttgtttttcctcttttaaagcatcctggtgtggttacaagatcataattctgttggggtgtgtgactctgcatttataacctaaagtttcaaatatatacacatccttataaatagcatgcttgctttaactcggaacattgcgtagagttttaaggtgactcatggtacttgaatagagagtgagatgtgtttcctaggattgtgtacacacaccctaggagaacaaccagagcgttgagtattgattgtgtctttaggtccacacagatgggcaacactttctttggggttatttccggtgggaacagacaaatacaacttggctagccctgaaaacaaagtgctaagattttttttaaatgtgattttatttaaaaactagctgagagctaggaaaactagctttgataaaagcatctcacctatcttaaagaaggagagtcattgaacacgaaacgcttggcgtgtgtgagaggactgtagcaaatactcctgcttttccccagaaatccaatggtgatgtggctgagtccattcaccacatctgactcttcagttttattttgttgaagttttgaaattgtaattgaatttccctcctttcttcccatatacccaggccactcacgttcatatttatgctcttgtcatcaattgtcattgtgtccatgcacgtattatattcctgaatatatcccgttgagtcggcataatgttacttaatatatatgttttgggggctgatcatttggcacgagacagccactttttatgctcctcactggggaagaccgcttctccagctcccagttttacttggttccctgtagttctttgtgtaggattgcggcctcatgggctgcccccaagcccctgacgtttgacatgtttattggtgcctttttgttcagctcaagtttgactgtcatgttcccgacactttatacgtatagcttctgatgtgactaggagacacaatctccttgattttttttcaactcataatctttctgcccccttttccccagtgtttccagagcctgagatgttgggatgttttgtagatgtatctgtagggactgagctccacaaccctgcactttgattggttgtggttttctttcttttttttttttttttttttggtttttttcgagacagggtttctctgtgtagccctggctgtcctggaactcactttgtagaccaggctggcctcgaactcagaaatcctcctgcctctgcctcccgagtgctgggattaaaggcgtgcaccaccacgccctactggttgtggttttctgtagtagtctcttttgcaaagagccatcttgcaaagttcaaacatactatccatgttaagtttacatgccaaacgtaaagtgtgctttatgtgttcgctatggtgttgtatctgatccatgaaacttctgttcaaatcactgccccaaagccctgtgatagattccagtaatgcacatgtcagtagttacatttttaaaaagtatgcaaacattaaaactcttcatgtaagttgttcaggctttagaaaacttttgttagattgcaggatgaagaagacagggaggaaatatagcatccccatctgataatagaagacggagcttttctgttaaagcttgttgttgttgttgttgttgttgttctaccctgatatggagtttcactttttagcccaggctggcttcaaacttaaaacccttgtctcagtctcccatgaaatagacttgttctatctaaatcaacatttctaaagttggtttatttaactcactcatcctacttttctgagggggtttgtttatttgtttgttgtttgtttgattggttgtttttgtttttgagacagggtttctctgtatcaccttggctatcccgcctcccgagtgctgaggctaacaggcgagagacagaaggcctggcaaatatttttagaaatctccttttcaaatctggttggtacccacttctgctgcagttgctgtggcctagtgttttgaattctatcccagctaccaatgataagtggtatggctaagattgtgttctttgaagaaagcattcaagtgacacaggtagctttgctgtgactggcccagcaacagcgtcacagggtggagaaggaggactcgggggcatcctgacacgttcccatggactctctcgtcaaaaagcattcacattgtgcttcttacgcactagcgactatattagagacccaaagtactaaagtctcatttcacaggggttagagagaaggaagcctgacatttgagccatctcttcactgttcccatcctctccaaaggaactcttccttccctatcccccgcctgagtcaaaggactttaatccattggcttcttcccagaaatgctctggctcaagggacaaacttgctcttcaagttcccagtcacctttgagctgcaaagttcacagtatgcaaggaagagtagtctgtgttaagcaagttcacacctccccggaaagccatgttctcctttctcccagaattacagaattctttcttatagtcctttcctcagaatttgaagaaaccactcggggcttgtcccacgagtgagtttgcatatgtctaaaaggaagacaagagctaataaggaatgacattacttaagatgggtctcagtactatgcccctgagcttcaagatacagtgggtaccatattgagctctcttcctgcctagctccaatatacagtgcaaagggggaacaaaagcatacaggaaaataaatactgccttgcaaaggaaatctgtgcccaagaatcctaaatgcagagctctggtacagcatactattcactagaccgaaccacttgaaatatgcagggtacgtggcccacagcctgggtgtagggacaaccatgagagaactgagcccagtgctaacaacatgacgcaaagacagaggtgatttctgaagctctgattcccataagccaaagtcccaatgccacttccttctctttgtagaattgaattacaggacaaggctggattctagttttcctgtttcacccaagctacaggaggtcatacttgggagaggaagccaagatgcatgcatgctgggcgttttagtttttgtctttgttgttttgttttgttttgttttgttttgttttgttttgttttgttgagacaaggccttactatatagctcaggttgactttaaactcaaagtgatctatctcaactggccaagtgctaggataacaggcacctggctgtagatctactttctaacattgaacttaagcctcatgtccacaagccagagggatggtccacccctgctttctttcctagaatctcagtctgtagagcattccttcttgctaggttttttttttttattcatataatttcattatcagtatccaggtttcccaaagtagttagcaaaactacttgttctggtttttccctgctaatgcagacaagaggttgagtgtgcaaaacaacaaccagggtactgaacaatcaacaaaaattacagcagaaaactaaccataaacttgagagtttggactaagctgagaatatgtttcagacactccaggtgagttgggtggagtgcctagtctagagaatgggccgtaatatgggtacacaaagctcctttaaaagttaacacccccgacccccaaacaccaattctgatgattacttccttcagctcctaagggagatgtcactaatacaaaattgtttttaaaatgaaaatggttcagggtgggcacaaagtcagaaaaagttgaaatgagtcaaaaacattaaaagttactaatttgaaaagtcagaggactttttatcatgcagagagagagaagacaaaaggtactacatagtagagagtgtactgaactaagaactaaatttaaagtctttgatctgtgagatgtgtctcagacctagccaaaacagccagatccaaaggccaatttgaccaaatatgatttctgctacttgggcgggggtgggggtgggggatgggaaagactccagtgacagtgtagaaggagatggtataaaaccctcaccctttttctgctttggatcagagaagactataaaacacttaactaagttgttttttttttttttttccttttttcttgctatgcctactaaatgaattggtctggtctggtctggtctggtctggtctggtctggtctggtctggtctggtctggtctggtctggtttggtttggttccgttcggttcagtctggttcggtttggtctggtttagtggtgcagggggtggaccctagggaccactagcagcatcctctggctaagccacattacacctctagtcccagaagactttcttggtagagcctccatgtaatgagctttgcatagtctaccttaaaaaaacaaatttaaaagcagacatacatcctctctaggaataggccaatcgtgtctcattctcggaactggatttttagtggtaccagctgcatcccagccagctttcaatgcttatgttttcttgcccccaggttcctaattattaaaaagaaaaaagaaaagagaaaccagctaagtgggaatgactcctgtccctgtatcccacgaggacacccagagtgaggcactaggtggctagctggcactcgggcttaccctctcaccctttcacccagctaaagtgcttctgtccgtgttgtatgttactgaccattgaaacacctgctgtgggaaacccgtgttgacgaccatgcaatataacacacagcgtttggacaccaggctgtacttaaccatgaacagcatttgttaaacattggctggttttcttttctttcttctttgttttgttttgttttttaattttatttactagtttttatagagtcctatatacctctgactgttctggtattcatcatgtagcccaggatgatcccaaactcacagtcatccttctgcctcagtttaaaaaatacagatccctgggaagatgagactttgaatgttaaactctcacctgaaatgtctgctttcctctatgactgtctggggaactctttagtttgacttgcttctaaatatcggaaaaagcctcttagttcaggactttatattctgactctgtcttgtaccattagctctcccagtgtatgctcactgccaatttataacctgtacagatgcctagtgtatatcactcaggtatgatacagtagtcaatatttataagaatgtcttaccaggattctttttgagtgtacattaacatagtctagttacccaaatcaacaagatgcaaaaatcttcttttgtttgtgtgtgtgtgtgtgtgtgtgtgtgtgtgtgtatgtgtgtgtgtgtgtgtgtgtgtgtgtgtgtgtgtggtgtggttgcatgtgtgtcaaacagtgtgtggtgggcatcaatgatcaactcaatggagtcattttcccccttccatttttctgtgggttccatctattggatttaggtcatcaggttttctgagtaaccacctttcgctgagccatctttctgatccacaaaaatcttactgtctgacctggcccttgcagaatagactgtcacagtagaatcataaagacagaagcagttagggaggaagtcaacaagtgtgagactttagagccccatcacaatgtgttttctcagaggttacttcaaagacagtggcacaggtatttgcggccactggtcctgaggtctggcttacaggttaatatttcacatgtcctgtcctccagctgatcacgcacagagaagcacggtccctggccaagacaaagtgctgggcactcaaagcaaagatgcttgaagtgctttcttaagtctcctgtacccagctttactccatggagttctctgtgagaactgtaactgatatgttaaaaagtccttgggattgtgaacttttgaaaatacaggttaaaggatggggatttgggaacagcaaatgacaagagaaaaccacattggaaggagaaaaacaaattcagttctgacctcaacagcttatcatggttatgttctgtgttgttcagtgcatttattattcctaaaatagaagcaccttttatatggttttcaggataaaggttttaggatcttggtatatgccatgccccgatgtccacaatgggttgattcgaggatcctctccctcccccacagttctaaacattctttgatgttcaaaatcctacatacatggtttgcttcaagccatctgctatgtttctttaatgtatttcaaatcatctatagagtattaataatactctcttaataatgcaaatgttaggcaaatagttttatactattatatttagggaaaagtaattttttaaaatatctgtatatgttcagtacaggtgattttcttctggctatttttgatcagctttttttttaattcacagatgtagagcatttgaatagggatggctgactatattagatgtttataccatattaccctaaactttgaaataagattctctactatgtgtggaaaggggctactgtcaagtccttaactcaaagttattctagcatcttgagactgagcaaattcctgattgttctgtataattggagtaagagataggttagaggtgcaggtcagaggacctgtaaaattgtgtcatgatgttgcttcagaaccttccagacattaaggagtaccactgagacaccagttcaagtccttctgatggaaaggaaaagcaaacaattttaaggtgtcagttagggtttttttttcccccttataaagcctagactaattattgtccactgtgctagcttttccaggttgcaaaatgctatgagtcagtttaaggacaagacaaactatagctgacttttttattcatgcagacgacatagtcattcaaagatgactcatgcatccttccgttgtgcatctctctgagcttctcagaaaccaggaaagatgttgcaagctccaaaatcatgggactccagtgctgcaagggggccattttcacgttacttcagggagccctgtctggagtccaaaagcctaacttagatgccttcacgcgagtggagctgatcttactgacttgccaagcttccttcttaccgttttctgttttacacaatgccttaaggagcccgggatagagactaacttttgattcttcaggtttttttcctgcagatatgtgctcttatttcccttttctatcttctaatgaaggaaacatactgttctagaaaactgggagggggggagaccctctacttagagatgacccttgtatatatcttggggaatgcatctgtaatccttttcttttactgaccactatgtgtagttcctagataatttcttccttctttaaacataagaaccatagaatcatacagcaaatgaaagactatataaatccattttctttcagaagtccataacaaagtttttcctccctattttctcttcgggtactataactatccctacacagtaaagggtatatgatcaaaggaagccaaacacctttagaacaataacaatgtcatcaaagctgtgccttatctaagcgtggtggcacaagccactcatcacttgtgtagctgaacctggatggtgacagtttcaaagcccacagcaagcttgaagccagcctgagagacttagtgaaactttgactcaaaaatactacagtaaaaaggacaagggagcaaagacagagtatcagcagaggactttcctggagtgtggagggttaatctttggtgtttcctctacacaaagagttgtctttggtgtctgaagcacaggaattgtttataaaaacacatggccaagtaattctactcagcttctgccctttctaatttgacccaggaagccaacccttgatatggacactggccttgagttatatcctggtatgacttgtatgttatgactaaatccacatgccaagccaccaactgctccctcttaggtctatcagagtgctttgtggaacttctcagatttctttaaaatagtaaaacgttggagtcaaaattgcaaaattgagtaagctaaatctttaaaaaacaatgttacataggtaagtctttccttgtcagaaataatatcctgttggaggatgtggcagtgggcttctgagatgggcaataaactctgatatctgacagtttctcagcctataatcctacctagtttggatctctcttactttggctatccacatgatcactgttgaagtcaacatcatgctaacctgagcaaggcagattggaaaggataacccacaggtactgcaggtgcctcccataaacagaataatatgcagtctattctggagagcatccttagggctcctgttcttggcctaggaaattaaaagtatattaaatacagatacacatattaaaaaactgatatatttacactgctccaacagtccaggttgccatccacatgactggctcccacacgccagatgaatcttcccctttcaaggagattctggtcctgaggatttgacagacaagcataaagttgatctatgggagaacttgtgatcagcatgggtatttagaagggagaagggagagcttcagagaagacctacccatcttcagggacaaataggtacctaaggatgaaggacagaggcacctcagcaaatgggaaaatgtaaggacataaagcaaaggtcagtcacaaagaaacagtgagcttggagcttgcatccacatgtgaaagagtaggggatgaagatgatcaggactaaaatattcaagagcgttatataggatgcaaaaatagcaaatctttgcttaaataaaaagggggactcccacaggagattttcaaaccttttattttaaattcattttccttaagatttatttattattatacgtaaatacactgtagctgtcttcagacgcaccagaagaaggtgtcagatctcattacgggtggttgtgagccaccatgtgattgctcagatttgaactcaggacctttgaaagagcagtcagtgctcttaactgctgagccatctcgccagccccccccccttttttttaaatttagaaaatgtgtcatttagggtgacaaaaaaacaaaacaaaacaaacaaacaaacaaacaaaaacaatggcaatggaatccagtaaacataagccaggatgcaaagcttcaagaaaggcatagacatgtgatgcatagggtaggactactcaaatggatggaaagcaaagcaattgggtgtgtcaggagaccatcagcaaagtgaaaggagagttaagacaaacaggcctttgagggtggtagaaaatgggaaaaagacacaaagtagcaatcttttccttttacaagcttattcttgaaagaatcaagagaaaataatcctaaaatggtcaggttacactaaagtattttctttatttataagatgatgtctgagcaaggttgggggagagaagggggccatgtgggagaatgagcactggtgctccttagaagaggaacttagtttcacccctgcttagtttgtaatgaatcctcagagatgaagaaaagacctttaagatttgaaggtcatagatataactaaaagaatcatctctcatgtcaccaagaatctcagagaccaatgaaagcgcacaaaaaataggtggcatatgcactattctggttgcttcatcaaattattaaaaatgggtgagtggcttaatgcaggagaaagtgattgccacagtccttctgaaggcacgaagtccaaaatcaggacgtgacatacttggctgcttatgggagcttggagatagagtccactctgagtttgtgcgcctagcttcaggtgggcagtagctgtgacttggctttccttggttgacagacacatcaaatccagcccttcttgttcccacctgctttgtgagtctgtccctcagacctctccttaccttttacagtaggggcgtgagtcattggatttcaatcccttcccaaattcaggacaatctaagactcagggaactatgtcttagacagacatttatggaccatcacatgtatacaataaaacaccttctgtaacaagaatgtgatttctaagataagattcatatgactctgagccatatgtgtaggatagaagctggttctgctgcttgacaagtagtgcaatctctctgccttgatcctgtaatcctggggtgttgaggatttttaagagttaacaagaaaaattaaagacttttttttttttaaccttccatgactacaaaacagcaggtatttcccgtgtggtaggtttggtccacagtgttgccacacacgggggacatagtacaggatgaagaaggcttctgcagtaagggagtgtcccggaccaaagagagtgttacagtaagcttctaaaccaaatggagtctcttctttccctttggtctacagtttcagattgttcgccctttcaagctcctctccatcgtggagaagcagaaaaccaagtggtagaagaacctttagaaccttagtttacccctgtatgctttgcaatgggctggttttctctactgcaatacacagggaggcccgataaagagcctgtgaagctcatgagtttggaagacactcgtgctgaataataccataaagacatttattaatgtacaccatgaattgtacaagagacacccataaattctcagataaacaagcatattgatgggaagaaatggaagtcatttgtttttattactgatttttcaaatagcatctgaaacaatgtgtttcattatgacagctttttaatatagatcgttacactttgcttgtagtttctcccactaccttcccccacccaaacttccgtaagctacgccccttcctcttttagctattcctctttatgttttcatgccatacatgcatgatatatttgacctagacctatatatatttaaagctagaccccacgtgtcttagtcagggtttctattcctgcacaaacatcatgaccaagaagcaagttggggaggaaagggtttattcggcttacacttccatactgctattcttcaccaaaggaagtcaggactggaactcaagcaggtcaggaagcaggagctgatgcagaggccatggagggatgttctttattggcttgcttcccctggcttgctcagcctgctctcttatagaacccaggactaccagcccagagatggaaccacccacaaggggcctttcccccttgatcactaattgagaaaatgccttacagttggatctcatggaggcatttcccaactgaagctcctttctctgtgataactccagctgtgtcaagttgacacaaaactagccagtacaccacgtaagaaagaaatatttgatattttttcttttatcccctcatgtttccttctgttgctttcccctctctttctttcccaaagaagtcacattctgctaatatgtcatccacatatgagagagaacgggcaatgattatctttctgagtctgacttaacgttgcttatcaggttgattcccaacactactgtcccctccacacacacagtcatggaggtattaaaatcacagtgcttatacagcacttgaggtcatatgtagaatcctaataatagatccttagatctatcagtaaagtagtaaagagttctgctcttttctactttgaggggtgctggggatacaagccgggtgcgagtccttctttatgcccctagagcacagttgcctaatcttagcaattttgtgcataaggaaactccaaacatccactttcaaacatcagtcacagtcttatcaagctcaggaggtatgcttctattttgctatgaaacctaaccagtttctgattcctatctttgattgtagattcttatgccaaagttctaacacaagttgctgagctaggtaatcattaaatgctaccagaaatcaagcacctgatgaaaagtttaccaaacaatcctttcccctctgggagcttcaaagggaacaaccctgctttccaagttcccatctaacagggaagggttggcaagtgcgtgcagccagccagcatataccaacagcaaactggccctgtagacatgcgcggtcagagtttaggtttgttacatttttacatcacgatccctctcctctaccctcaggtgtactttgtgggttctgtccttttgagacctgcccgtcggggattggctggtatcagtgactgtctactgctggattttctgcttgccttcccgtcatgtctaacgaagtagaaacaagcacaaccaatggccagcctgaccaacaggctgccccgaaagcgccatcaaagaaggagaagaagaaaggtatgggaaaacagctcttgtctgttgtctggctaccacaggagcttagtctcaacttctaactttttttctttttggcacaagtgattgctttgcctcaggtagacttgtttctgcatctttggttgtaccaactcaggtccggttaggaaaatttcatagcattttgttcttcctttctttctttctttctttctttctttctttctttctttctttctttctttctttctttctttctttctttctttcttccttccttccttccttccttccttccttcctttctttctttctttctttctttctttttttcaagacagggttcctctgtgtagccctggctgtcctggaactcactttgtagaccacgctgtccttgaactcagaaatccgcctgcctctgcctcccaagtgctgggattaaaagtgtgcaccactacccccgggtttttttctttttttctttctttttttttttttttgatcatatgtctttctaatagttatttagtttaaacatatgattagttgtacaaccacaactattgtgtaattgtctctccataatttatttaccattttgccttacaggcatccccatttttgagaaatcaaatttttgactttattagatagttttggttttaagtaccgagagatagtattcaagtcttagcctgccagagctggagaagatgtcatgacctttctcttagctttggccagtccttcagctctaggtacgagactgcacagcctgtttgggagcccagatgtaaatagaaagaaggaataatttccagtcacagccatgagaatttactgccagttcacttttgtttccttggtgattcagaatattagaaaattgtttgatggcttaattttttttttcttttactaagcagaatatgccatttttctaaaattcattcaaaataaagctttgatgaagaatattctcaatgcccagttcatgaaataattcttatgtatttctcatatgcattttgtgtcttgaagtgtattttgtttgcttttatttttttctcctctcaatgctacacttgatattatgaaacatgattttgctcaaaagaataagactggaaatcatgacttacagtcagtattcaatttttgggggaaggggggtaccgagcacatgtgatcgtacctaagggtgacatttaaatataagctgtatcgtgcacttcttttttactttgtaggttctgaaaagacagacgagtacttgttggccaggttcaaaggtgatggtgtaaaatacaaggccaagctaatcggtattgatgatgtgcctgatgctcgaggagacaaaatgagtcaggattctatgatgaaactcaaggtaagaggaagaaatcattggccgtctgaaccaagcgtctgaaggagggaattctattagcgctcactgactcatgtctatgtgattggaaacgattctctattcacattgattctattcacatattgagcctccagtgttctcttttcagagaagccagggctagtctgacttttttgagtcctgttctagaatcaagaatatcccatcaaggatagcaagagtctgagaaccttgtcatgtgggcaaactcagaacttggatgagcaaagccccatccctaaattttccaccatgaaatgattttaacagtggtgggcagttgtgagtgatcagtattctgcatggaagacacaaactagggactaggatgttgggcaccatggagaaggttcttgcctttcaagagtaaagaccagaacttagatcaccagcacctacacaaatgtgacagtccatctgcatccccgtatctagaggcagagacaatatccccatgacaagctggattagagtgatctttgtgctcaaatgagagaccctacctcagtatagaaagtagagaacaataaagaaagatatgtagtatcatccccagcctccacacacaagtataccatacacatatatgtattccaaagtaataaaaattaaataaaaattgtaaaagaagtcacagagtgcctattgactgagaaagtctttagatgaaatacaggactccacatgtgaatttatatgtgtgcatgtgtgcacctgagtaaggacagaggttgacaatgaatgcctgccttaattatcctttatcttactttttgagacagagtagctcatggaactcgaagcttactacagattggctgcccagcaaggtctggggatactgcagtctctgcctccccagcactgagattcctggtgtataccacagcaagcaacttttatgtgtgttcttgggggatcaaacttgagtgctcttgcttgtatgacaaatgctttaccaactgagccatctctccaggtcccgtgcttcaggatttaaatttctgccctatgctaccatgtggacctaattaaacagtacaggttttaggtgagccagcttcagtgtgtgtgtgtgtgttagagatattaaatttatgagtgtgtacatattaggcaagcacactttcactaagctacattcctatccctacaagaaatacatatatcttctacaccttccaattacccttgatgaaaggtacttaagcctttcccagatgccatccaagctgaaagcaaagcagtttgtctttctaagttctgccatcagaagtattatagaacactttaaaatacatttcttttattttcccaatctcaccagggaatggcagcagctggtcgctctcagggacaacacaagcaaagaatctgggtcaacatttccttgtctggcataaaaatcattgatgagaaaactggggtaagaatgtgtacttgctcgccagtgggtacccacctgatctgactgtggttgatttctagtgggaaactgccttttcttcctcaaagtatgaaaaagaaaactaccatgttctacttctccaaaatagacaataaaaacagaggcgtcaaggtatccttttttgaactttatttcctatgaaacacatgactgagaccctaaacatacgtatgcttctactgttgcatagtagttgttttgatcctcagactacactaggttaatcttcacctcgcttattttaatgtgttgatcatgtgtgaatttggcagcttagttcaaaacctttagaagacttttcatctctctttccctgtccttcccaaccagctgttgttctaggttcttccttccttccttccttccttccttccttccttccttccttcctttctttctttctttctttctttctttctttctttctttctttctttctttctcttttacttgtggtagttattgttctgtcacaagaatcagtgttgcttcttcactgtttactttactctgattagtacacaaaagctatagtatttcaaatcttcggtggcacttttccattattctatagaacatggtaggattcattcacttaaagtgtcattagtaactctgctattcatagcaagacactatgacaagattcctttccaacccttccaagagatacccattatctaatatgcaaaatatctgcaagatttaggaccagggcaccatggtaactgtccattcagtttgctggtccttaggtcctcagatattattgtctttatcaatatccttcagctcttgataactttttatctcaagtcctccagagaatggtaacaggtttctctcataagcattattcctttcttcttcttcaaatatgtcccctttagtaagttaattttgttttttttgggggggttgtttgtttgtttgtttgtttgttttatttgttttggtttttttggtttttcaggacagggtttctttgtgtaaacctggctgtcctggaactcactttgtagaccaggctggcctcgaactcagaaatctgcctgcctctgcctcccaaatgctgggattaaaggcatgagccaccacgcccggcttgtaagttaattttgatatacacataaaatgataaatatagattcataacatctataagaaaccatataactataatttgctttgcaaaaatcttcatttgacagctctaaatgtcttgtagactaaagggtggttgtcaaatggaactcagtgcttcagatatagcacatgactactttttcagtgatcataggtatttggaaataaaattcaagacacactttgccacctacagatatctttgaagagttaaaccctgatgtgttctggaaagagagagggtgtttggggagagaggaaattaaccataagagtctctgtcacatttgacttcttagaacaaggtccttctaggacaggttagatacacttatggtggcgtttcacgcctctaggatttactgggtccagtcattttaacgaaaatacatgatggatctttggttgttgtctaagggccctatgggcaatccagaagcttacttaggctgttcatttaagtttgtcatttacttaggaagataggccaactgaagttttgtttcattttggtttttcttcttgtcattcttttattgcggggaatttgctcaggtggttggtcagttggtcagctgcttttgagatactatcttgttgtgttgcctgagctggtcttggagtcataatggccctgcctcaaattcccagggactctaaatgacacagcacacccagctcaactcgggttggttcaaggggctgtctgctccctcttaactctcaccaaccattgaagctcccctcagtccttccttgtaggtggcattttatcttttggatagagagagagagtcaagtacttatatttttagaaaggatgtttttctacttttgttttctatttatccttccttttggagccttttctagcaaaaagaaatctagatgtagccttgaacccaagactaaaaagtctttattcaaaagctttaaactcaccgggcattggtggagcacgcctttaatcccagcactcaggaggcagaggcaggtggatttctgagtctgaggccagcctggtctacagagtgaatgccaggacagccagggctacacagagaaaccctgtcttgaaaaaacaaccaaccaaccaaaagctttaaactctttgtatttcccttcacatttgtttctgatcgccaactgtgatagccaacaagtccattctttatttttcactattgctcttctatgttcccttttaaggtaattgaacatgaacatccagtaaataagatttccttcattgctcgtgatgtgacagacaacagagcatttggttatgtgtgtggaggtgaaggccagcatcaattttttgctataaaaacagggcaacaggtaagctctaaagcataatacacctgagaactggttctctgttgagagtagaagtgtttgggtttttttgttttgtttttatttttgtatttgttttttgagacaggctttctctgtatagccctgactgtcctggaattcactctgtagacttggcaggcttcaaactcagaaatctgcctgcctcagcctcccaagttctgggattaaaggcatgcaccaccactgcccagcacaagtgtttattattcaatgagatgtactggaaacatttcattaggccaacactagatctttaggccaatcatcattcagagaagaacttttgcctcagaatctatttaaaatgttactgatagtcatgtgtgtggcaaaagagttgtgagaatagactttctattaatgctactaatgaacttagaacagtattgagttattcccagaaatcttaaaggaactcccaaaatcgacatggtacctcttgttttgtctgaatagttgaagaaaaattctattgcggtaactatgttcttaacatcaatgaaacatttattaaccctgtgtcctttatttatctgagggtggtagccctctataaatcagagaagggttgtaagcaatctcaagtagaaattaaaaaatatatattaatgagaactgaatatgggcaaggaaagaagatggaaacaaaatcttgttgatgctgtctattgtttcaggctgaaccattagtcgtcgatcttaaagacctttttcaagttatctataatgtaaagaaaaaggaagaagataagaaaaaggcaagtagtgcttgataggcgtactggattcactggattgacaactactcagggcatgtttagtgttgcatggcatgtctgaagagttcattttctctccttccaagtggaaaattgtctgctgttcttagatggacatggtaggactttgtgttaggaaatctgatttgctgtctctgactccttacaacatttggggtcgttaaaggacttgacagagcaactgtgtttattaggatttctattgttgtgaagagatgtcatgagcactgcagctcttaaaaaaaaaaaaaagttaattggtgctggcttacagtttcagaggtttagtccattaccagcatggcgggaaacacagtactgtgcggcagacattttgattggcaggcagcatcaggagactgtcacactggccagaacttgatcatatgagatctcaaagcccacctccagtgacacacatcttctaagaagaccacacctactccaccaaaccacacctactagtagtgctactcctactaggacaggccaagcattcatacacatgagtctatgggggccattcctatatcaaagcaccacagcaacctagttaattctagaaagtgttcaaatccagtatctatgtgagaggaggggggagaaacacagagtgaagtacataaggttttgttgctcttacctatgcatcagggtgtgtttgtttctttgtcaactctcttcccaagctcattgaatctgcatctttccttttaggttgaagaagccaacaaagcagaagaggtaaaactgcctcttacttctgtgatgagtgtgatgtgtagaggccatgtttgctatctgcaagagcactttcctctcatgacttaatcctcggggctaggggccagttttttcacagacaataaatagttacattattagagaccaagtcataacagctcaatgggggtaatcaggcagggaaataaattctatggggctacttcagcgaccaaaccctttaatatttgccttttattttcagaatggaagtgaggccctaatgacccttgatgatcaagctaacaaattgaagctggtatgttggtgatgttttctgattcttactcgtttgaacatgggttttctgtagatgttgctaatactggatctatattgaatccataggaaaattcaattgggatgctgtttttatgtgatatttctattagtctataacatagtattctcagtaggtcaccggaatctaatacagtacttctttaaggtgtcaaacagggctatatgcctgggaacaagcctacactgacacaagcagcctgatatcaaatctgtatgaaatcaactacaatccaatcgtgacaactgttttctatactttaggacacaaacaattacagtgatagacaaagtaactgtctttagtagacacatctgaatctaatccaaatacttttttaagggtgttgaccagatggatttgtttggggacatgtctacacctcctgacctaaatagtccaacagtaagtgtttcgtttttaaatttgcaatgtaattgaaataacacctatactccaaatttacaattaaccagagagcttgagcatatcatggaaacttggaatgtcttgacttttattcatgaaatagaagtgattactagaaaaataattgaatcttaagtggccataggaacctattattactaattcagatatattagtatagaggttaaatctgtgctactatacagtcaataaaatccttcttggtaataacttgggatcagaaggaagagctgaattaaattcttggcataagtcaatttgaaggaagtatgcttattaaatgttaaatcctaaattgtcttagctttttcatttttttctgctttcctttttttctaatttagcagtatgagtttgacattaatagttaactaagattcatttgatgactaacaaatgcctttgttttagaaaattgcccatcattatagaacattatgatatagtaaacctactcatcgatgaatctgtgacttattcttcagatcttctataagacagacctcagacagaaatatttatgtcattttgaatgacttccatcaacttctactatttatttcctagtttcctgaacacctgctattggcaaggcatagcagcaatcaagacacacatgggtcttatcatcaaccattctggctaacagggagtgtgctgactagtgacagagccaactaaatgatgctaattacagtatgttcacctagagtgcagattcagatactgcttctaaagaaggaagttcctagactcgaggatgacaaggcaataactagatgagcaaagacttagtacttattcaataatggggagaggattagtacatatacaataatgggggagagaattagtacatatagaataatgggatatggctggctaagacttccacatcaagtcttcgtgatgtgcaaaagatctcaggatctgaagtgagtgagagaaagagagagagagagagagagagagagagagactgggaaagattctccctccccagagtgctgcagagaagtccagcaggcagaatctaactgcataagcccaacagtcggccaaagcatggactgtgtgcattctcctctgtatacctatgtgggaattgcactgtgcggtgccatctcaaagtccttgcagagcctacaatagaggagttagaatgaccggatagtctttcaaatagtgagtccttcctgactcactcgtccgtgggatctttcacttttttatagtgcttcttcactgttttcagggcaagacctttgatgggctaggctagctgatcgtagttctgggctgttttagactcatcagcagtcttgacaattcttttattagtagtagcttcctccttggaggaaatcaatatctgtgggagtctacttcctaaatgtcactctgaaatgggcactccaagagagaggaaggtactccatacatgagtggaatttcagaggaagaagcaagaaggcgctgattgcttaattggcttttgtgcacttctgaggcattctggcagtgaaaaacatctgggagaagccttagttttatattccattccttgcaaactaaaaatgtttttaatttgtagaaactcaagttttagtttaagaaataagttaaaataatacatttaatcaaagtaggtaatctctggtaagttgttgctgttgttgttgttgtcgttgttgttgttgtttttagctcatggggctaattatgtgttggttagatttttccaacgtgttctctcacattgcctccatatgcagaggtcacaaaatagatgttcctctgactggtaaaactagcatgctctagatttttttttttcaattcttataacaactgctctggaaaatgtgaagcctaggaggaataaaaaaatctaagttccttagactccctcagttatcccgagcggctgtaccttctccaaaattgatgaacagaactttatgcacttcaaataatgtattggcatcccttagaacataaccttttgtaaaatgatggaagcattgtgtttcatgctatttaagaagtaaagagaaagggagagaagacgacacagagacacaaagacaggcgaagagtgaaggagggaaagcagaaaggtaggggtgtgtgatgaccttgaactttaaaaacctgaccacttcaaagactacaggaaatgatccagcatcacagagagtaaacatgacgtgagaggattagattaaggtaaaaagtttaaacagtatatctatatacatgtgtatatagatacccccataacatggcatggggtaaacactggtataaaagaaatagaagtatcaataagaaaagcatagagaaagatctgaatttgaactgggtgattgaagtatacagggcacaatgtagtatctagggtaaaagcaagtggggtcctaccatgtaagcagtctgaaaaccgatctaaagaagctgattttaatgcacataaagaatagcagaaagccaacagtggggttgaggcctggcttggtaaccatttccgggaagctagctaccctgctcacactcccttgctgaagtgacttgcttcactttcacagctgtctgaaggtgctcggtggtagccaagagtaccaatggtccagaccgtccaacgaagccctgatgaagctctgaccacaggagcagactaagagtctcctggccatccactctagtcttttaggtagacttacacttggatcaacaacaaccctcacctgaggagagccttatacattttgcttgtagggtgactgttcagaagtctaacattgtgactcctgtttggtgtcctaagaacaacttctgaagtgtctggaaaggagaactctgccaactgagaacacccaactgtgctaactgagaggtggctcaaaacaaacaaattctgaaatcaagcttcccaaatgcatcttaccccaccttttgattgcttaaaatcccctcattaagaagtctcccattcatttgtttgattaaaagtttttccatttaagctctttcttgtgatgaattcttctagttgcaaaatgaaaaccagcctttaaaaaaaaaaaaaaaaagaaagaaagaaagaaagaaggaaagaaaaagaaaagagaaaaattgattttatattttgcagcaaagaaagtaaaattgattaaaaagagagactatagtttgggcctgattttgttgcctcttctatggtcacaaaagagaaatggaacattttctttgtttaaaagacgtttgaagtccctttgtcctcattagtttaaaaggttctgatttctttaaagttgtgcttgtcccagtgatcaaaatagtgctccacccaggttaattctagatgtctacttaagcttccttcccagctggacactgtttattgtttaaaatctatggctgatatagttaagtatttaatgaatcaaagtcaatcgaaaaggtctttcccaggctaaatcgtaattagctatgaattggaataaaaacacgccaaattgattaaattggtagctttgatgctaacaattttcataagacaagtgaagagcccaaacaattaccatctatatttttctcatataatagagaagaaatggaattagtatagttatgcatttcacatgctttgaagatcccaccctaaaacccatattttttcttagtttattaggtgactttaatgctaaataggtaagaccactgccacaactgagctatgtattaaaattatttacaacaacatgaggttagtgtgtgattgattagatgtgatccctattttgactgtcatgttcaaaaggtatgtccaagaccagatgaagatggtaaacatgagaggtccaatttagctagtaccgttagtaaggtctttgtctgttcaaagagtcatacctacagatcaacataaaaagggagaatcttgttttcccccagaggaaggaaagacacttgactttaaacttcatcccaaccataactagagttttgacatataattcagtggtagaatgtttaactagtatattcaaagccctgagttcagttcctagcactgtacacatacacatatgatgcacatatgagcattaaccattgaatttgctcacttaaagaagtaattagttagagacttctagaagtacaacccaggactggtgactatgtttctcagataggaagccgggccaggtttctgaagtcagctcatctgtccaaacagtatattcaaaccatttagagtaaatcttaattaattcaaagatatcagttggaccaatgcagataatgaacccaaaccatttgaatgtatgaactaaagagaatgtatttgtttttaacacaatttcatcaaaggaaaggcaaccccatgggaacttaggtagggagttgatgggagatggtaatagtcccaaattctaataggaaccctggtagtccttgtcatattgatgtagttttctcatttggattataacatggactaacactgtctctctctttctctctcttttttcccccaaatgtgctaggaaagcaaagatatcctgttagtggatctaaactctgaaatcgacaccaatcagaactctttaagagaaaatccattcttaacaaatggagtcacctcctgttctctccctcgaccaaagcctcaggcatccttcttgcctgagaacgccttttctgccaatctcaacttctttcccacccctaaccctgatcctttccgtgatgatccctttgcacagccagaccaatcggcaccctcttcgtttgattctctcacatctccagatcagaagaaagcgagtctgagtagctcgtctactccacagagtaaagggcccctgaacggtgatactgattactttggtcagcaatttgaccagctctctaaccggactggcaaaccggaagctcagggaggcccgtggccctacccaagttcgcagacccagcaagcagtgagaactcaaaatggggtatctgaaagagaacagaacggcttccatatcaaatcttccccgaacccttttgtgggaagccctcccaaaggactatcggtaccgaatggcgtaaagcaggacttggaaagttctgtccagtcctcagcacatgactccatagccattatcccacctccacaaagtaccaaaccaggaagaggcagaaggactgctaaggtgaattgtcttttccgcatatccattagcagagtgcatgctcgttaccaaagggtggtgtgacgcaagcgctcttccttgctgcttttttagtttcctgtgtggctgtgacgtagaaagtgggatgaggcacatcggtccttcaggaaaatgcccctctagccaacgttcttcctaagcttcccagctgtgtttgccacatctgctttccgtttgcatgtcttgtcacttaatactaaactaaacacaagttgttgttgttttttttttccattgttaatgctgctatgcttctgttcctctggtaagtttaattgtcatgttttgggatgggagggcgagagttcttgtgatgattcccttggtcctgcccccacactaacgccacgtcccgcacacccctcatcgctgacgtccatggtggtggtgaaaaactctcaagtctgtctcctctcttaaatgtaaatgtcgattgagtaacccattgacttagaaacttacaagaccactattaccaacttcattcaaaagcgactccaagtgcagcgtctgtaggagatttttttttaaaagcactcataggaatgtgcagattgacctaataacgaaggcagtgttgtctctgtccaagctaatcaaatagaaggattgtaattatttaggaagcttacattgcgctttctttcccagcttcacgttttttagccaatacggagaccagactgacacaaaaggataaaatgagaaaagtagatttcattttgcaagtccaagatggtatccacttctctacccactgaagccatgtgtccttatccctctcgcccccaacccccacctcacctttggtctgttatttacttcgatagaagtaatcacttgccagtaataataggaggttttcctttccgtggtggttagctttgggtaaacagtggaagacaggcagaagctgtgttccctcctcctgaataactcttctccctccttctccattttgtcagtcttcagcaaacgacttgcttgcttcagacatctttgcctcagaacctccaggccagatgtcccccacaggacaacctgcagtcccgcagtcgaactttctggatctcttcaaaggcaatgctcctgccccagtggggccccttgtaggtctaggtatgttcctcgagttggaattaaacgtgatgctgttaccgtcacccataatgataatgcaggggaggaaggcacttcctatgttgggtgggcaaaagtgggccatgtcaagcaacgctcctcgtgctgacccctgcacagcccacacccctgtgagagtcctgccttgtaggtgaaattcagctctctgagctgccacgtggattgcatgtccctgaacagctagctggcagtggctttcagaggacagttttgtaaaggattctgaagtctggctggcttcaatggtaaaaggagataaagtgagagagccttgggtgctgtctgagttgcaaacgtaggactatgcatactttctatgccatttgccatgatagacagaggtctgtctcctctcagaccccgttatgaaccccagaatgggtgtaggttaagcttgaagccaggctaagtcataaagaaaaagtctgtctgacttctgggctctgctccccacgtaggtctgagtaagcccatctggctttgaatacttgtatctttgcaactcacaatcaatagtttttctagaagagcatctacgtagagatagaaggagaaatactaggggaaaaaaaaaagctacatctagaaggaacatagatggagttttcttagacagtgggatgttgctgggtacattttaaatgtattttcggcttgccagatccaccgagcctctgctgtaggatgctgctgaaggggccttgattgaaggctggccctgttactctttctccacagcctctggctcttttcaggctgcatagttcagttttcagaagccctaacaatagtcttggccaccctgctggggactctcctttgttgtttgcttcttggcacctgtgcaacctcaggcagaatccgacttgggaggtagggggcaccatggatcaagccggactctctggctctttggtaaaattggaacggcgatcatggctttccctacgctctatggaatcagcagtcacaatcttttttctcttcctctatttcttttgtactctccttggctatttttctgcaaaggagagcagtttgagtctgccatgataagtctgtctaaacgtgtcaggagtaggggtaagataaggagatgttactactgttgagtgactgacatccaggtgagtctgagaagccagtagatgcccggcttctgctggatgctacagcaccaagagactctttaaatgcctttaccttttggaggcctcctttggggcgttgttcttttccccgtacccacagtgaaacagctagtatctttccttcatagaaaggcagaggacttgcattggggcctgtgactagaccacatcccaggagcaatgccttgaagaattcttacagccaatatttaacaagtcagcctgaagatacagctggaccttataactgttaatttattcagacgaagtgaagctttttggcgaggtgcccctgttgaggccttggggtatacaactgcagaatactgatgattcttccaagtttggacatgaaactcaaactgagccccacagtgtagcccctgtccattggcagggatcctccgccaaaccatggaaggttgtaggtctggcttccgccggacccagctggggaaccgtctcctctggagatcttgggggcgggtaaaaggcttacaggaagctgagccctcagctttgacttgtaccctgtgttttgatctagcttcagaaggtagtaaaattaatgctttatgtccatactctcttattcctcagtccttgcccgtactttctctagctgggccataaatgtcttaggagcataatgggttgataggaatgacggctggcacaaatgcagacctgccaagcacttaacttcctggcaaatgtaatattgttctttcgtcagaatggcactcccattgatacgatctatggctaaacttaagcagtttcacaaggaaaggcaaatacatagttcaggatgaaggatgataaatgggtaatttctctcatttatttatttatttgtttgtttgtttatttatttatttatttatttatttatttatttatgagacggtgtctctgtgtagccctggctgtcctggaactcaccctgtagagcaggctggcctcaaaactcccagagatacccctgcctctgcctctgcctctgcctctgcctctgcctctgcctctgcctctgcctctgcctctgcctctgcctctgcctctgcctctgcctctgcctctgcctctgcctctgcctctgcctctgcctctgcctctgcctctgcctctgcctctgcctctgcctctgcctctgcctctgcctctgcctctgcctctgcctctgcctctgcctctgcctctgcctctgccgcccaagcactggaactaaaggtgtgcgccaccactgcccagcttatgtatgtatgtatgtatgtatgtatgtatttatttatttatatttaatggctgatattattagtaaatgatccctccttccattcacaatattaatttatttttgaaacattgtttaaactttgtttaaattaaacccacttttaagtcttatataagaaaatctaagcaaagccttgtcttggcttttctgactgtattctgtaatgcaagcaaatcctggctcctgtgtctatgaagttagtatgtggattaacttatcactgcacagtagtgcttcttgtgccttgctatgaagaggtcaaaatgggagaataaggtgctggagtcagggccaacactctttagtttgtccctctaggcatggactgtgaacttcctgatttgattatgttcttgattcagttccctcactgagaaataggcatgttgatcaagtgaggtgtcccttctgtgtgaatggagcaaatgtgttcctagttagatgccagcatttgtgacagtaaaagaatcaaatgccagaaagattaagagagagctccctaaatcaggtatagccatatatacctgagcagaccttggatgctggctccacacccagttgcccaacacccattggaggcctgggtttcctgaagaatacatgacatggaggcagacactagagataacagtccctgactcaggtcaccattccccaggaagaggctctgctttcagctgctttatctcctccacatttcttataactcctcaaccctaacttctggcaaagcgtagtgagcgacaggtggcaggaagcacttttatttgaagcagccttcccaggataatagcctttcctccattcttatatgtaagtctaaaactacgttgacctcaactaaaatttatcttccctctgtatcggtgtgtcaactcaggcagtgttcaaaagcagagagactttgaaagaggagagacttttgaggccccatgtccatttgtgacagctggttttcataagtgcccagcaggaaccaactgttagatgcaaatacaaaacaatgactgggcacagcggattatcttaattaactacttaataatcattgtaatttgcatacgtaaatctgtccacttaacaaatctgtcttgctattgaaaaatcctattcagggtacatccatacatgtttgataaatatttttgtttttcatgatcaggaccttataggggtatattactcttcataagaaggaaagtagaaaggtatggtagaaagaatatgcacaaagcatttgaaggctagctagacagtgctaatgagctaagtttctgagagatttaatgtcttagagtcattatttcagagccagtttcataacttcataaagtattttgccttgggagtgctctacaaatacgcccagaaagtcatgctttttttaaaatttaagaatccttgtcatagggttgaacacagccaaagtatgctatatggatgcttgaaaatgccatgatgaagcccattatttcatacaatcagctcatcattataaaaaataaaataaaagaatcctcttcaagtttgtctcctgataacttctttctccctcttccttcaggtacggtcccagtaacacccccccaagcaggaccctggacgcctgttgtctacagtccttcgacaactgtggtcccaggagccataataagtggccagcctcccagttttggccagccactcgtttttggtacaaccccagcagtacaagtctggaatcagtctccatcatttgcaaccccagcttcccctccaccccccacagtttggtgtcctaccacatctgtggcgcccaacgcttggtcatccacaagccctctggggaatccttttcagagtaataatatctttccacctcccaccatgtccactcagtcctctcctcagcctatgatgtcctctgttctggccacaccgcctcaaccacctccccgaaatggcccactaaaggacattcccagtgacgctttcactggcttagacccccttggggataaagaggtcaaggaagtgaaagaaatgtttaaggacttccagctgcggcagccacctcttgttccctcaaggaagggggagacgcctccctctgggacttcaagcgccttctccagttacttcaacaataaagttggcattcctcaggagcatgtagaccatgatgattttgatgccaatcaactgttgaacaagattaatggtaagtttgctcaagtacctgccaactaatattcagccccatccatatagacatatggcccaatggggagctcagaggaccttctttgttcatcagtagtctacctcctgcttcctctggcactcagggctgtggaggtcacttaaccattcaccttagagccctttacctcagccaatcccggggactggcccaatgctgccctctagtgactgttctcaaagggctttcaagagccattgaaagatggattgtgactttccgagagctgaatgattatcccatatgccatgactacaaggaagggacctgtgagtgtctcctgtttcagatagtgtatatatgtaactgaatgattatctaacccatatgccatgactacaaggaagggacctgtgagtgtctcctgtttcagatagtgtatatatgtaactttctgttctgtgatggagagatagattcctggtgtatgtggtgatttctagctcactggggtaaagaactaagtttcaaagctaagccatcaagtgaatatgtgctgtgtgtgaacacagcttgtctactaactacttgggttctttgccttccagaaccaccaaagccagccccgagacaaggtgtcctcttgggtaccaagtctgctgacaattcactcgagaaccctttctccaaagggttcagctcatcaaacccctctgtaagtatcaaatgccacatacacctatagcttcctgagcctacctttcctgtacattaactctttgatgagaatgcctatgtggctgtgatgtgttcttaggaaacttcatagtataaacatcccatcaagctggagtgagattatgtttcatgggcactatcatcccctgaacttgaggaataataccatcaaaacctctcctttgtgcttcacttaatctgtcttatgcaaacattgatgggagaagctgaatcaaaatagactcttaagaacctttaaagattaaaattcttaatctcccattgatcgtccatcaaaaacaattcttccaagttgagggagacaaatgcaattttctccccagcttttaacattgtctgattggcttaccatctaactggtgcttaaaggaaattgggattctattatgtgtttttgttatcgctataatagtgtttgttctgtttggcttcatcccctaggtggtttctcagcctgcatcttctgatccccacaggagccctttcggaaatccttttgcctagcttctgtaagtggaagagcctacttagtgttgtcttggagtaggtggacggtgagagatggtgatgtagagggaaaagcatgagattttatttttagaattttaaggaggttgagtatgtgtaatttaagagtagcagatatggaaatcaatgctctgataatttaataataaatattaagtattttaaaaatatttttgcagtcataatctagttaggagatgtaaaaatttaggttgtatgttgattcttcagttctatgtggaaataaattcaatagaacatatatttttaaccttctacattttttttttcatttttgtgacaaggtttcacatatctctgcttgacttcaaattctctctgtaatgggaaatgactttattctgatcctcctgcctccacctcctaagtgctaggattacagacgtgtaccatcacacccagttttctgtagtcctggagatgaaacccaggcttcatgaatgaagccctatcccagctaaattccaagacttacctttaaaagaacgatgttcaaggagaagcatggataagtcagctaaacaaagaacaatacgacatctctgccatttctttcttcaatggtgatctcaagttggtctctgtggtgggatacatcactctaacagcagtgactgccggaaatgctaccttgagaagcagtaaacattcaaaatgagtcagaggcttgggtgttccatctctagtggaagttattctagaaaagctgaatctctgccagggtgtcatgtaatctgttcttttcaacaataaatgacaacagttgtgttttaatattataacatcaaagtgaagagaaggaggaagctatataacactatatataggaggcatagcagaaaggggcaaaataagacaaataaatccaaatcccttttattccaatatttcctcatccaaacaaagctaatctctattttgattcatatataatagataagttcctcacatatatcaatcataagatatatttcccattatccatggaaaatgcatttcaaacttccatgaggatttttgaaaccatgaatcacagactagtgccaaccaacttttttccttatacataaatacctaaattttaattgataaattaaacagagattaacagccaacatgaataacaacaacctgtaaagttcatagattgggtgaagaatcatttttttttttttgtcgtgttgctgcaacaaaatacctgacacccaagaggtaaaaggttcatggtccaagtccatcatggtagagatggtcatagtagcaggaactttcatcattggccaacaaacagagagatatgagcactgctcagcttgctttcacccccttacttaactcaggatcctatcccaaggattcccatcctatatttagggtggttcttcctagttcagttactctgatccagatatagatgtatttggtctaaagccacactccattctttaaactagccttgatgttattatatagttgtgactagctttgaacccattctcctctttccttggccttctgaatgttgaagccatccacatgtactatcatatctggtgtatattactgtcttgttcaatgtttagatcagttctgggatatagtatcattaacccctgaaaataatgttttaatatgcagtactttgatattcaacccaaatgctttaaccattattttccatgtttctctaggaagttgtaatgatgactatccagatgagcaaaagactggctttggtcaagaatgaagcagacagccagaaacatgttgacctctgtcctcgctccagctttgacgtattatctgttaccctatttgttttggcctcttgtacttgtaaaatgcctttcattttcctgtctaggctaaagctaaacttaaactatggctttacgtaaattaagctcctaaactctctagctccaatataaatgaagtagcttccctatcaaatccttgtctgttgtgcccccttgaaacttccagaatattctccattctaccctccatttgggaggagcggctacctttacccttaatatcacactgccttgagtcaatgtccaaatactcatagctctcaaagtcatttggggttcctggtgtgcggcctaaacctaaagcatcctattaatagggaagtaagacaccttgcttcctatgtccactcagaaagaattttatttaataaaatgaaagcaagactaacttctcaaatccacccaaggaccattttgagatggtcgtttctcagctaactgcaccatttaccaatcctgccccaagtggtgcttacatttgacttgaagaagagaaagagctaactcaaaacacaaggcattattcaaagctaataaaacaatttctccctggggccccacattgttttcattccagatacgttgcagctgtttgaccctgatgacattatgccctacattttccttgaagatcctgattttatttcatgtgatttttgtttctcaataaagatgattattgtgtgcattactaaaaaataataaagtataatttctctcattctggtgatctctcccaggacctaggctgttccattttcaatctcttgctggctgttttaaatgagaggaaagcattctttatctctccctgtctttctctctttctctttcagttcattttgctcctgggtttatataaacagtgcctcccttttaccaggaatggatttttcacggggcaaaaagcattaaatgtttcacagatctgaagtgcacgcacccactccagtcattgttagtccaggggctagacttctggaaggtgcaccttcttcattctccctatggcttgggggacttagactgaagtttcatagagcaatttaacacagtaggggaactggattctgctcagcagtgaaggactgtattctgaaagctaaatgtgactatgctagacacactgggtccttactggatgactaggcctttatcaagtaactggaaaactttcttgaagccacaatcatggacaaatatttggggttatcattgaaaaatctgcctgaaatatattcctcatagccttggaaacctacacagtacattttcatttccaggctttttgttatacagagctgaagggtttgttcctgccaagttgtgtttttttttttagtttatgttgagtatttttttttcaatgttatctcttgacccaaaatgctcaggtccttgtgggtgttagtccaatcttaccttttgttggaagagaatgactgctcaggttttaaacaaggcgctagccttgtgagcctctgttaattagccccaagtgatccaagctgaagtcctgtgggtttctgtttaatgctagtggttaattatctatgatatgtgtttcttttttcctgtctgacttcctactcagtcattatgaacagacttgaaatcatactttaaaaatttcaaatacctgaagatgtgctaaagtgaaggtaactctttctagatagtcgagtttttgaaagtaatgatcagccacacaactgttttgtatgtacttgtcttcttgtgcacttttctgtatgcaaacaaatctataaatttacgcattcaataaactggaatgacaaaaattt

SEQ ID NO: 23 - DNA, 235505 bp, Homo sapiens
  source 1..235505: mol_type = genomic DNA
gggtctaaagggctttatgcactgtctggagggtggggactggcgcgggtagaaaacgggatgcctcgggcgtgggggcaggcttttggccactaggagctggcggaggtgcagacctaaaggagcgttcgctagcagaggcgctgccggtgcggtgtgctacgcgcgcccacctcccggggaaggaacggcgaggccggggaccgtcgcggagatggatcgcgggccggcagcagtggcgtgcacgctgctcctggctctcgtcgcctgcctagcgccggccagtggccaaggtaagagcccagccagagcctctcgtggagcccccacttccccggctgtggcagggtcgggtccgcgggaggccggaggggagagcgtccgggcaggggctagggccgggcggcggcgcgggagctgctcccggtggggcgctcaggttgcttcgcgaagccggagcgggagcgcccctcttcgctcgccaggaactgagcggcagcaaacttgagaaagcagccccgccagtttcggtgacagcgcaccccacggagaccctgtctttgttcccacgggcgttggtccgatgctcctggaaagcactttgcgggagaacgaggttctccgccgtttgcagcctgccctccctagcggagttctctgctgggcggcgcggtcccgggctctgctcagagcgcagctttccacctgcagcgcccctcccgggatcccttcgcgcgcccagggccgcgggccagagcactcctcccaccaccggcgaaacttggtcccgcggtgacccccagagaccgctctcaccatacagatcatttacgagccaagataaggccgggaggtgggattggccgagagagtggctgagggactggagtcttttcttgaagttttcctttccagctgggagctgggggcttttgtgttgatgaatggggcccgtctgcatggccagagttttggggatcgaatgcagaaagtttctagtatgaagtgctttaaacttctctcaagttgtccgatagtttatgttttaacagaaacagagaagagggaaagagagggagaaagaagcggagagaataaaactagtaagaagggaagaggagagagcgtaagagaagcaaataggaataaggaaagaaggagggaagagaacgactggggcgggagaagagagagagagaggagagagaggagagagacagagagagagagagagagggagagagagagagagagagagagagacagagagagacagagagagacagagagagacagagagacagagacccggccgaggatgaatgggaagggcgaggaggaggctggaaccggcgagctctccccctggctttgcgttgctaggtagcagccgggagctgcgtgtgaccgaccaccagacagacagaggggacgctgctgccaccgcagggactaatctgtctgtggggatgggagagtcccccctttcccctcctgctccttccctcccgtcggacaacttaattgccctacaatgaaaatgaaacccctattgttgtaggattagccaaagcaataaattgattttcctggatcacatattggggttgatgggtggggaatgtggaagcccccatttacggaggagtgaggggagggcttgtggatgggccgtggcatgtattcaaatggttaatctgctttctttcctcaattcttagcgtaagctccttagagggaatcaagtaagtaattatacagcaactcctagcagcacccatttcagacttcctgggaagaagtttggaaaccctaacaaaccccacaggtcttgcaaaagtcttcagaaaggcaggagaggcaaggagagatcattaataaccttcctttgaacaccctttctcagtgttggtaacgcagaaagagggtttattattattgtgcagagtttgcacaatgcttagggttgtatctcatgtcctaaatatagctataggatttactatatgttcctgtcagtgcctggcaaaaggaaatcttaccttgattcatctatgtccttgtacaaccaaaacagatattctttttcctgggttgatgatttagtcactaaataaccaatacctactcttcttgatagttttttgcacccatccatcttccattctatgataataatatataataataatgtgtatagtaatagtaacctagcatacacatatatgtggcaggctttgttctaagcactttatacttattgactcaattaatcttcataatatcccttggaagtaagtactcttattatcactgttttacagatgagaaagtggaggcacagaacaattcagtaatttgtctcagttcatactgctagaaaatggcaaactcaagggattctgaattcagagtctataattgctacagtatacagtgtctggttttctctctctctctctctcttttttttttttttttttttgagagagacagaatctcgctctgtcacccaggctggagtgcagtggtgcaatctcggctcactgcaacctctgcctcccaggttcaagcgatcctcacacctcagcctcccaagtagctgggactacaagcccggggcaccatgcccagctaatattttgtatttttagtagaggcagggttttgctatgttggccaggccagtcttgaactcctgacctcaagtgatctgcccgcctaggcctcccaaagtgctaggattacaggtgtgagccactgcacctggcccgatttctcttttttcttttgtacaaaaaatgtcatgctccctaacttactgtccatgtttgaggttcccaaagaagctgaggggcaatatgcaactcgtaccacctgctgcttcataactgtggatctttttccagaatctctcctcaggtttctaagaccagaacccaagtctccccattcccagtcttcctacttgatcattttaagacgcatttcctctgaatgtcctctgcctgatacgttgagatttctagaatcctgttgtaatgatcctgacttaatatatgaagtaaaatccaatgagattgtaacagcctttatttaagcactaccttttaggtaggctaccattgcaaacttcgcatcactaaaaattggaggggaaaaaaaagagctctgagtattctatgtttagtctttgaaaaaaattataccacatctgttgttaaaaattatttgcattttccttatcttttgtgtaatgcttttcaagaaaaaacattttgcagagtctgaactcgagtcaagctgttgggttccaacattggctttaccactttctagctgtgtgaccttgggaaagtcaaccaactttgcatagctcagatggcttatctgcaaaattgacaagataataagagaatttacccaatgacatcttgtaagcataaagagataaaatatgccaagtgcttagcatggtgtaaagcatatagacagtgaaaataaactagaaaataatctaaaaatacaatatttttattatatttatcaacccttaaagtaacatattgttttgcttcctattcctatttccatttccaattttcaaatatacaaaggaaagtcttctttaagcatttttcactaacagttctctgaagacttctcagaccctagcatgtgattggaagattttttcttttttttttttttttttgagaaaatcgtattggccttaaacaaagttgtattctgtttactaattaaaaaaacttatttttcaaaaatagaaatggggtctcactgtgttgcccaggctggtcttgaactcttggcctcaaatgatcctcctacctctgcttcccaaagtgctgacattataggcaggagccaccttacctggtccaacattatattctttaatccaataaaaatgtggtaatgtttttaagagttagtatcagcttttatgacaattacatcttcacatgaagtttatatgtttaaaaggattgtgggggcaatagcaaacttgtatcgtttttattccatcacaactctggaacctcactgctgctttaatttcacagttgttggcttctctttctctacttgaaaaagtttctctttaccagtcttcataagacttctgcctgaactcccttcagtcatgcacctgtctcattttaatagaaactcagactttttacagctagagggaaccttagatatcaactggtctgcttgcattttttttttcttacagataagcaattagcccaggagggagaagaaaggggctgagaggatgaaagggaaggcggttaataggtttcttgcctaaggacatctagcctgtgacagagctaagatataaatttgcagtggaccattttttagattcatgccttctgaatgtccccagcctgtttggttggttgagatttctagattccttttggaatcctgacttgccagataaggcacagtctgataagcagatgaatcttaaaaacaattggatgggttacctgtccctggccaaagaggaatcctgtgataggttattacaaccatgtaccatgcgctttcagcttggtccagaactgatgccatgtcagtgcccctactcccaaagaccatacctccagatccatttttcaaattcttgagccatcaaagcgcattcctgaagatctttgggttttgtagtgcaggctgctgtaagactaggttttcagtcttactaaaggtaattattaggtcataatcattgttcatgttctctagtcaggcactgtaagaacactgaaaggtttttaaaatatttaaattaaaattttaaattatcatttaaaaataatgataccaggaacctagatgtatttcctgtgtaatcagaagcaagtgcattgtcatattggctttggagtttctgttaagtcctagtagctagaacaaggtaagtagaaagtagaaggtgctgagctgggcgtgggggctcatgcctgtaatcccagcactttgggatgctgaggcgggaggatcatgaggtcaggagatcgagacctgcctggccaacatggtgaaaccctgtttctatttaaaacacaaaaattagctgggcgtggtgacgcacacctgtaatcccagctactcgggaggctgaggcaggagaactgcttgaacacaggaggcagggattgcagtgagctgagattgtgccactgcactccagcctgggtgacagagcaagaatctgtctcaaaaataaaataaaataaaataaaataaaataaaataaaataaaataaaataaaataaaaataaataaaaaagaaaaaaaaaagaaaagaaagtagaaggtgcttatgaaagagtgttgaatggataggaaaggggttctcaaggttgactgcacgaatctagagcaactaaaaaaatactaattgtgaagccctattctagcatggaaaaaataagcttgatggaacctttggtataaatcaaatggttctatcgtatcctattaactttatagtcttgagtaattaaaaatttttaccactattgtgtattctgtgaatgtttattttattttttccatgaatatttattaaatatcaacagtgtgctgatgagtcaatagtatcaatactacagaaacattaaggaagatgagaactgaaaagaggtgtctacatatctcgcaattaaaatggactgcagttttgcatttaagattctgaaatagtcattgactcattcctaataaccctgcccaggatctcaccagcattagaaagattggagatgtttcagcatccgagttctgggatgcttcttgataatgatcagctagtagttgttttgaaatgtcaagagcatttctgtggttcttcacatgttcctaatgcaaatgtttccgaagtaatttcttgacagttacagtgttttgagatgaagtgggaagggcttgtgattttgaagttggaggatcttggtttgattcctacctctgccatttattatctgggaaatccagtaccacacatgctgggtgctctggggcagttttcttatctgtaaaatggacatatatctacctcacggggtggttatgcaaaggcaatgaatgtgaaatgtttaataaactgtgaagtctcatatagatttccattcatcattattacccaatacgagaattttactttttccaaacttgagaggaggaagatgttgcagtattttggtatcttctttaccgtgggtctgagaatgatgcacctgtgcatgttgttacatccttacagtggctaccacaacttcacatgttattcagtactgttatgttggtgaatgtcacaaaactaagttaaactgtctgaggcaaaaaaggaaggttattgaaatacatagttgaggctgggtgtggtggctcatgcctataaatctcagcactttgggagtctgaggtgagcggattgcttgagcctaggagtttgagaccagcctgggcaacatagtgagactccatctctacaaaaaatacaaaaaattagccaggaatggtggtgtgcccttgtggtcccagctacttgggaggctgaggtgagatgatcgcttgagcccaggaggtcgaggctacagtgagctgtgatcatgccactgcactccagcctcagcgacagagtgagaccctgtctcaaagaaaataaatacatagttgaaaagatacagataattaggttgatccatttgagattgattttttttcctatgcagaaatagtcaaatattggcaatttcatttggttcaacctaatataaaatggaggctcaaactatgtcaggccaatcttgtcttttttccgtctcctggctctgagatgactccattcttaaacatgttctcctttgatgtaaagcggctgtcagtggctctggagccacctcctatcagatcacatccactgggaaagaaaaagagtttttatcttagctattcccagcaaaagtttcagttgcatctcagggtctctacttaggtcataaactcattggagaaccaaccactgaatcccgggtcatgatgtgttcccatggcttaggcttgggctgtatactcagtctttgagatcatgtatgaaggggtggagtccagagagaaatgggggtaattattgggagaatggtgaacagaggctgggatgcaaaaataacaggtgttcagtataccttatcagataaaattgactgacgatgttattttcattttgtatgtgaagacacacttgaaaaagctacagaaatttctcaagagctggcagccctggggtaacttacagaattgaaaggaataaagtattggaaacattaagaaaaaagacatggtgatctgtgcccatgtgaccatgttgcaactttaagtttagaaggagaacaggagaaagaaggacttttagaaggtttatttggatcctaaagttttcttatttggagcagagctttgtgatagacaggaaagttctggaaaatgagctgagcgatcagactacaggatcccttaagtctggtgcagtatttcatttttctgtgaatcttaggctcctactccttttccaatttacttcactccaatgtttatgttcctaagagtttgtctgttttccaagcactagtcctttgctataaggatggggtagagagaaagaagcttaaagagtttgcagacaggttaagatgcttctgtggagacagaacacatcttggtgcacatctgagtgtccttagcacttcatctatggacttctttcataaatggtagaacacgtatccatcacaccttattggattaattcagaaatgccagatatatgtactctttgctgatggttactttgttggtctctaatttaagtcttatctctaatcacattagctgagaaaatggagacattatcattctaaaaataagatggttaacttttatattaggacacttctgatttaggatagcactgaaattcagtgcaaagaaatgtaagtctttcctagataatgacagattagacaatttgaagtttcacttttggtcattagccctcaggtcatgcctgacctcaaggttactggaaacagtgagaaatgaatgaaaggaggaaatgtaattaccattctgtgcattgaatagttgagccactgttaccatggatacaatggcgcatttattgtccagatcttgagatccaagtttgtaagcaatatccaaggtctcctttaaatttatgtactatcagcgaataacacatgaagattcctggtaactttgaaaataagtctttcctcactgatctactgattcacattaagtaagagcatgtgtacttttgaaggtgttgaggaaacctgaaaaagacgaaaaggaaagtagctacacttctgttatgctggacattcttggattcctctataaaaatattctgtcttatactgtcagtgatttgcttgtcactttgggcccagttctttggtttttatgtcattaacaaggagaaaatttcctgagtaaaggttgaaaaaatcaaaatcgtttatttttattttttgagacaaggtcttactttatcacccaggccagagagggtctcactttatcactcaggctggagtgcatggctccctgcagcctcaacttcccaggctgaagagatcctctccgcttaaccccacaagaagctgggactacagacacataccagcactcacagttaatttttatattttttgtagagatgaggtttctccatgttgttcaggctggcctcaaacccctgagctcaagtgatcctcccgcctcagcttcccaaagtgctgggattataggcgctagccaccatgcccggctgaaatcatttattttgtcaggaaattcttaaagttgaatttaagaatgaaagtattttatcagaaatatggcaatcctacccacattttaatctcactagaaggggggtgatacatgctagcatgtacttccacactggtttaattttgatgtggggaagggtgtggagaatactttttgttgcaagaaacagaaaacccaactcaaaatggcctacacaataaagggtatttcttggcttatgtgagtaaaaaatactgaggcagagtggggttcaggcgaggtgcagtcagggctccagttctctttctttgtgttttccttgaccctactcccccctaagtttcacctttgtgtgcggtctggcttcccatatgattctgatatggctgccagggcaaatggggctacgtgtttccttgatcctatccagggggaatccaactttgagaaggttttagttatgttctcaaaagtattatttcatcacaataacttacagattgttagaatttctaaggaccctagacaaagtcagctagctccccaaacttgacatatcatcaaaatcacctgaggaacttaaaaaagtatagagattcttaaatcaaaactcacccttactaaagcaggggtatgaaaatctgtgttttttaaaaattttattttattttactttcagttctgggatacatatgcagaatgtgcaggtttgttacataggtatacatgtgccatggtggtttgctgtacctatcaacctttcatctaggttttaaggctcacatgcattaggtatttgtcctaatgctctcccttcccttggcccccaccccctgacaggccccggtgtgtgatgttcccctctctgtgtgtgatgttcccccccctgtgaccatgtgttctcattgttcatctcccacttatgagtgagaacatgcggtgtttggttttctgttcctatgttagtttgctgagaatgatggcttccagcgtcattcatgtccctgcaaatgacatgaactcattcctttttatggctgcatattattccatggtgcatatgtgccacaaccaacccaaatgcccatcagtgatagactagataaagaaaatgtggaaaatctgtatttttaaaagtttcaaggtgattctgagggctggaccaatttttgggaacgtgtgatctaggtaccctctcatttttcagttttgtaaacagacttagaggtgaactgacttaccactgcaaatttcttcagtggcagttaaatatactctgttaaatctctttcttttggatgggaatgttacaagctagctacaacaagaaggacaggactcttttaagtctgagggtgacatgaagtactaccctcattcctggccacctccttttttggccagcatggcaggtcctgaacctctccctaaatatgccactgtttgtgtcttaattgtatgttttgttcttaccttggtcacctttgaagttccccccagaccctcctaagaacgttggattcattgaggtaaataactgttgcaggtcttctaatcttttctcacctgaatctgaattcatctcagaacacccctgacacagcccactggcttctagagaagctgtctgttccatgcttggaatggaagtattgaaaaacttcatggctcatttcctttgtatcccagcctcaactctttgttgacctcattgggacttacagtttgttgatcctaccgcctcttcaccatccctcaaatccctcacctatttacttcctcagcttatattttatggccatcattaatttcacttccctgcatacatacgcgctcagcagcttggcccctttatctggctctgttgtgcttggcaaggccctgatcctggttaaatccagttctccacatctgcaactctgtagctaaacatggcaggagaaaaacacaactatactgactagcctcgcttgacattcatgaagccaatctcaagcttaggacttgcttcctagtctgtctattgcctctcttgcttccttatatcttctcctctttcctcaaacctctgacatcaccttctcacatgtagagtgagctttttaaaactgtgaaaatggaagcaaccagaagagaattccataaacttctataactcaaccatcatcatttgaacttcgtcttatatcttctgtctttcctcctattactctggaagaattttcccagttcttaagtccaaccatttcattcatgttctagatctcattccctctcacctctctgcaattgtcccctctttcttttatgaaatcctctgttccacattaccttctaactatcactctattttttcggttccactttacagtaaaattcttgtacagatgtgcctatatccactgtaattacctttcaattttttctcaaatccatgccattttgctttagccctcatccttgatagatatttttttggtcaaagtcactcatgacttccatgttgttaaatccaatgatctattttcagctctggtccttatttaactggttagcagcatcacacacagtgtatcctgacttcctccttgaaacacttagttagattttcaagaaactgccttctcctggtttcttttcttccttgctggcctacccttggtatctcatgcttgttcctgtctatatccctgacctgttttcatctctagctacactgcctccttggtggcctcatcctgtctcatggccctctttgaagcagggagtggtttcccaattcagggaggcggcatggactctggtggaaagaacatcacatgtcaagtcaggacattcatggatcttgttcctgaagaaagaaggaaaaataggcacaaccaaagagggccccaggctgctgaaaaggacccagggccacttgtcctctggggatagtctctgtcatctgagtccccactttttttttttttttttttttttgcgatggagtctcgctctgtcacccaggctggagtgcagaggcgtgatcttggctcactgcaacctctgcctcccaggttcaagcgattctcctgcctcagcctcccaagtaaactgggattacaggtgcacaccaccatgcctggctaatttttgtatttttgtagagatggggttttgccatgctggtcaggctggtctcaaactcctgacctcaagtcatcctcctccctcggcctctcaaattacaggcatgaaccactgtgcctggcctcagtccccatacttttgaggactccatatatacttctttaccatgtacatgctgacaactttcaaatttatgaatctaatccagaccactaccctatagtctagacccacatatccaactgctcatttgacatgtccacctggctggccaatagtcatctcagacttcacatgtctgaaattgaactcctgatctccactaatgtccaaacttgctttccatgtggaatttctcatctcagcaaatggcttcctcatccttgctcaagcctcaaactgtatcctactttgacttttcttttgctcctctaccccatatagaattccttagaaaatcccattgttttgatcttcaaaatacatctagaatccaactacttttcaccatcttcacttctgccaccctgattcaaccgactgccctctcttgcctcgacgattgcaatggcttccatactgatttccttgctgtagcaacttttttagaacatcagtcagatcacagcacccctctgctcagaagctcccatggtttctgtcatactcaagttgggttgcccaaaaacagacactgagatggagcttggagtatataatatttattaagatcaatgcgtgtgaagggaaagggaggaagcaggatgggcagaagaagaagttgaactctggcagctgttggtcaacccagaggaagctctggagcaagagttgcctgttagagtgtcctatgtcaggctgaaatggccttgcttaatcactggatgtggcctgtcctggaaggacacgaccttgggcaggtggctttctatagctgaggcagaccccaaaggagctgattgcaggaagaaagtccttcctcatagctggtccttcctataaggggaagctgcatggcacaactctgggtgtaccactgcttcccatctcatgaagagtcaaagtccaagtccttactatgatctacaagaccctaaccatttggccttcacatcacctccctgacctcatttccttctcctctccccatgcacagtgcaccaggcacagtgatatccttgttttccctgacatggtgagcacttttgggcctttgcacttgcccccctttttcctaaatgctcttgcctcagatggtgcatgacttacttcctttcctcctacaggtctttgctcataggtcaccctctcagtgtggccttctctgattctttcccgacctcttctttcctgatttactttctccattgcgcttaccaccatctgacataaggtatgtaacttagttagttgtttgtttatttccttacttattatcttcccttccctaagatgtaaatggcacaagggcagggattttcatctcttttatccattgctttccctagtgtccagaaaagggctaaataaatgaatatacattgaataaatgaatggacagatgtcaccatgggtgctaagaaggggcatcctcagctcatcaccattccctggtactaccagcccttaattcctcgaggcccctggaggcccagtcaaggtcctgatggagaaaaaggaaaattgctgtctctatcaaagcaagtggcttagcaacgctgtttctctcgatctgactccccccttttctccaccccagtgcctcccactcccgccctgctggtgattcccaatgcatttgagtagttgaatctgcatccttctttttaacttccatcccagatacttggttaccctgtgagaattcccctgtacatacagaatgggtcattctgctatttttaggacagatttgatacagtagcttttacaaaaagataagccaaagtttttagacttcgtgttagtggactgtcattctgtatttaaacagaacacaaaagaaagctgtctgagaccatgacacagtgaaaacagccttgatcaaacaaaaggccctctttgaagaggggagtggtttctccactcagggaggcagcatggattgtggtggaaagaacatcacatgtcaagtcaggacattcatgggtcttgttcctgatgaatgaaggaaaaatgggcacagacgaagagggcccctgactgctgaaaaggacccatggccacttgtctcctgggcatagtctccctcatctcagtccccattcttttgaggactccatacgtaacaaataggttggaggcaggagaatgatggaattccacacatagatgagtagagaagttgggaaataagccacaataaaagtgactaaattatttgagtgctttctataccaggcattggcctaagtgttttgtaggtattagtttacctacttatgtagtaacagtaaaaattttatggataaaggaccaagacaatgacaggtgaggtaatttgcccaaagcaattcagttactaagtggcagagccaacatttgaacccagaacccttatttgtatatgttgtcaccatggataatttggagcaagtggaagatagtcctctgtacgtaatcaaatgaagcctcatttaatttctcatattatgatcagatgacctcatttcagaggctggtaccattgcgacccaacttttggacatttttttgctactcttggcagttcattcattcattcattcattcaatatatgttgcagccttatcatgctctaggcgtgatgtaactaggtactgcagagtatagacagagaccttcaacataggccacatccaaaacaacttactattgaacagagtatatttccacttccttctagaagactagaagactgtactttttaggtacggattgatttctctctgctgggtttctcctatattactatttcattatctgggaacaccttttttttttttccctctataattatgtgtcttttaattcaaaggacccttacctaatcagagagttcaattttaaccttccgttagggacagcagtcatctataaattttcagaggttgttgttgtttactactaatgaaaaaaattattaagttctcttatttaaagtcactgaagaaaaaaatgaacaaccaagtgagagctgagtttctttacttcccggagaacactgctgttgtagagatggagaagacatttcctatgtgctggatgtgcttaaaggtctcttggtcccaaagtatctctcactacggccaaagatctctgctctgtcattactaaagtcagttcttcggagtaagacattctttcctcctgaaactcctattacaatgtggaaatgttcactcctgtagggtaaagtagttagttgagatagtaatgcacagtaaatgtttgtcagagcaaggttcagagagaaggagacacaaagctggtatgttttaatggggatgaaagagggaaagaaggtactagaggtgtgatatagtcttgaaaataagccaacttccttttctggggaataaagggttattatgcttgtgctttttcttagaatggctttatggggaatttcagctgtgatctattaggaaggcctcaaagatagaacttaaaagcttctagtatggctgtccttcctctagttagcaattgaaactgagttgttacaacaaaaggaaaagttgtcgttaaaagcaacacagttgcaagactccatcaaccattccttggggattcatcagtgcctggtaagtttgagaagagacccttggattttaatatacatggcagttataatttgtctagaccataatgattactattaatagggaatcctgtttttctatttttaaaaaaatttagagatgggggtctcactatgttgcccaggctggattcaaactcctaggctcaagtaaccctcctgcctcagcctcctgaatagctgggactaaggtgtgtgccactgtgcctagctctgtttttctttaaagttactgtgtaataaaaaaagaatttgcaaatgcataaaattgaatatacacatgtcccaagtcaattgtcaaatgattggtttttatgtaccaaaattctgcatttttttttcaaggtcacttctgatataagaatttacttcttccctaatatttggttcagtgaagtgttgaaagaatttgctaagtaatcattgaaagctaagattctagtgaaaaacaaaatgcatggtttaaaaattgaacatactaactgaaagacagtggaagttagatgcttcttgctgtaaataattaaacccaacagtgcagacgagagaacatggcaccaagagggacttgggctaagaaggatcatattgtattgaacactttcgtttccctgtaagggaaatcaaaagggtctttaatagttgttgctgattgtgaatatgtgcaacaaaatcccactgtaatccagatttatttttcaagcattttgctgtgattgaaggaaggagaaagggataggaagaggatggagttttattaaagctgtagttacttcttccctttaggaggtctaagtgtgacttgtcacagtgacctgggactttgattccctccagggccttcctgttctatgggcacattggtggatcaaagacaattgacttttgttttgttttgttttgttttgtttttggagagaagcagtggttctgctaactcagaacaagaacgacaagagtcatgtaggatgtttttctgagtttctctaacagtgctcgtttttttttttttttttgaccgccccctcttttccttttgaggtggggccaaggggtcaaacctccatttttctatctgtaaaaaagagaatcggcctttatgaagtgctttaattttaaaaattaacataggctaaaattgctgtgtgtgtgcacagttctgtaaatgttagtgcatgtatatatttgtgtagccacaacctcattcgggattagaacagttcaatcacccccactaactcccttgtgctactcctttgtggccacaccctcccaataaagtgtgttttaagttccttttttgaaaactgaccttcccagatgaatgtctctgttgccttttatttgttcatttttatttacgcagtgttccttgctcatttttgaagtaattcaaaatgacactcacggtaagcttgcaaggctgcctttcctttactataacggagaaaaaattctggaaagaaggcagctctttcagtatagtcatataagaacaaaatttccccaaacttggcttgtggctagattggaatccgtaaagaaaacacactcaagaaatctctcttgaagaggaggacagaggtttattttttatttaacgatttaccccttgacacctgggaaatgattagttgatgttttcaaagaagattaagtcagtgtggttaattaactgtggtaatcaggtgacttaaatcaattaactccttgttaacaatttccatcaattttgtaaataaatgactaaatcagtaaattgtactcttaagattaaaggctattttctgatttatttttttgatgacaaattagagtgtttccttctcatctcagtcactgcctgccactcttgctcttaatcataagccagttttagtttgagaggagcacaccagggaaacttttaatatatggttttaaggaaaagtcaggcttaaggacacctttgctccttcatctcagcacatttggaaagaatgatttagtgagagcagtagttgggggtgggtgtagaaagcaatcctgaaacacactctaggataagcttttattattaagtcacttaatgtcttgttttatttatgttttctaagttaaaactcgatgagggatataataaaatgaaacagggtttggctcttagctaaaaataaactttaatggatgtcttacatgctctatttagagggaatttcacaaaatattgggatatattgactgcattcatttgtaaagcttgattgcattaaaaataccatacaaatatacaactaaaatgttgttactttttagaatctttataattgaaaattctcttccctgcttacataactttattatgtctttgtctccaatgaaatatgagctggataaactaacacaagaacagaaaaccaaacatcacaggttctcactcataagtgggagttgaacaatgagaacacatggacacagggaggggagcatcacacactggggcctgctgggggttggggggctaggggagggatagcattaggagaaatacctagtgtagatgacgggttgatgggtgcagcaaaccaccatggcatgtgcatgcttatgtaacaaacctgcacgttctgcacatgtaccccagaacttaaagtataataataataaaaaaagaaagaaatatgagctggaaaattataaaaccatatcctatgcccctgaatatgccattgcattctctgaggattttcactgtaggacagatgatataggtttatttatggtttcttcaagaagggatatttggcatcttgaataacttttgaggagttagtaaatatttatgtatttgcaaaaattctatgctattctcacattttataaagagaaaatttctatggcttcctttaaggtattaaggatagattaaattgtgaaactgagctgaagccactgttgtaaatttaaatcactggctgccaagcaaaattctgggctcttcctattattatagaagctttctggccataccccaactaccccttcccaacttccctggacatagttaacctgtggccaaaccctttctggtactgggacatggtctggaatcacagctcagagatttagctcgactgctttccagatgtgtacctctgaagctctctgagcttcagtttcctggactatacaatgggtgttagtaatttctaccttataggtacctgggaatatttaaaggatattgtgaacatgcaaggtcctggcacttggtgagcattcagtaaacatttggccccacagggaacctgatattaaatcattcatagttgaccagctcttggttaggtcatgcagcaaagcagccaccatgctgtgattttttgaaataaagaaaccacttgtcaaattctctatccatagaaattgctggggaaaaatacagctttttaaagcagatgaaactactagacaaaaaaatgttggaagacaggcctggtcacctgcctttcttcccccaagaatgtttggttcttcacctcccaggtcttgaaggcacagatccaaatgtaaagttgccaagaagttcaaacgttggtggacctggtgtttccattttaggtgtcctgtgcatgctttctgtaacttggttttatgcagaacttgctgatgatgtctctgtaactctgagaacaggaatgatggaagcatgggtctgagtggaggtcagatgtgtcctctgggcaaggagaaggatttgcccagggaagactacacttgaagaggagcacttgattttgtgagaggttttagacagagcatgtaagaatcacagtcaatgaagagttttctctcttgcaaaagttccttattatttcatgaaactacagaaaggtcagtgagatgttcaataggtgagaaagctgtcaagctagacttggttaataattacagttaaaataatcactgatgtatttctttcacacacgtttattgcaagctttttttttatcaggaactgacatgcatagatgaataagacatgcaaataaacaattgtgctacagggtgagaggtctataatagaagtttgggagcacagaaaaggcagtgatgtagtcaactagacctgagaggaccaagggccaaggaagaccgcacagattgccatttgaactgagtcttgaaggagttgggagagtggactgtggaggattttgtatgtcaagctaagaagtttggtgcctttgaagaaatgtaagctgggaagtacaatgctcagattttcattttgtaaaaagaatacttgctgcaatgagagaaagcagatgaactagttaagttagaggattactgggattatctgggtgacagatgatgagggtagaactagacttgtgcacttggaagtgatgagaaaaggagagagtcaccatggaacaaagagaaagcttttatttgttgccgtttttgataattcttgttatttgttttataagttggcatgttttatttatgggaatattagacatgtcttttcaatgtatgtgtatgttaattacattcataaatattcaactttttttttttttttaattttcctgcctgaaaaatttccagcttgctgtctgtctgggcatagcgtgtgacattttctttgttttagttcactgattcctagttggttcatctccctcagggaacctttggaaacatatagtagcattttttgattgtcacaatgcctgagtatccctgccagcatttagagggcagaggacaggaatgctaaaccgttgcaatacacaggatagttccatactacaaagaattgtctgggcttaaatgccaatagttcttttgttgagggcccatcttggttgataggaagtgaatagagaggcagaaagggatgctattggtaataagagcggtcatacactgaaacttattatatgcctgatatatagtcaccatagctatagcatttgttcttgtgacactccagggaggtagataccattactattccctttttactaatgagtgaactgaggcagagtaggatatttggctctgggcctcacatacttaactctaatactctgtttttccacatgctttactttcttgtaactttaaattaataataagaggaaaaggagaaccacacttgctttgtgctttacagtttgttaaatatcagaatatacctcctggaaacatttctgccagtttagtagaatattgacaagttatcgcctccaagcatttttaaaaatatggaaaatatttgatgaaatttttttaaaattaggatgcctttgtagattggaagaaactcttatttgatggaaaaacagttggtgctccataaatgcctggggaattgaattgactctggaggcacttagtgtctttagagggtgtcaaagatcttgcaaatttattttaattttaattttaatttttttttacttcacataaaagagaatctgcctcacgtatgatctttgtaatttgaagacgtgccagtgacattgatgaagaatgtgactttttcttggacatgccttgcacttccctgtttctgtgccagttctagtttgtttcctctgtgaggcgtcccctcccctcagatccatctatctgtagcttaaatgcacctttctctacaggacctttcttgatatccactgaatgttatctgaacctctcttacagcatgtctcctcatgccatgagatacaatcatttgtgtatgtattttatctcttcctctagaagagtaccaccttttgggagaggcatagaacaggaccactgatgctaagagtatgcctagctcctctggtctcttgtgtctggcacagtgtcaggcataagcatgcactcaagaaatttttgtttaatagaaagtcaaaagaacagcatgtgttatagtaaagcaactccatcatggtggggaggtaataggcatgctctactctgggctcctgtcgcagagaggattttgtttggcttgaacaagacaaacatttaattctctcttacataaccagcagtggaaggctggtctggtggttccatgataccattagagacacaggctccacagtcctctgctggtgactcccattcctgaagtcacctcattgtccaaaatggctgctgtagccatagccatcctttctctatgccaggtagtgggattgcagaaggagaaaggaggacatgccttctctgtttaaaggagactttccagaagtcccacacaacactactgcttgcatttgatctcatcgattaagacttagtcctatgatcacatttggctgaagtttggaaaatgtagctttttagctcagcacatagttcacctgagtaacactgggttctattactgaggagagagaggcaaatgaatgttaaagtatgccatgactgctcctggccaaagctggtcgggtgacactgcacatcttctcttcagctttgaataccacattttgggagaggcatagaaaatttgaaccttatttgaaagagagaaacaagaatgatgagaaaactggaaacaatattatgggggaatgatggaaaaactggagatgtttcttttggacaagagaataggggaacaatggttagctctccaaatatttgaggaactattatatgaagaaggataaaacttactctaaatgactctaagagatgggaaagaaattgtagatatatcgtatgcaccaaaagaatgctggaatttgactttagggtcacttttaacctttgaccttatatagtacagatgcataccatatagatgtatccataagtttgtgcttttgaggttaaaatattgcttattctctggttacttcatattggaattctctttactgagggttgctatggtgataacacccttagcagtctgcattttgaaaagctttggacttttccttttgtgagatgtggtctctatgtttcccccatgcttggcgtttttcaaaatatcatcaagtcagaaacaatttccaaatttatcagagtgaagtgaggagaattttaaaattgtagatactaataacaggggttagtaattctatattgtacaactcagtgattcaataaatattgtcactatcaacttctttggattaagatagctatgtttaggcaactggttagtgttatttagttaagcatgtattttttaattattactaaatttcttaaacacccttgaaatataattgttgaaaatgtcttaaaaacacagctagtatcaaccagagaaataatttagcaaagagttaatttatttcactaagtagtgatatatttttgaacgcatgtggaatagatgtgtgcctataaacttgactttgtgaattaagttttatttttctagttcagttttactttgaatatggatatgttgttgttttgtgaatcttagacatcagaaagatttagttgggaagagaagtaataatgtaaaataaaagtaataataaaatactcaaatttctgtattaaattagcttttgggggaattagctacataattaggttattttaatagattttcaaactgggttgcagatgatgaatatagaagagctatatatatacataaactctcatataagcaaatatataagaagcaaaaaaaaaaccctgtagaattgagagggagacaatatttggagtttaaaggatcagaaaacactggcctaaaaatagtatcagtaatcaatttttattaaacacttactgatatgccagacccataatcctcactctaccctcatattaatgttatgagtaagagctcttattatctccgtttttagatgaggaaactgaggcacagaaattaaaatggctgtcagatagttagtaagaggtggagcagtggtttgaatccctagtatatgactagaaggacttcaccctggacagttacttggcttctaagcagtcttcgcgtgctcttccccttccttgcccttctgtaatattatagtagtttcccagtagtatgcagcatctggctattcagactttgtctcttaaccttctgtggaaaagctgttgacttttagacatgctgggcagaatggaagaaggaaaatacagactgttatacttggagaaataatgatttcatatgtaacagtagttgaatcaataggtggacaaatttattgaaacttcttgagttaatccagtgatggtaaacaaacacatggccaaatgagcactctataaagcatgccttctggaatgcatattgtcttgtcttgtctttttccttccttccttccttcctttcctccctccgtcttcctccttttttcttttcttttcttttctttctttctttctttctttctttctttctttctttctttctttctttccttctttctttccttctttctttctctgtctctcttacattctatctttctttctttcttccttccttttttctttctttctttctctttctttctttgtttttctttctcccttcccttcccttccctccttccttccttcttcctttcttttctttcttttctttctctctttctttctttcctctcctcccctactccctctcttcctccttccctacttccccccatttctttttctctttcttttgctctgggtttgctctgtcagtcaggctggagtgcagtgcagtggcatgatcatagctcactgtagcttcaaactcccgggcgcaagcgatcctcccacctcagcctcctgaatagctaggactacaggtgtgcaccatcacacctggttaatttgttttgtttttgtagatactggctctcactatgttgcccagggtggtctcaaactcctgggctcaagcgatcctcctgcctcagcctcccaaagtgttgggattataggcgtgagctaccttacctggcctcaagtctgtttcttgatcagtaagcctggtaatattgggctgtcttgtgtgcatatatgtagatgtacatgcatgcatacacatatattccactttgggtggaatggatgaatcttttgtttccagtggaaggagttctttgagttacaaatagtagaataagggctttcagtttaaacagaacccacatgagtgtttcattaatcatgttcacgtgttaatggattctcttgaggcctttggagtcattgtttttgcaatatttccttagggcctttttcttcagtccagattaatctaaaatacattgcactgatccagagatgtcaccaaattctcctgaaaagccctttgactgtatttgggctggcctgtgcttttatggaaaaatgctatctcactgctgatgaggtttctggcattagcaaagatggccttatacatggtaccacaacctatgtggtacgatgttaggagccctgataagatactctgttcccctacaatctgctccatcaagccagtgaggaaggtatgtaggcattaggaatgcctaaaatgccacaattagaaaattcattccttggagggcttctgttttctgctgaaagtgcaaacacccgtagaaggctttaagaatctctcaaaccttcccgtgaataagttcacctgggagcagatttttggggtcagggtcgtgagccatggaaactctggccatgtcatggggatctgagggagagagaaggagaggatttttagacagcggtgggggaagtcaggcggaggtgggaccatttaactagataaggctctaatcgtctcattcctggactatcagaacagccttttaagtttaagttgcttttccctctttgtaaccttacccaccaaactttgtgaagtgttgagtgcttatagtaaacagagtgaacataactcttcccagggaagaactggctgactttagtttcttggtttctggaaggagatgggatagttttattggcttgcttgaggatagccaaacggttgtggacaagagggcttgtttcctgacaagtgttattctgccttaagaatacaaagataaatggtctaccagagcttcagtacctgtttgttgcgttgcatttagtttggagtgtttgctctgtgcagtggagaatactttggagggtggtaaggtctctctgtttcattactggaaaagaataggagtggggtcatggcaatggggtatttcattcctctgtgcgtgtgtgtgtgtgtgtgtgtgtgtgtgtgatggagtcttgctctgtcacccaggctggggtgtagtagtccaatctcagctcactgcagcctctgcctcctggtttcaagtgattctcctgcctcagcctcctgagtagctgggattacaggtgcatgccaccgcgcctggctaatttttttgtattttcagtacagatggggtttcaccatgttgcccaggctggtgttgaactcctgacctccagtgatccaactgcctcagcctcccaaagtgctgggattacaggcatgagccactgcgcctggcctcattccttcgtttgcaggggctggatgtctaggtttatggaaatctattctcattcaaacagaaatagggtaacaacttaagataataaagtttttctttgaatgaattagaaaggcattattgtatgttattttagtcaaataatatttttgcatttattgcattcttctgttatataagagaaagtttagagaattaggatagtgaatacttttaatgcttgttttttttttttttttgagatgaagtctcacttagtcacccaggctggagtgcaatggcactatcttggctcactgcaacttctgcctcctgggttcaggagattctcccagctcagcctcccaagtagctgggactacaggtgcatgccaccatgcctggctaattttttgtatttttagtagggatggggttttgccatgctggccaggctggtcttgaactcctgacttcaagtgatccacccaccttggcctcccaaagtgctgggattacgggagtaatccaccacacctggcctttcatgcttttaggaaaaatttgaaattcttttaaacgtgggtcctggagaatcgctgaacttcctttttttttcttctattgagacagaatttctctctgctgtctatgctgattacagactcctgagcttaagagatcctcctgctatggcctcccaaagtgctggggttacaggcatgggctactgtgctggccaaactttttgaatggaaaactttttagcttggtttcagttgattaatcctcaatttctttatgtccttaattctatggcttatgccaaggcatgagttgaggtcaacagaaatccttttatgatgatagaaagataacgatgtccaagtttaatgtacagtataatgacttaaggtcaattctgggaaagcctgtatgtttatcatcaatttctttttggtgatggaattatacacctacagtatttcatgtaaaactccagaggatcacctgaaatatgaatgatttacaatggacaaaataataaaaatgctcatcgtaggaaaatacaaaaatatataaacaagaaaataaacataaaaatgcataaacaagaaaatagcaagttgggagcaagcttgcttttgactctagtttgacctgtgtttctcagaataaatcttgattttcactcttgcccttgaccgaagactgggccagtggaggcaaccaccaccatctgtgctttcagtgttgagcatcctaccaagcaaggtggcttagattttgaaagttttctctcagtcagatagtaggggaacaactcttagaatgttagaattagatgagtagtgggaatgccctggaaggaaccacccttcatggagggacggctgtgcttcaggcattgtgccagaggtttacagggacctctttaatcctcaccgtaacctgattttgcaggtcagaaattttgtaggtaagaaaactgcatactgtatcagtttaaattcaggttcatcaagctaaaccagttcagtaacaaatatttattgagtgaaggttcagtggtaaatgagacacaaacagttcctgccctcatggaacttagagtttggaatgacacagggacagtcagtgctttgccagagttgaaagccatgcatctcttggctttctggcgattgctttttccattggtattcttattttagccattcttactgaatttaatttaaattttacttaattattataatgcctatggatccatgttctgcatattagctcactcatactcatccaagactgtaactataggtacccaacacccagaattgagatggccactgaaaactctattcttgaccaacactctaatatcattttattttctttaattgcctttgtaagaagtataatacaaacaaaactccagtaagcaaatggctttaattatttgtgtgtcagttagtagagattttattgtatatattttctggtatagtttattactgaagccgtacttctttttagcattaaaattctaaaattttatatttataatagtgacaaaggtttttactgtaattactaatgatatttaaaacacagattaggcaaaatcttaggaaatataccctgctttttttccttccatttctggcaatcactgcagataaacttgtaattttattcatgttgctattaatatggggacattataaattcatcatgtctgtgcagaaacctgaacaccactttatcacacgtgggtatcagttggtgacaatgtaatattgttgattctgtgtcaacaagctattgaattgtttcaagtcatcacaatcacattataacgtgaagtgataacattgacagagcctgaaagtggtttggagacctcctcatgctatttgagcccaggcataacaaaccagggccaaaggactcctggtgcaaagataacctgctggtgaggcatgttctgaagttctttttgctcagtctgttaaaagcaatccagtaggggagacacaggaaatttaaggtcattctaccatgagagtatttgcaaatataataggtccttctttacagatttacaaggcaatgatttggcattacatttgtttctctatagggaaattaaaatcatgattatgctatattagcaaattgcttataaaacaaattacaatttttgattgtaggataagaagtactcttgtagccccctccctccctccctccctcccttccttccttccttcgttccttccttccttccttttcttccttccctccttccttccttgtagatctctttgtcatcttttggacatcatcttagtttcacacatatattctaacacatcatatatagttcgtttattgagggtaggctgggtactaggaggtcctgtaacaggccctgggaatacagaggtcgcttagtctcatctgttctgttccttatatttcacatatccaggtcgtggcaggagaattttgaactttctgcttataaaatcatttccaaggcataacttgtcactaaaggggaaaaatacaaaaatattgtgtaaaacatcagcaaaaccagtttttaaaaaagagaatgacatattacatttttattaaaaatgttgacttcagtttactagatgattaattatcagtacttactgcccaagaaaaggcttttaaacttattgttggaaatcttttggcactcttgctgcacaatatttcttaatagtttaagaaaattcttactctgttggcagaagccatacatgcccatcactaaatggtcaaggtcgaggcatgcctgtgtgtgcaactcagttattcatctaacgaatgaactgtgaataaagtttagtgtttgtgtgaataacaatgcaatgagcctcaccatcaccaagcataaacatttctgataagagttgtcatcagagttgcttattgatgttgaagcattggtttcgttagagtaaattatgtatatatatgtgtatgtgcatgtacgtatgtgtgtgtatatatatatgtatatacctgatctctactttctgaaaatttacacatttagaatgggaggttatttagttcctagcatgtaacttgtgacttataaacccacttagcaattacatactgcttcaatctgaatttgggccatagctaaataagggtgagttgccattttgtaccaaattgaggttaaggtgcaagatgccaggtgtcatttaaaccaaggctaggatgcaagatgctaggtctcatgaaatttagtgtctggacactgattgctaaccttgacatctctcctttctgccctctttttctctgtctccctttttctttttctccctatttttgcctcttctctctcttctcgtttctttagagcttgttgttactattgcgatagtcaagaactaaataatatggagttagggagaaggaatacagcaaggtgtttataagattcagtcaagaaggtccatttagtagttataaataatttagcctatgactatggggaattaccaaatctaccaattgagagtcaatttcttctcttcttgttgctattgtcataatttgcagtatccaactattgttcacttgataacctggtgatctcatctgattattaagatgaccaaaatgaaagtgatgtttatagctttaacatatccatgtcagtttgatttatggttcaacacttggacctaattaatcaggaaaaccctaatttgatgctgtctatcaatgctagtctgaaacaccattcaaaagccttaagcaagaaagctgcctttctaaagtctctcttgtcatttatttctcatgaatgtccattttcttttttagtgtttgattccactcaaccattttccagtaatttatattgctaatcaaaaagccgtataggaattctctgggtgactgggactggaaatgtgctctgaaatgggaatgatttgtagtttttgcacagggtgtgtcaaatcatgaggtgctgaagggcatgttattcttgtaagtagtttgattcattgggtccttatttacctgggcaggcaggccatcttaaattttcttctgtttggatagtgttcttttcaacatcctgtaagtgtagctcttttaccatgaaagatgtaaataaccagttagtctctagtggggattggggccagaggagaagaaagtcttgagcttagtttccttccacgtgtagggaaggttcctctccaggaacctcagtgacttagctgatagaggaggcactgcatgagctattcagggggagcacagaaaagactggtacaaatacactttcagtgctttgatgctggctaacaggaagttttcattgctcagcgttcttggtaaaaacttggacattcttttgaatgtttgagcgcttaagtgattgtcaatttatatttttaattttttgtgaatgtatgcagttgggatggggagaggacatttggagaaattatttttttgctctgataatgaatacggacgggaaaagtttgcaccacaacgcagaggtgcttatgactgtttttcatagccacaatcctttacattaatgatgaactacttgaggatttcagatgcttgtgtttttctagtgtggtcccctccccttgaaggggtagacctgtggacgtgtgatggaatggagcattccagggtgaaacaggccttcctggaaattagattctttatcactctcccaggggagttcatttcaagttgctggtactagcagctgcagcgtgagattgcccaatcctaggtgctcttattgatgggtgggaaggagtgggattgctgtttaagaaattttattatctttagaagggaagaatgtattatgttttttttttttagatgatctctttcatgtgggctaagataattttgagctctgactgtccaagctgcttagaggttctgagttgttctccactgggggtggtactgccactctcaagcggcatagatgtgcctgggagtgtttttgtcaccgtgatgtgggggagcactactggtgttccacaggtgggggtcagggatgatgtacatactgctttgaccaggacagttctgcaagatgagtaattgtcccaccccaaatggcgatagcgtcctctgaagaacctctgagaagtgtggctttgcttataatgttctgtagtgctgatggactgcctgattgtagaggtgagaggtgcataatgaaaaaacaagtgggatgtaagagccttgggggagaaagacaggtgactagtgtttaaatggaaatggagaagggtagctcagttataaatggctcagtttaaatctctcattgctcagaattgagaggctgctcaagtagtacatctcattctgctgccatttggttattggaaaggcactttattttaattactaagcaaatatttaagtaatctttgagatcaactatcttgagagctgactggattctgtggcctggatactcagaaacatccagcttggagaggatggtgggggctggtcactaggatgttgttggcaatgccctaaggcagcggtccccaagctttttggcaccagggactggtttcgtggaagacaatttttccatggacagcagggtggtggtgggggagggatggtttcgggatgacactgtttcacctcagattatcaggcattagattctcataaggaatgcacaacctagatccctctcatgtgcagtttacaacagggtttgtgctcctatgggaatctaatgcagccactcatctgacaggaggcggagctcaggcactaatgctcactcacccgcctctcacctgctgctgtgtagcctggttcctagcaggccacggaccagtaccagtttgtagcccagggactggggacccctccctcatggaacctgttcgtagtttgccatgcaagcggacctgctttggatgcttctggggcagctggaggggctgcaaggtgagacccttctctgctagcagcctcttgcctgcacctaccagcctgctcactgggctcagggttggggtgaggttctggggattgaagtggagctccaagctcttttcatggtcaaagtctgtatgctagttcaggctttacctactcagagtgatcttcacttttaatgcagttattgtctgagtaatcaccctcatactcatttgacaggcactctttggcttggcactgaaagctctttttctccatcttctcagccttgttgcctaccactctccaagaggtcatcactgcttgggtcatacttattagaccctcacccatgctaagcttctgtcaagtttttgttcttttttttcttagagacaggtttcaccatgttggccaggctggtcttgaactcctggcctcaagtgatctgcctggcatggcctcccaaagtgctgggattacaggcgtgagtgatcacgcctggcctgtcaagttgttttgaccctacacacaaagcctggtctccctcttcaccttcccaaatcctgctcattcacaaagacccagtgtagtcttataattctttgtgaagacttctctgatgacaccggcctgtagtgttatttttttcgccaaagtcagttagtttttattatctccattgcttatttggaaccaaattgtctgttgtcagaggcatagctttggaatcagactgcctcagtgtaaatctgtgctccactacctactagctgtgagatttgttcaagccttgtcgtcctcatctatgaaatggggccattgataccatctcacaaagctgttgtgaggatatgtaaggtaatgcatgggaagcacttaaaatattgctggcaagttctgggtgaacaaatgctgtcatttgctttgcaggacatgaaatgatgaaataagtacaggctctggagtcacacaggtcctggggctaaatcagacttcgacattttctacctttgtggcccttgggggagttggttaatgtcactgaggctcaggttccccttctattaaataagtataaatctcacatcatacagttctgagaggatccagtggatatgtataaagctttatatattgtataacacatagtaggtactcagtaaacaatatcagctgttgttattgcatggatatttaatttataacatataaatcacttttgcccccaataaacttataggctctgtcaaaaaaggaccatatctttttatttatttatttatttatttctttttttttctttttttttttttttttttttttatcccggcccgttctcaatgagctgttgggtacacctcccagacgaggtggtggctgggcagaggggctcctcacttcctagtaggggtggccgggcagaggcgcccctcacctcccggacggggcgtctggccgggcggggggctgacccccccacctccctcccggacggggcggctggccgggcggggcgctgacccccccacctccctcccggacggggcggctggccgggcggggcgctgacccccccacctccctcccggacggggcggctggcccggcagaggggctcctcacttcccagtaggggcggctgggcagaggcgcccctcacctcctggacagggcggctggctgggcggggggctgaccccacctccctcccggacggggcggctggccgggcagggggctgacccccccccacctccctcccggacgtggggctaacccccccacctccctcccggacggggcggctggccgggcggggggctgacgcccccacctccctcctggacggggcggctggccgggcggggggctgacccccccacctcccttcccggacggggcggctggctgggcagaggggctcctcacttcccagtaggggcggccgggcagaggcgcccctcacctcccagacggggcggctggccgggcggggggctgacccccccacctccctcccggacggggcggctggccgggcggggtgctgatccccccacctccctcccggatgggtcggctggccgggagggggctgagccccccacctccctcccggacggggtggctggcccggcagaggggctcctcacttcccagtaggggcagctgggcagaggcgcccctcacctcccggatggggcggctggccgggcggggggctgaccccacctccctcccggacggggcggctggccgggcggggggctgacccccccacctccctcccagacggggcggctggccgggcggggtgctgatccccccacctccctcccggacggggtggctggcccggcagaggggctcctcacttcccagtaggggcggctgggcagaggcgcccctcacctcccggatggggcggctggccgggcggggggctgaccccacctccctcccagacggggcggctggccgggcggggggctgacccccccacctccctcccggacgtggggctgacccccccacctccctcccggatggggcggctggccaggcggggggctgacccccccacctccctcctggacggggcggctggccgggcggggggctgacccccccacctccctcccggatggggcggctggccgggcggggggctgacccccccacctccctcccggactgggcggctgccgggcggagacgctcctcacttcccagacggggtggctgccgggcggaggggctcctcacttctcagatggggcggatgctgggtggagggtctcctcacttctcagacggggcggctgggcagagacgctcctcacctcccagacggggtcgccgccgggcagaggcactcctcacatcccagacggggcggcggggcagaggcgctccccacatctcagacgatgggcggccgggcagagacgctcctcacttcccagatgggatggctgccgggaagaggcgctcctcacttcctagatgggatggcggccgggcagagacgctcctcactttccagactgggcagccaggcagaggggctcctcacgtcccagacgatgggcggccaggcagagacgctcctcacttcccagacggggtggtggccgggcagaggctgcaatctcggcactttgggaggccaaggcaggcggctgggagatggaggttgtagcgagctgagatcacgccactgtactccagcctgggcaccattgagcactgagtgaaccagactccgtctgcaatcccggcacctcgggaggccaaggctggcggatcactcgcggttaggagctggagaccagcccggccaacacagtgaaaccccgtctccaccaaaaaagtacgaaaaccagtcaggcgtggtggcgcgcgcctgcaatcgcaggcactcggcaggctgaggcaggagaatcaggcagggaggttgcagtgagccgagatggcagcagtacagtccagcttcggctcggcatcagagggagaccgtggaaagagagggagagggagaccgagagggagaggggagaggggagaggggagaggggagaggggagagggggagggagagggagagggagagggagagggagagggagaggcagagcaaaaaaggaccatatcttatttttcttttttcttccactgatcctaggacaattgcatatagtagttatgaatttatttgtggctttagtgaatctggcatcatattcttttggtccttatttatttattcatttatttttgcacttaaatgatgtgtctacatgataatgcatcaatttgcattgtgggttttgtccccaaatctttgacttcttgaaatgtccttatagtattgttttgctctaagaaaacatcagggctctgaatcaataattgggacaaagcagtctattcagtggtttgtaaactggattaaaaaaaaaacccaaaagaattcctgccacctatttgatgatctgtaaggaaaaccagacagttaaaatgttgcacagaaagagactagcaggttggtttgctgttcctgtcttgtttcagtttcattaactgaatccttgactattctatcaatttgacactagacagggtagagtgctccatacaatttgttacccttggctatcatcactatagtgtaaagttttggaaataagcaggtgactctaaatcttcaaaaggggactggccttgtttatgtgggcaaggtatgggaattgtagtgaactgtcagccaacttatgaatatcagaaggatgtctatccataccaaaggaatcaaaattaagtatagaaaaagtgaagcaaaaattatggataagttaaggaattgcctcttaaatttgtttgtttctttgagttcagtgaaggtggaactattaaaatgtgatttactcatacaaatttttaaaaagaggactgtacctcctcaggtagaccaagtgtttggaaggaccagcatgtgttaagaggatctagcggggaaataggatttgccacagaaattaccttactctgttaactttggacaatgttccattgactaccacttgtctttgtcttataagaatagaatttatggaaggagaaagaaacttacaaggaacgggtaaaagaatgaaactgctattaatatgactcaatgtttttttctttctttttttttttttttgaaaaaaacttctagatattccccttttttcagattattccagattccatttttctttctatggatttaagatggtaaatttctatttaaagtctcattgtttgctctgatagctttctatatctctgatatataatggtctcagcaggctgagttttacaaagagaattctacacttcctgacgaacatgcattagctattccataagcacccggtgctgtgccagaggctgtaaatgacacagaggaatgctctcaatccagtgttgttccttgctgtggaaaacaaacaggcaaatgactcctcttctctgggcgctatctgttactctaatatcttatcttaacacattcttagtccaacacttacccaggaagcttgggatatggctacttatgaagaaaggattactctttttttttttttttcccctagctttgggctctttatgaggttggaaaacaagtttattcctatgtctaataaaattttactaccgatttcaaaacgcttaaattttttttgcattgctttcaattgctgcaatttttcctaagcccaataattttttaatgctatgttagtcaccaagtaaactactctttttctccaactgaagtatataagcactatggattctatgccagcccaataatgaactcaattaatgttaattgagagcagctttgggggaaaaaaatcagatttttacattcattcttgagtttagtggaataaacttttttttttggtgaaagggaacatagagtagtggtcaagtagcacgaatgctggaatcagagctgtcagattcaaatccttgctttgcacatatttgctgttggatcttgggcaagttaccgaattgctctgtgcttcaatttatttatttgtaaaatattcataataacagtatctatttcatagggttattatgaggattaaatgagctaatgttggcagagcacttagaatggtgtgtgccatttaagtgctatatgagtacttcttttcatctttgcaccatctattctgattgatgggacagacaggggctagtgctggagagatagggtgttcatttggttccgatggttcctttgtgatgattgcctggttcttaacaaaaggtttttatttcaatgtggattgtattttcctcctttcctccttggtttttactagagggatttttttttttttttaatcaggcagcccccaaaccagagaggctcctggagaatgttttaaagttacataaatgattatttgcaagattacttcttggctaaaactggattggttgaatgtggcagttttgagactattttctgaacaaagttttaaagctggttctatgtagattttttttttctccctgtgggtggctccaatgtatgaaatcatccccttagctttttttttttttaaatcttcaaataaataacaaaatgtagataatatctagataaaacttttggagggcttgtgagtaaaggctacttatttaaaacaaaacactcaaaataaattgcatatagactaattgaagtaaggggcacctgcaattgttattagacctaatctagaccttttcactagtggtttatttttggtttatttttaaacaacacatattccctttatgagagaatgagcttctgaggccagtgaagcattttggctgatggctgagaggtcacccagcaatgataaagtatcagtttgttttttctggagagatatttccaaacaatagtcgtttgggagttataaacaggcatcgaagttactactgaaaaggtgaatttgacaaatgaattatagatctgttgataaattgagtaaattggatttgatatattagataatggagtgaggagatcaagtgtgaaaatcactacctataaaaattagttaattgcaacatttccccatcagtttcatttttcatatgtgtgattttaaataattgactttgaagtgttttataaaatgacttttgagtctctattttgtgttcttttcatgatgtgtttaacttggtattttagtttggcaaaaacaaacaaatccccccaccccactcctcaaaaatgggacttgtaataaaagttgcttaagaaatagcattaattatatatattttcaaaacaggcaatatatattgttctgataatttcctcctaaatactcagtctctaaatttatatttttcttttctccatagcaatatgaaactgtctgtaagaggactgttctttatgattgttataatttttcaaccagaagatactacctttacaacctcagatactaagggagacaaatgtactgaacttacaaatgtattatgttggattactaacaatagacctaattgataaaagtgatttaatatatgttgtgttaatagctaaacctccaaagcccctaatctcccatggaaatattgctttgtagaacaaaatccaatgagaagttctgggattccagagtgaatttgtacattccttaggggcatttttgcaagggaggttgttgtgttttaaaggtagttgataagagacctgcaccaccaaccccagacctgcaccaccaaccaccatcatgcattagtctatagaaggtatttgggtgtacgtactcctgtaccactcggtaccaccatttagccaagcgaagtttctgaccatttgcagcatacattataaatcaggatgtcactaccagacaatcagatttgaacattccatgaacaaagtagcctatataccctagaaatagatcacttaactatgtttatgtcatgctgttgatatgcctgcatttacacaaatcaggatagcacattgcttatttattttaggagtaggtacttgatctgtatatttacctaattttggttaattagccaaaaattgaaatgggtaatttagcatgattgcttaaatacatggggaagatataattattcttccaactgcaaaaatttctcctttatcccttgggtttgtgaaagaataaaataattttgagtcttctctaagtggggctggtagtggctgctttctttgaaaaatttttctatgtggcacataatgcttgggaaggtcactggccaggtatttggggaactttgtcccttggggagacctaggaaaatcacaggatatattagttcagtgaagtgagcttgtttaagttatattgtccttccagtatcactagggactatcactgccacttggggtgtcaacttttggtgtcaagtttgtatactcttgttggctgcagagattttgttttgttttgtttttggctctttggtttaaaaaaaattgtttgcagagatgagcttatagatctggcaagttataatttaatttttaaaaattaagacaaaatattagtctgaatctaagaatgaaaggccataacttgctatatatgatttagtaataaaaaatcacttaaaaaataaggtgaggaactcaagaaagtatagtcaagcaaatgaaaagttactcacgatgttatcaatcagagataaccactgttaacattctggtcttttttacgctttttttttttttgcatatgtaactctgttatcagtaaaaatttacgtccttgtttttgttacattaaattataagtatttctctaagtacttagaatttctccataaccattttttaagttactaatatgtcaatataaagatgtaaacaaatttaatccttttattgttggacatttaggaggtttgcaacttcctttgttataaataatgttgcgatgaaaatctttatacataaatctttgtctacttctttgattagttccttaggaaaaaaatccttgaagtaaaagtactaaattaaagatcaagtatttttaaaaagcaagatacgtgttgtcaaactgctttcccaatgagttccatcaagatacacactaatcaactgtgtatgaaaatcactttcttcccacggatgttcaaataaatatttttatattatcattgggagaatgtttacctaattttctaatttgcatttctttgattatctaattagttgaataatttttcattttatcaaaaatttatatttcttcggttaaatatctgcatggcataagtttttaaaatttctgtctattattgcagaatgtgacagtgcgcattttcgctgtggaagtgggcattgcatccctgcagactggaggtgtgatgggaccaaagactgttcagatgacgcggatgaaattggctgcggtaagtgaggaggggccaggctaagttctattttgagtaacctaagtgcttcctggtgatttcagctgtaacaaagagaagagctatgccttttagtgacagagccaggtctgggcccaagtcttttgagatctgtgtggttgaatagagaactgatggcattaacaataatttcactcccttctgaggtaggggttcaattcacattgatgatagagcatcagtttctatctcacccttatcccttgaccacaactttgatatggaaacatatttgggtgcagttttctggagtctgtaggtgattatttctaatattcactctgtaaattttgtgtacccacaagaacaaacaaaaaataatgttatctgaactactgtgatttgtaagtcaaagaggagtccatttttatgtaaaggatgtagaataacttgtgtcaattaccataaagaaatcacagaattggttagtgtgatttatgttttttaaaaattctagttttaaaaaatttgaaaaatacgataatgtagtaaacttcaaatctaattaattataaaatgactttcacattcattttgtcatttagttttctcactaatcttctgaggtcggtttcagattagtaaattgagactcggagaagttaagtcatttattaaagttcttacagttggtaagtctatgcacagatcccattgctcttcccaacttcccataggtgatcaatcatacatctgcaatttccttcatcccagcaggtgaactaatgagggttatctttcaaaaatcaggaaagcaggtgaaaaatttttgttttgaattgttggccatgttatggcataccatagcagtcaaactttggtgtgtcatttagatgacaacgcatttgaaaatgggaggaagggtaaggatggggttctgtacagtgctcctcaaatactcatgcacaaatggatcacccaggagctcattaaagtgcaaatttagattccatattttgaggtgggacctcagcttctgcgtttctataaacttcctgatgatgttgatgctgctagtttgtggactgcactttgaacaagggactaaactatatttgtagagacacaatcatgtgctaactatttgcctcctctgggcttactgagttcattttgattaaacaataaaagcaaaaaggcaagggcagtgtatctggggtaaaggaataagtgaacagctatgccaacaactcttcagagattgttacctgtattatattttattgacctgtaaaaataataacaataacaacaatatcaatgacgatagtgatagcaagtaacattacatggcgctttcacatacattatttaacttatttttcacaacaaacagtgagatgagtatagtccccattttatgatgcatacattgaggttcagagaacctgccaaagatcttaaaggaagtaaatcatggaaataataattatttgattttgggttttctttcccaaatctcatgaattttccagttcatcatgatactttactattagttattatgaaacaaatagtttaacagtaactcacagttaatgtttacttgaatgaagcttttaatctaatacctttatcataatttttttgtgtgtatgtgtgctgtttgttttattctctgtgtttttaagttgctttggttcatgagtttgttgtgatgctgttgctgagcttatttgacagtgaactctgactggcgtccacagactctagtataagggttgtttactatttgccttcaaataaattgagcaggagtttacatgatacactcttctggaacaagcattgcttgctagtataatggggaggatgattgccataatgagtcctcttttggtttgttttagctgttgtgacctgccagcagggctatttcaagtgccagagtgagggacaatgcatccccaactcctgggtgtgtgaccaagatcaagactgtgatgatggctcagatgaacgtcaagattgctgtaagtgtttggagaggaatcttgctttggctttgtggacacctaaaacccaacctgtcgcaaagaagttacacacaatgggatgattctttataaatgtggagcagggccttaaatcataagggaacctatgccagcaatctcattcaggggttggatgatattgaaagtacggatgtactgaagaattatgaatataccccagcaatttggaagtgagataggttcccaatctttaattttgattatgttatgctcaagaaaggaaccaaatatttattggagtgtatagctgggtgtcttcatgtgtgtggttgacagctgaatgagtcctttggctctgtggcatactttgtattcaaaccttccactccttctgccccaatattaaattctcttctttttgactgagtggaagtaggtaggtttgttggagggcttcttggtggttacttcagtgactgctgccacagccaccatagggagagcttgaacaagaaagaaaatagtagcgatgaagcggatcttggcaactgcggcatccctggacattgagggggtttggttcagtaacctggaaaaaacctttaaattctaatttctttggaatcagactggaaaagactgttttaataggtctaacaataattttattttatttatttttattttattattatttttagagtcagggtctcactctctcacccaggctggagtgcagtggtgcgatcacagctcactgcagcctcaaacaccggggctcaggtaatcctcctgcttaagcctcctgagtagctgggactataggtgtgcaccaccatgcccagctaatttttaaattttttgtagagacacgatcttgttacgtttcccaggctggtctggaatcctgggctaaagtgatcctcctgccttggcctcccaaaatgttgggattataggcatgacccccccatgactggcctgaaaataattttagatgagaagtaatgttgggtaaatataagatggcgacctatgagcaatttgtctatcacatgtatcattccattcctttctctattaaggatatttgtataatttaaaatcattcttgtatcattgtggatgtttttggctgcaaggaaagaaaacacaactcaaaaaagttaaacaaaaaggggatttattatctcacataataagaagcctaactatagggttgttccagggttgattaattcccagctcagaaatattatccagctttttctcacttttttgctctgccatatttatcctattggcctttcttgattgcataaaagctgctcaagtctcaaaatttgcatcctgaaggcctgacattctctcaggcagagaggaggttcttaatagatagatactaaatgcataaatgatgggttgttcatctttaggctatatagttttgagtctattttctcttactcctctcacagagtgggaagaaagctgagctttattttgcgattcaatgtgtggtggatgaccctttgctaataataatactttacagaggggattggaactactaagggcaactgcttgggaaaagagactggagataagtttatagcagtcattttaaaacaatattgcatatcattttaaatgactatacatttcatgaggcaattctcccatttttaatgatataaaaattctccattagatatcttttaaccacaaacaaaatatgccacctctgtattcactaaagttaccagataactcctgattgccaatgggcacttttccttccttctcacactggatgggcatttagattgcacttgactctggagaccattcctccttcttgacaccactcccttggctgccatgactcccagcagtcctggctctcttttgagctgctttggtcattccattttattttcctcttctactcagcccttgagtattggtgttgctcagagccctgccctgagcagcttttctcattctggacactctcaggatagtctcaccattctcatgactttagtgaccctctgtggcctgatgagacttaaatctgtgtttacaacccagatttttgcccacacttgagtcttgtatactcaactacctttggacctctgcaagttgccttgaactcaaggtgtcccaactgaaaataatcatcttccctcctgaactggattttccttctatatttgctagtctacatattttatctttattaatagaaatagcatttaacccactatgaggcactggcagaaaatacaaaatcagtcttaaactattggaaataggcagatggaggctctcttacttgttgaatttgtgaaacatatttcataatgaaagtattttattagatgaagaagaaagattgctgtaagtgacaggaaagatataatcaattaacatgaaaaggctatcacaatcccctaggcacccacgctagaaacttggaggttattcttgattccttcctctttttcactgcccacattgaatcaccaactcctgcctaatttgcctcataaatatttctaaagttaatctcttcatttctctctcttttatttttattttttggcaaggacagattttttttttttttgagacagggtcttgctctgttgcccaggctggaatgcagtggtgcaatcatggctcactgtagccttgacctcctgggctcaaatggtcctcccacttctcagcctccagagtagctgggactacgggcgcatggcaccatacctggctaattttgtattttttttttttttttttttttttgtagagatggggttttcccatgttgcccaggctggtctccaactcctggcctgaagtgatccacccaccttggccccccaagtgctgggatgataggtgtgagccaccatgtctgacccatctctttatttctgctcccactgccaacatctctcatttgggtgtcagcagtagtctctgggttggcctccctgcctccagttctgtggatccttagattctctctgacactgatgctgatctaactaagattctttggtagctctccattaattccaggagaaagttccaattccctaacacggtttacagtggcttccaagatgtgactagtgcttattttcctatgtctatcatttgctattcttgccttgaagtggccacttgggcacagcagtgcttttagttcctgtgggtgtgccatgctgtgtcctagccttttgtctccgtgcaagctggctgaatgctgaatgctcggttctagacagtccttctttgcttttggcctacctgactgctgcttctttaagacccagggaggtgtcactttttcaaggaaactgtccccatccatgctcccatcccagagtgaattaagttcctggattgatggttctatcattcctgtgtgcctataatccactttcataattgttttctaattactccttagtgtcccctagaagactatgagcttcttgagggtagggattgtgccttattcatttgcagatccccatattgctatactgtgtggtacattataggccctcaacagatgtttgtgtaattaatgaatagatgaatctcagcattagataggttgatggaattatataattttaatttgtttgctctctacatttgaatgagcttttaattgcttcttcgtaagccctttgaaaacctaagcacaacatttagaattatttgggcttgacgtaaagaagaaagccaaggtaattgaacgagcactgatacctgacccaggttcttttcatattttgtttgagacaacccatgacttgccttctcgggaataaaagaaagttctttaattttatgtgaaaattggcaatatatacttaaataaattatttggaaatttaatgaggaagtattaatctctttaacctttttcagataaaattgtgtctctgccatgggcagaattcagacacttaagtgccttctggaaaaatctatctattctgcctttattaatagaagtaaaattggacccacaggtataaggtacttagagaaaatatgaaattatttagtgttagaagtaggctgacttgaaaaattttgtttgctgttccagaattataagacaccattttgctaattaaacagaaagaaggaacaaaatgacaaggaagatataatcaattaagcatggagaagggtgttaattatggttttataattattatatcttatcacatgataatttctatatgtttgaattttcaagtaccaccttgaaaactgtcactgtctacttatcttttacatatttttttttttttagagacaggggtcttgctttgctgcccaggctggagtgcagtggcatgattatagctcactctaactacataaaaagagaagttttttttggctcaagtgatcctcctacctcagccttccaaatagctacgactacagctacttggaagtgagccactgtgcccagctaaatttattttttttttcttttaagatataaggatctcactatgttgcccaggctagtcttgaattcttggcctcaagtgatcttcttgcctcaatctcccatagctgggattaaaggcacgagccactgtgccaggtttacttgtcgtttgaaaaggtttttcatgttaagttttgggggtacattccttaacagatctaattttatcagaaaaccaagttttgctgaacctaaatatctatactacatataagtaaaagaagctctgtaggctgggagcctcggatccctgacagttttgcagaacgctgatatctatggactctaaaatagacttcatttatagatacccacggaccactaatggacaaaaacatgaatcaatatgtattgtggcattcaaatcctagcgctttgggagaggagggaggttccaagatggccgaataggaacagctccagtctacagctcccagcgtgagcaacatagaagacgggtgatttctgcatttccaactgagctttgaagagagtagtggatctcccagcacagagtttgagatctgagaatggacagactacctcaagtgggtccctgacccccgagtagcctaactgggagacacctcccagtaggggccgactgacaccggatacggccaggtgcccctctgagacgaagcttccagaggaacgatcaggaagtaacatttgctgttctgcaatatttgcagttctgcagactccactgatgatacccaggcaaacagggtctggagtggacctccagcaaactccaacagacctgcagctgagggtcctgatggttagaaggaaaactaacaaacagaaagggcatctacaccaagaccccatctgtacatcaccatcatcaaagaccaaaggtagataaaatcacaaagatggggagaaaccagagcagaaaagctgaaaattctaaaaatcagagcacctcttctccttcaaaggaacgcagctcctcaccagcaacagaacaaagctggatggagagtgactttgagagttgagagaagaaggcttcagacgatcggtaataacaaacttccccaagctaaagggggatgttcaaacccatcgcaaagaagctaaaaatcttgaaaaaagattagatgaatggctaactagaataaccagcatagagaagaccttaaatgacctgatggagctgaaaaccatggcatgagaactacgtgatgcatgcacaagcgtcaatagccgtttcgatcaactggaataaagggtatcagtgattgaagatcaaatgaatgaaatgaagtgagaagagcagtttagagaaaaaagagtaaaaagaaatgaacaaagcctccaagaaatatgggactatgtgaaacgaccaaatctacgtctgattgttgtacctgaaagtgacggggagaatggaaccaagttggaaaacactctgcaggatattatccgggagaacttccccaacctagcaaggcaggccaacactcaaattcaggaaatacagagaatgccacaaagacatacctcgagaagagcaactccaagacacgtaattgtcagattcaccaaagtttaaatgaaggaaaaaatgttaagggcagccagagagaaaggtcgggttacccacaaagggaagcccatcagactaacagctgatctctcggcagaaactccacaagccagaagagagggggggccaatattcaacattcttaaagaaaagaattttcaacccagaatttcatatccagccaaactaagcttcataagtgaaggacaaataaaatcctttacagacaagcaaatgctgagagattttgtcaccaccaggcctaccttacaagaaatcctgaaggaagcactaaacatggaaaggaacaactggtaccagccactgcaaaaacatgccaaattctaaagaccatcaaggctaggaagaaactgcatcaactaacgagcaaaataaccagctaacatcataatgacaggatcaaattcacacataacaatattaaccttaaatgtaaatgggctaaatgctccaattaaaagacacagactggcaaattggataaagagtcaagacccatcagtgtgctgtattcaggaaacccatctcacgtgcagagacacacataggctcaaaataaagggatggaggaagatctaccaagcaaatggaaaacacaaaaaaaggcaggggttgcaatcctagtctctgataaaacagactttaaaccaacaaagatcagaagagacaaagaaggccattacgtaatggtaaagggatccagtcaacaagaagagctaactatcctaaatatatatgcacccaatacaggagcacccagattcataaagcaagtccttagagacctacaaagacacttagactcccacacaataataatgggagactttaacaccccactgtcaacattagacagatccacgagacagaaagttaacaaagatttccaggaattgaactcagctctgcaccaagcagacctaatagacatctacagaactctccaccccaaatcaacagaatatacattcctctcagcaccacattgcacttatttcaatattgaccacatagttggaagtaaagcactccccatcaaatgtaaaaggacagaaattataacaaactgtctctcagaccacagtgcaatcaaactaaaactcaggattaagaaactcactcaaaaccgctcaactacatggaaactgaacaacctgctcctgaatgactactgggtacataaagaaatgaaggcagaaataaagatgttctttgaaaccaatgagaacaaagacacaacataccagaatctctgggacacacttaaagcgtgtgtagagggaaatttatagcactaaatgcccacaagagaaagcaggaaagatctaaaattgacaccctaacatcacaattaaaagaactagagaagccagagcaaacacattcaaaagctagcagaaggcaagaaataactaagatcagagcagaactgaaggagatggagacacaaaaaacccttcaaaaaatcaatgaatccaggagctggttttttgaaaagatcaacaaaattgatagaccactaggaagactaataacgaaaaaagagagaagaatcaaatagacacaataaaaaatgataaaggggatatcaccaccaatccctcagaaatacaaactaccatcagagaatactataaaaacctctatgcaaatcaactagaaaatctagaagaaatggataaattccttgacacatacgccctcccaagactaaaccaggaagaagttgaatccctgaatagtccaataacaggctctgaaattgaggcaataattaagaggctaccaaccaaaagaagtccaggaccagactgattcacagccgaattctaccagaggtacaaggaggagctggtaccattccttctgaaacttttccaatcaaaagaaaaagagggaatcctccctaattcattttatgaggccagcatcatcctgataccaaagcctggcagagacacaacaaaaaaagagaattttagaccaatagccctgatgaacatcgatgcaaaaatcttcagtgaaatactggcaaacccaatccagcagcacatcaaaaagtttatccaccatgatcaagttggtttcatccctgggatgcaaggctggttcaacatacgcaaatcaataagcgtaatccatcatataaacagaaccaaagacaaaaaccacatgattatctcaatagacgcagaaaaggcctttgacaaaattcaacagcccttcatgctaaaaactctcaataaattaggtatcaatgggacgtatctcaaaataataagagctatttatgacaaacccacagccaatatcatcctgaatgggcaaaaactgggagcattccctttgaaaactgtcaccactcttattcaacatagtgttggaagttctggccagggcaatcaggcaggagaaagaaataaagggtatccaattaggaaaagaggaagtcaaattgtccccgtttgcagatgacatgattgtatatttagaaaaccccatcgtctcagcccaaaatctccttaagctgataagcaacttcagcaaagtctcaggatacaaaatcaatgtgcaaaaatcacaagcattcctatataccaataacagacaaacagagagccaaatcatgagtgaattcccattcacaattgcttcaaagagaataaaatacctaggaatccaacttacaagggatgtgaaggacctcttcaaggagaactacaaaccattctcagtgaaataaaagaggacacaaacaaatgaaggaacattctatgcttatggataggaagaatcaatatcatggaaatggccatactgcccaaggtaatttatagattcaatgccatccccatcaagctaccaatgactttcttcacagaattggaaaaaactactttaaagttcatatggaaccaaaaaagagcccacattgccaagacaatcctaagccaaaagaacaaagctggaggcatcatgctacctgacttcaaactatactacaaggctacagtaaccaaaacagcatggtactggtaccaaaacacagatatagaccaatggaacagaatagagccctcagaaataataccacacatctacaaccatctgatctttgacaaacctgacaaaaacaagaaacgggaaaaggattccctatttaatacatggtgttgggaaaactggctagccatatgtagaaagctgaaactggatcccttccttacaccttatacaaaaattaattcaagatggattaaagacttaaatgtcagacctaaaaccataaaaaccctagaagaaaacctaggcaataccattcaggacatagacatgggcaaggacttcatgtctaaaacaccaaaagcaatggtaacaaaagccaaaattgataaatgggatctcattaaactaaagagtttctgcacagcaatagaaactaccatcagagtgaacaggcaacctatagaatgggagaaaatttttgcaatctacccatctgacaaagggctgatatccagaatctacaaagaacttaaacaaatgtacaagaaaaaaacaaacaaccccatcaaaaagtgggcaaaggacatgaacagacacttctcaaaagaagacatttatgcagccaacagacacatgaaaaaatgctgatcatcactgagcatcagagaaatgcaaatcaaaaccacaatgagatatcatctcacaccagttagaatggtgatcattaaaaagtcaagaaacaacaggtgctggagaggatgtggagaaataggaacacttttacactgttggtgggactgtaaactagttcaaccattgtggaagacagtgtggcgattcctcaaggatctagaactagaaataccatttgacccagccatcccattactgagtatatacccaaaggattataaatcatgctgctataaagacacatgcacacatatgttttttgtggcactattcacaatagcaaagacttgggaccaacccaaaagtccatcaatgatacactggattaagaaaatgtggcacatatacaccatggaatactatgcagccgtaaaaaaggatgagttcctgtcctttgtagggacatggatgaagctggaaacgatcattctgagcaaactatcgcaaggacagaaaaccaaacaccgcatgttctcactcataggtgggaattgaacaatgagagcacctggacacaggatggggaacatcacaaactgggtcctgtcgtggggtaggggagaggggaaggataacattaggagatacacctaacgtaaatgactagttaatgggggcagcacaccaacatggcagatgtatacatatgtaacaaacctgcacgctgtgcacatgtaccccagaacttaaagtaaaataataataataaaaaaggaattataaaaaaaagaagttttgtaaaaattgagagcaaatcttttttcttccattaggggattatattatattttttagatgatcacgttttcccccaaagctctttgtatgtagacaatttaaaatcccaggataagataatgttaccatgttatggtaattcctgcctcagatttacaggatagctttcacatcatgcttgcgggcatcagttcactggattttatctgttttatccggaggcaaatttcatgaactgctgatgccctgctttcacctatactaatcaacatgggatgaaatcaagctagcttaaatttttttctctttataaaattgatacatggtcaatgtaggcagtttatagaatagaggaaactatatagaaaaaaataaaatcactcatattcatattcacaccactctggaataactgctattaaagctttggtatatttccttcttgtttatacaaggatttcaatgggtgggttgggggtccttggttaatacctatacttgcaaaatttttatttcattaaactttttaccatatagttttaaaatctatattgtattctttacacatgttgataacgtaattgtgtacatagcatgcttgagtgtggacactattctctgggcattttgataacattatacttctgtttttgctttgtaagctcagcttggtggtagccaggtactttaccttgtgtccctatgaactttatgctttccaatatccttgttaatgacaatagattagtctgtgtctagcaataattataaattaagtaataattttttctcttcgcagcacaaagtacatgctcaagtcatcagataacatgctccaatggtcagtgtatcccaagtgaatacaggtgcgaccacgtcagagactgccccgatggagctgatgagaatgactgccgtgagtctgttttagtccttgcactgtatttggtttcacccttgtccctttggcattttaatcaatttgttagatttgttgatggacataaatgcctacaatatgcctcttgttattgcaatctcttggcagattcttttgtggattaggggtgatgttctgataagagtctatttttaacaagacattctaagagtgtcctgccttagtgcatcaagtttctgtattttttatagtaagaaacttttaacatgaacatagattctgaaaggaaggataattaaatacattgagtacagaatcaagtttggtaaattttaactgttattacacagctatagtaagtttctaggtcaaatttctcactagttttcctgcttttatgaactcaacatttttcagattacctttggaaaagtgttacattttgaaaatgtcttttcctataacagcagcatactatatctctttgtaactgatcaccacaaaataagacatataaatcatagtattctatgtataatgtataaatattaccacaccaaaataagaaagtgcaatcatggttcattatctagtaacaggtaagtaaagaacaatcttcctctttcgaggcttatatagaagtgttaggatatgagaagataggaattagtctgctgtgtcagtcctatagtccatataattgtctttaatctcaggcataccacagtttctctctctttctgttttttattttttatttttgagaaggagtttcactcttgttgcccaggctgagtgtgatggcatgctctcggctcaccgcaacctccacctcccaggttcaagcgattctcctgcctcagcctcccgagtagctgggattacaggcatgcgccaccacgcccgactaatttttgtatttttagtagagatggcatttcaccatgttggtcaggctggtgttgaacttctgacctcaggtgatccacccgcctcggcctcccaaagtgctgggattacaggcatgagccactgtgtctggcccctagtttctctgaaaagttcttacaagtctagcgtttatgaatttttccagaagttccttgagtttttaatatatatatattttaatatatacatataacatatatttctgacaggccttttcgtgcagtcctgcatttcataaatttactatgtgctgtataaagatatagtcatgtgtcatttaatgagggggacacattctgagaaatgtattattaggcaattttgttgttgtgtgaacgtgatagagtgttgttaaacaaacctggatggtatagcctactgcacacctagggtaaacagtatataccctaggcatatactgttgctcctaggctacaaacctgaacaccatgttcccgtgctaaatactacaggcaattggaacacaatgttaagtatttatgtagctaaacatatgtaaacatagaaaaggtacagcaaaaatatggtattataatcttaggggaccactgtagtacatgtagtccatgcggtctgtcgttgaccgaaagagccatatgcggttcctgactgtacttccttttgtttgctcttaaatttatatttcaaacttcaagaaattatcccagtattccattaattggtgagcagatttttgtgtaccttagaaatcttgatcataaacttttcagttattatgtctccaacggaagattcaagttttagcctattctcacgggatatctcctctattgttttataattttgatttaattttagttctctggattgtctctaaattccttcctttgatacaaatggtttattttatgctttctgataaaagaactatcttgtgtaaattttgctaaacttcccaatatggtgctgtgactagggtaggagctaacatacattgattatggcaagcaaattgtttctagtcactgtacatttcaaactatactgttcatggaagatatacttgtatatgtgcaaaagcaagacctatgcttccatccataccatgaccacatggtgcatttttaaaaacgacccttctccagtgctttctcccttgcatgttatttttctttgggagaaatgtctgtgctatttgccattgtctctccatttcctagcagagttcctagtacagttctgttctaattttcatctgaaatattcttatttatctatttatttttaattttactttaagttctgggatacatgtgtgacgttcccctctctgtatccatgtgttctcatcgttcaactcccacttatgagtgagaacatgtggcgtttggttttctattcctgtgttagtttgctgagaatgatggcttccagcttcatccatgtccttgtaaaagacatgaacttgttcctttttagggctgcgtagtattccatggtgcatatatgctacattttctttatccagtctatcattgataggcatttgggttggttccaagtctttgctattataaatagtgctacaataaacatacatgtgcatatgtctttattttttgaaagacattacagtgtttccactttggatttaccttcactctggaaattatgcaaagaatttagactaaactctggcaagtttagagatggtagcgtgtgtctggatgccacagaatagcaagtttaggggtcaaagattctcctttcagtgctttgtaaagcacacagtaggttcttcatttaggcaaatgaagaagatatttttgattaataataatgataaaccatatgttatattttgtagcattttataaatttcagagcattatataaattctagttgttactattaggttcctttatgaggacaatagggcaggcactattataatctcttatgaataaacaaaaacttcaaagagaagcgtgacttgtttgaggttgtatagtagagatagggcttaatttgtcttctagttccaagtctggtgattgctcttcatggagggctttatttacagaaggagaaagtcctatcttgtacaagttaagagaccaccagaggcctgtaccaccagccaaaagtctgtgtctttatcccttatttacaagtagatgaaaatgagtgctttattgcaaatgcagtgggactaaaggaactgctactttggggaaaataaaagtcagctgaaacagaatgtttgcagccaagactaaagtcactaatacaaccggctcacaactttgccaatgaaccttctggcaaaaacctggcaggatacgaatatgtaagtagctgctgtaaaagggaacgaagcagaggaaatgagctttgtaagttattatatctgggcaggaatttttaatcaagtttttttttatttaaaaaaatttaagtacaaatagttggtgaaataatgattcactaaggaaagaaaaccaaatttggcttactgtttctggaatcatacaagtcatgaacccttcagggcacactgtgacctaaaatgaatcacatgcatgtaagggattttgcagtgaggcattctttcctatttccctctaccttgtttatttatagctaagtttcatttatggagcagtgtaaaaaaaaaaacctcagaaatcagaggaaatgtagaaaagaaacttcttattcttttgttagtgctttgatctggtcacagtcagatatatacaagaaggaaatgaatggcctcgatcaaagtccttagaaaatgctagtataggggatgggttgcaggagtgatcccattttgttttccttctttgtttaaagctcttgtggaaagtgggaaagggaactgccagtcaccgagcaccagccaccaccttacccacttttcacgtcaatgctgcaaggtgggtatgaggaccagctctgttttacagagattgtaaagattatcaagatgtaagagtaggggagccaggattttaacctaggtctaaaccatatgcctgtgctcttaaaagattttgctttaggaatagaaacgtataacttatttttgtttaaaggttacttagctattttattatttttacatattattgtctaaaccttttttagtatggaaggttttttttaacatatacaaaagaagcatgaagtgtatagtgaacccctttgtatgcatcactcaattacatcaatgatgaactcataactaatattgttttatttattctctttattctccccattattttgaagtatttcttagacattgtataattccacctgtaaatatttcagtatttatctctaaaatataaggactgaaacataatcataatatcattatcacacctaaaaattaaacaactcttctttaaaataatcagatattgagtcagtttttaaaattccccaatcatcttgttattttttatagtttgattatttaaatcaaagtccaaataaaatctttatgttcaagttagttgatatgtctcataagcctttcaatttatggggtttccttctatttctgttctttaccccttgcaatttacttgttaaaaaaaaaaacccaggtcacttgtcctggagtttcccacagtctggcttgtgttcattgtgtcccctgatgtcctttaacacattctctgtcctctgtatttcttggcaattagtagctagacctggagcagggtttctcgaccttcacactaatgacatttgggaccggacagttctttcttgtgcattgtagaatgtctaacagtatccctggcctctatccactagatgtctgtagcattgcccagtcgtgacaatccaaaatgtctctggacgttgtcaaatgtcctccaggagccaaatcatccagttgagaaccactgatttaggggactgaacaggtgcaaggattttcttggtggggaaacaagggaaggcaagagtactttttatataaatctgtgtattttcattaggagacacaggatagctagctgtctgtgatgtgagtagccattgatgatcattgctgaaatccatttagtcatagcagtacttagttattttaaatgttgcattagatatataacagctgttattagttgctttaaattagaatgttttcatgtgatcaaagattaaatgaggcttagccagaaatcatcttcatgagacatgacactttattatttctgcagtgacgatgcatggaaatcattacttgtggacaaacttagaattagcctgtgaatggggcttttgtttttctatttctcagaaatagaatggcctataggaatgaatatattaggtacctggaaaccacctaaaaatagtaatggatgttggaaaagctccaaagaagggctcaattcttccctctaatattcaaaaggattagggagcttgatgttgtagtttgtagccctgcctgtcattccagacccctaggttgtagttcataccctttcaagcttctaaaatcaagacactgagctccaagacagagtaccttgtgtccattccgggcattcctttacagaacaaagagtggtgtgtaagagtcctctcagggaggcaggcagggagagaggaggtgagagaatgttcgagatggtgaggaaggggaggatattagggtctcaacaaaaagattatttttgagataaatgtggtatagtatgagagattcttattgcgtttggtctttttatctgcttcatctttatatgcataaggtattggtggttattttacccttttagaaaaatttttgaatatatatatattaaaacctgtgaaacaggtaaaagctcattttcccccttagttcttttattattcaatctggtcatctgtaaaatggcatctcatattaaacagcttgtcaattaacttttttttttttttaaggaacagagagattcaaaactgcggtccattttacttctaatgggattagcatcaaggaaaaaccactcatgcagggtctaagataaacatcagaacaatgcagcaattataggtcattcaattaatatattgacgtgactttcagttgctcaaaaatagtacagtttttttctgttaagtgaaaagattattttgctttttcaagcaccatattagaatgattttggtgtgaataaaactattgctaattatcgttggtttgcagcacttctcttttgttacttaggaatgccaaagaaagggtaaaatccctgttacaatgaaggctttcttgctggtaatcagcagtacttggtctgcctgcaactggggctgctttgtcccagaagttttatttctattgactttctgctctttagaatttaaacatttttctttatatctttaactgctgaaactccagctgagggaacagtgggaggggaataaaaagatggttaaagtcattttgtggactgtgagggtgcatgaagaacatgttcttcaaactcagttccacatttaagctgcccagcgagccttgcccttgctattctctctctccctgaagccagaaagaagaagcaggcgactctccaaaggaccccatcttacctgtcacatcacagatgtacctttttagcattctcacaattgagataggattcagagccctgaaacctggaggaaggaaagaaaactctcttttatttagtttccatcatacaaggatgttataaatatcccccatctttaaaaagatcctaagatccctcttagctgttgccaattactctgctcccttttacaacagagtttcctagcattaacgttaatggctgtttccgtttaccctcgtcctgtttctttctttaaaaaaattttttttacatatgtgatatatccaactgattgtcctttttttagaacccactgaaaatagtccttcatcttcaccaatctcctgaaaatattctttcaatgctaccaatgactgccattatgctaagcctaatggttcttgttcaaatatcacttctcagagagctactccccacagttactctttaccttttacccagctctatttttgcaagttttttttcccattgtgacatttactttaatagctgtaatttcactctcccaaatagaatgtctgttccatgagaaatgggattttatttcattctttagtaccttgcacactataggtgtgcaataattatttttgtatggattgattaataaaatgctgtgggaattgctacttcacttgtaattttgtttaccttttaatttaattcttagcacagtatctatgaagtcagatttcaataaatacatgttgagcacaagagaattctaattaagaagaaggcagcactctgtagaataactggtttctaggatattgacattcatccagcaatgatttgctgatgagtattcaaattatttggggctacatttccagcagggaggctgagccacaccatttctagtgattggaaagtggctactcttataatgctggggtgcagctagttttcctgtctctttgattagattttgtcttttgttctgcccaggtgggtccctgggaataactactaaagtatgaaaccatggtgttgtctggctttcaatgaaaacatgtagccccgtgccactaaacatgatgtacattataaacatttgtttaccccttagaaggcatcttacttctttgtactattccttggagcatttgatgcacatttttccatcttgttgctcggtcacttttgtaatagagcttgtgtgagttttttttttttttaaggaatttagaactatgtcagtttttatctcctttgcagtttttggtgatagctctgttatgggaagaaggcagtgctgtggatctggactccttggagcaaccctctcaggcacatttctagttgaggtctaagattaggtcactgtggatagagaccagcaaggaatctcaggcttaagacccagttagtacaaagggagtgagctaaggaaaactagataacttagtttatttctctttttcctttggcttcctgaaagccacccagactaaacttgatgttagttcaattctacaagtcctcgggatgaccatattttctttctctttccaaggtgctgaatttctttctttctttctttttctttctttctttttttctttctttctttctttctttctttctttctttctttctttctttctttctttctttctttctttctttccttctttctttctttccttctttctttcttctttctgaatttcttttttaataaatctggttttatataactttttattgaaagcttcttcaaattacttttggactggggaaggatatgcttctctgtttttttccttgtatattactgcattccctaagagctagtccatgatggcagtcactttagggacttgaaattcaccaggaatgggggtttggggagtcgtggtggtaccttcatgagactaactttatggcctgttttttggtattgactctcctgtttgtcctggtactccttctggaaagttatttttcctgtgtaggtttcctagaattcctagattatatcatattgaagtactttgttaactatgccataagttgtgggaaactagagttggcctcacttttcccttcttcctaatgtggatgggaaactgactggcagaaagaaaatcttccccccttcctcttgggtttcttctttttcttttcataatctcttttaagaattttctattaccatttcattcaatttctttcttctttaatttttcgcttcttcctgttacttactctgcagcctataagtggtagatgtatctgtggtagtggttagtaacctgggttatggagccaggttgattggatttgaattctggctctccaactttaccagttatgtgacctttttcaaattccttaacctcttaatgctcaggttcttactctataaaatgggagtcatcatagtatttacttcatgaagttgttatgaagatgaaatgagtttatacatattgagtactttgacacatgtctggcacatagtttttaatacatgttattgatgatgatgatgatgatgatgatgatgatgatgatgattgcttgtttaactttgtgggtagcgcttgaagtaagtgctggtggccaaactggtagattctttctggcaaatcattacattgactggattaatctgtcttggagccagaggaaataacataaagtaacttataaaggatgactctaggaccttgaaaagtcccaggtgtctgggctggacttgtatcggtaatttcttgtgtgtgtgtgtgtgtgtgtgtttcccaatcttggcttaagtttcctaacctacttttaagattccttcttcataataatggttttttctatgttgtcctcagccatgttgtcaaattgtgagaataaaacatgtctgcagtcttcctgtcaagataataatgaacagtgccttatatttgtatcttactctgcttaaaatgatttccattctaagaggtctacaagatcttcaaactacatttctacaccctcctccctgattatgtaaacagaactatagcatagaaatttcttgcttcaaaccaaatcattaacagtgaaaaaatataaaaactcttgtctgcataattttggggcagctcccaattatgggggaacaaatctgaacatgtatcatttgggattgggagaaagtaaagaaaggggaagcaaggagtggtatgaggaaggatattctcacctttttgtgttagaaaaaaccttaaaggtctgaggcttaatttatagctacttgttgatctttccattaaaaccaaattcagaaggaagagtttccttggtgttcttatatatggtctcctctcatattgcactttaccctatacttaaattcttgcaggacattatagccacatgatggatttgctctgtgggaagaaggttagacttaggcttgccaagcaaatgaaccaaaaaataagactttagatatctcccagttggaagctcaaaggattgtgaattattgttttctggagtagattgaaactcattaacatctttagcaatggtagtagaatccattcatttctttctttgctcagtgttgacagtttggacctgttgtctctgtgtgggtctccaaagagggaaaaccattcagaaacagattttcaggtattttcagtatttggtggagttagggagctctgtgcaatctttcctatgagtatacatcccaggttaactatgcaccgaagagatcaaggtgtgcaggggttgagaggggtcctctgctgattgagagtgattctttatcagtgtggatggagacaagaaagctgtgtgttcctcattccaaaagtcaaactgctgacctctggccatcacaataccctccctgatgatatcaagctgggcttcttgtttgttgggtggggaatgggccttgtcagtaaacttgtagtcatgtcagtggttacagttttaatctttcccctttcaattttctggcactggctctcaaaaagcaggatgaagaaaacgagagatccatccagcacacttattccagattctttatatttataattatcaccttaaatgaagtagccaccgttcaagcccagattaattttcctccagacagatagcttatctattgcaaagagctgggttttctacgagtttttcttctgcttgctgctgctcttaaaaggctagataacacattgactctaggagctatctggctcacaggggcaaaggaattgcttgctgacctcacctggtcttttgcatctcttgaagggagaattaataaacatcacttgaagggagagttgtgtgactcatttgaaggcacatttgtaaggcatatcatctcagcgaggaaagacgcaataactctaggcactggctcacttttggactattaaaaaacaaaataaaattcagaaaaaattttaaattttaaccagctatttaaaaatgccttccattttaacatatgattgactatatgtaactctggcaattgagatatttaaggacacttaataaactagctttgaacctctggagatgagaagagttaggcttattcctttactataccaaaaaaaagatcattggagagtccatttttttaaaaagtgcaagttgttaacatggcacaagtttagtacagtttcagcacagaattttgtgcatggcttctgcttgaaaagacttgggactatccaaagaattatcttcaatatatttatatctctataaaatctcaaattgggttcttaagtgcaaaattgagactcaaagtcaattaagacataccttttccttggttaaaaagaaatcagaagatgacctgataatcactacaaaaataatctttcatgaagaagatggtcagaccaaggaagatatccacatttgtgaaaaggagggtattcaaaggccataaaaggcagaacttcaaaatattttaaaaagccgaatgaactaaaatgttcacctgtgataaataatagcaacattgaacatttctcaagcacagagagtaatgtcccacccctgtactaagtgtgcacagtgagaaatgtcccacccctgtactaattgttggggattctaaaatgagtaagacaggatccttgatctcagggagtttcattatgtcatggcggaaagagatcaaccatccacagaataaagcctccagtaagaagtcatgagagacaggtggtccaagtctggcaagtagagaggagggacagatagcacgttattcctgtaagggacttcctgattttcaactgtgacctagaaaaccaggtccagtgagtagcagtgaggtggtcatatgtacataacgtggcaacaacaatttgtgctttgaaagcacattatgcttttcaacatgctttaccagacatggtcttttcaggccgctctaccctgtgcagtaggttatccaaatgtgcagatagggaagtagcaacatggagaggacatgaagcttgagtcacagtaaatagctgcttagtggtacctctgggccgccagggctcctgaactctaggcctgctttctttctgcaacccgccagtggaagaaatggcctttcttttttccaagcttgtgcagtggtactttagtttcctgggatgttatctgtatcatgtaaaagaatgtttgattttgaactaaagttaaattctttctcattcttcatcttttggctcaaaagtcacttcttcaggggatacttttctgggcccccaaatctctctgctatgcagtctcacagtcctctgtactttccacattagcacttatcccagtttgtaatttaccatttgtgtcttatttgattaatgtctgtctcccatgtccagccttactctccatgaagccagggagcatacttcttttgtgtatcaatatatgcatttagtgacttgcatatagtaatcactcaataaatgtttgctgaaggaaatttaaggtttgtttactgtttccttttcctttttttttttttttttttttttacaatagagtacccaacatgtgagcagcttacttgtgacaatggggcctgctataacaccagtcagaagtgtgattggaaagttgattgcagggactcctcagatgaaatcaactgcagtaagtattgtgcacaagatgtgcagttgtgtgctgaagctggtttatactggtttgagagagccaatatgtacatctcttcccaagttcaggttcagtgaattcatgttggtagtttgaagtcagccgttggtaggagtatttacacactggaaatcggcaaacactacaaaccagggcctttttgttcctggataactggttcttaaacagttaccagcacaccactgcttaataagaatccctttttaaactggagatgctcttcctttgagattaaatggctacaatggagttaacttctctcttttctttcccttcttaactttctgttgcagctgagatatgcttgcacaatgagttttcatgtggcaatggagagtgtatccctcgtgcttatgtctgtgaccatgacaatgattgccaagacggcagtgacgaacatgcttgcagtacggtgatttctttatgctgggtcatgttgttgggagtgttttgttttgtttcggttttgttttgttttatccccccgctcccccaccaatgtacctcttttttcaaggagaagagtcactacgtttgatggcagatggaatcagacggtcactagggggtcttggcacaagcctttgtggtgttgctcgacctgggctcctttattttccaaggatctgtgtagatgtaaagggctggtgatggacagtttgccttctttccttaggctccaggggtacaggatatattgtatcactggattctcaaatgacccatacctctgacaaccttgatagtagaatgagagaagtgtttttaagggaaaggaagttcctaggagtggctctaactctcctctttactttgaaatttctgctgcattaaagttggagggtcaggaaagtttctttttcttcgttttctttttttggagatggagttttgctttgttgcctgggctggagtacagtggcgcgatctcggcttactgccacttccgcctcctgggttcaagcagttctcctgcttcagcctcccgaatagctgggatcacaggcatgcaccaccatgtctggctaattttgtgtttttagtagagatggggtttcaccgtgttggccaggctggtctcgaactcctgatctcaagtgatccgcccgcctcggcctcccaaagtgctggtattatgggtatgagccaccacgcccagcctgaaagtttcagtgtggtataggtggctttcttgcctccacttcttcacgctgaccttgcttttatgtccatgctgttgcctgcaatgcaaatgacctctcttattgttgccacctctccacttatgttttttggaaagagtaaagttagaagactctgtgaaagagttttactatgttcagtaagttggcagctttgcgtggtgatttatttactagaatgtatgatttccctccacacctcttttgattggttggtacccatgccttagggtgttgttaaatattttcgatatcaccctaattttcaatgagccatgcctgacttcctttctggaacctgggcttatttcagtgacagagaattaaagagaatgtgacatcatggaatggtcgactcagaatcatttggtcatagattagcaattacggagcttgtagtaaagtatgagaacgttggatgttgtcatgtctgcagcatctttgtctgcattttctgttctgtgccaacgcattgcaaaccatcttgtttttaattttttttttttttttttttttttttgagacagggtctcactctgtcacccaggctggagtgcagtggtgcgatcttggctcactgcaactccacacacccccaccaggctcatgccatcctcccacctcagcctcctgagtagctgagactacagacatgtaccaccatgcttggctatttatttttatttttcgtatttttggtagagatgaggtctcaccatgttgcccaggctgatctaatttttaatcttgaaaaacagaaaccggcacctgagttcatttcctggacccaaagctgctgttatcttcttctttctctctcttttttttcctcctttttaaaaatttttgtcaagatgtctaagggattaaattgatatagaaatttcaatttctaggagtactgcttaggcagtgaggtgagagcactttcagtttttcccggtgatttgtgtctttggagtgcagctgttgctttattccagactatccgacctgcggtggttaccagttcacttgccccagtggccgatgcatttatcaaaactgggtttgtgatggagaagatgactgtaaagataatggagatgaagatggatgtggtaaggaggggaagagattcctactgaaaagcattttcttcaagtgttttccagcgcttgttttttctcctttcctttttagaaattttgtgtgacaagcaagcctcaggattggctggagttgaaggggttgtttaggaacttagtgggtggggaagacggaggtgactgcgctaacttctcctaagaagattcagaacacaaatacagattaaattataatcctctcccttctatctttaaggcaaaataggtaggacagtctctgtctcttctataccccagtctgactttctccctgtaagactgcctgttttaaatagatttaaaactatataaaactaataggctggggaaggaaagaaaatagggaaaatgtcatttgtcttagaccttacaatctttaaaaatgactttgaaccttggtaacagttcagcttatttttttgttttggttttgtaaattctgattcccaaatgagtcactgacactcagtggtgaaagagaggccaccttgggaacacgtgggttggagctggggatggtaagtgtaggagaagctactatccagggaagtgcttaaagattccgtgagaaggaaattgccagtgatattcacccttttatgttgctgatattgacccttttatgttgctgatatcatcagcagtacctccaacaatttagcagttactaatacccataccctacagcaagttacctgcaccattccaatcccaggtatgataagggaaatgcttgttaaaactatgttttatgtttttatgttccagaaagtggtttttctacatttgggttatggtttttcttatactgttgacatttcactaaataaacaaagcaaatcaaaaagcccaaccacaaattcaagtaattctggacctaacttgatggccctaattctataattcatgatttaaataactacatcttttcttaggggatcatgaatttagtttgtcgataattgaggcccatatctgcttcttcctcttataaccctactgggggctgccttttccaggaaaagtggagtaattccattatgcctctccttagaatctcagtaaaagactagtggtagagttagaaatcactaacttattgtaaaatgtagatcatttatagatttctcttgttcaacttgctctacatcctctgtaaaccactgattaacaaagagctggctgtacctcccctatggcctgtaactctctctttttccccccacagaaagcggtcctcatgatgttcataaatgttccccaagagaatggtcttgcccagagtcgggacgatgcatctccatttataaagtttgtgatgggattttagattgcccaggaagagaagatgaaaacaacactagtaccggaaaatactgtagtgagtatagacatttacctgggtagctttcagataaagatatttctgttttctagaacagacgttcaaatacagtgtatctgttggcatttgcataacaaagcaccccaagacttagtggcataaactgagaaacgtgtcttatttctcacagttctgtgggttggctaggtagttcctctggcctgtatcagctcactcacacgtcaggatgttgcagtaaaagcttgggctagcctagccttgttgacccagaggctgaaagagcaaatcctagggctcaagtactttcaaggttctacttatgccaagtttgctcaagtcttattgtccaaagcaagacacttggccaaacccagagtggatggaagaaatagactccatctattgatgggaagagcctaacaattttttagcaactccccgttcctaatccctaacgcacacacagggaggattgtttcaatggcaattttgatgaccttaaagatgttctggagattttattacctggcttatacttatggaaaaaggccttgtctggctgtactaaaaaaaaaaaaaaaaaaaaaaaaaaaaagcttctggttcctgggttatgtaccttgagttactctccaatggcaaaactgagttggccatgcacagtgttgttcgattatgtcttgtgtgaccacattcatttatgaggaaactgactggaactagggattttttttctccttttttggggctgtagaatattcaccccaccaacaacccatcaactctgtggacagctgatggtcctgtaaggaaatgccatttaaaaccttgatttcatcaataatatactctaactaaatttgtgattgcctagaagtgcccatgtaactgcaaccccaaggttattttttgtttcctgacaaaaattgtacataatatttaaacaggcagagacctctatggcatttttttctctatttcatttgggagcccatttaaaaaagcttaaaaattaataagagatatgtagtcacagtatgaaagttggaaaataaaaattaaccaaaagaaaaaaatataatcacctgaaatcccatctcttgaagccagccacagttaatatttctagggcttattcttgctccagtcacttgggagttcttagccctttttactatgtagacacaaagatagacccatgcatgacctgatttttttttcataaataagacttttaatgacttatacttgcacatagttataactttaaaaaggagctttttcttttcttttgtttccactcaaggcagcctcttgttctgtcacccaggctagagtgcagtggtgcagtcatagctcactgcagcctccatcttttgggctcaagtgatcctcctgccttggcctcccaaagtgctgagattacagttgtgagccactgtgcctggctaatgcttttatttttaattttttgtgaatatgaggtgtagctacattacccaggctggtcttgatctcctggcttcaagcaatcttcctgtctcagttgaacttttattgcaaagttttgcagtaagctttgaagggtgacagatttttctgtacatctacttcatgcttactgagctgctactcatggaaaaagaagctattagattaatcagtcttgtccagaggtcaccattcatttaacaaagttcttttcttcgtttaggtatgactctgtgctctgccttgaactgccagtaccagtgccatgagacgccgtatggaggagcgtgtttttgtcccccaggttatatcatcaaccacaatgacagccgtacctgtgttggtaagtgatggggggcggcggctacttgtctttcattacagtacactgatgggtgccctgatctctgacatctaggaggttgcacttgtggagagtcgtcatggtctgtcataacaaagagcaacccagacctcacagaaaacctggcaaatagggaattttaactctgagaaggtttggtgtggtgtacaaggcaaaagaatggttctgtcatgagcgagttgactagctacctggaacctatccattacttgatgagggcggtagtccttttctgttttcttttcaagtatttggcatcaggattggtgcagccatactggttattgaatactgaactacttccatgaggttggtagatagctgctgcctgagcccagcaagcaccgctaccttgctcccctggcctcttctccaggatgcacaagcatccccaggatcccacaactaaagagttgttacctgacacagcagaggatcaccaggtcattgctcaggtgactacactggtgggccagtgcctttgctgggctggctactcattccactgattgtgacatccacttggaactatcattcaagatgagcagattctttatcatggtgcttccagatggtggctggcattaaactagacaccagtacaccaactatttcctcatatctctcctctctgacttcagaaatgatttctcccaatgagatttttgattttgatgccagctttatatctcactgtgattaggacggggccttatgatgggagaattagacttgaccaactatcatcagtttttgttttctcagtgagtttttggtgctctgatcttttttccttctatctgatttttgatacatgaacaacaaacatactagcaggaagtgatcacagagggagtttaaagaaaactatttttactgctgttgggaaaaggcatctggaaggcaattgaaactattcattaaaatttggtagtcatctatggggctccaaaatgattcagaattttcccaggatatttatattcttttgatattccttagaaatgtgaggtattctttagggcttttgggatagcaacaaacatgaaatgtgtaagaaatgcttctagaaaagtatttcttctgaaattattattttaatattattaaaatattaaaattttaatattaaaatattaaaattttaatattttagaactatttggtaacatttggaaaaaattattgaatatagataaacctaatgcagttattcagtctttagtctcagctcattgcttccaacataattatactttgtcaaatacagctaatcttaacaactactcatagccagaaaagcctttctttttttctttattattattattattattattcttcagcggaagtgctagcaaacagaaaaatgtattgataccagaaataaactctggtttgcaaattaaacttgaaattcttgagaaagtctgctcctcagcgttactgaaaactacaatcgttgggctcacttacctaccatatgccaaaaaaaattagatttttatatccagtaaagcaatccatttgagcttttccttgtgttcatagtgggtaactgtaggttcttaatatcaggaccacgtcccaaagttgcccatctaattgctcctcttaagtaactatattcaacaaggtactttaagatcaagtgacttaagtgaactctggaataatttaagaaggcccccaaatttctaatcattttaaaacattttataaataaaagttatgatctgcaactggacttaaataagattgcaggacacattttgtgttttattgttatcattaccattatattgggaatgcattcaagtaatttacagatacttttcacacgaatgcccttattggttaggtggtgacctgactctgggagccctgcctggatttcaggcagccctgcgcaaaggggcagcctcacttctgctcagagtggggctcgtctgtgggtgtgaggccactcctgtgtctttagcaaatgtcaggctccttttcccccctcactgctacccagctgccaatcccattcccagccttttagttctttaggcattttccttttctcttagtagaaaagaagttccaatagaaataccagaagccacattctcagtattacatcagcttttctctctttttcctttatcaactcccaaagaggagttggggctgagctgtcttacagttgaaacttgataggccatgaagtcctttcaggaaaagtgatttgttctttcagaatcgctaattcagtcttgtgatgccccacaagctgttctcagttttttgttccaccctagagcccagataacacattttccatattttccaacatataagtctgtggtgagccttgggttgtatttccaaatgtctagggttttctaaatgtcagagattcaggccacttcaattttcaatagcctctcacaaagcgaaaggctgtcataacaatgttcttgttttataaaattttgcatttaacctactagtgaatgtaaggcagaatattgcagtattatgtgtgcacaggataatttcaggatcagagaagataccacaattaataacacattggaagtagtgtgttctaataccggggcactaattttaagttccacaacagacatcttctttcattcccgccagcgcgtttctgggactttagtacagacaacctcatttggagataatctcaaaagtctacatttgagggcctttgtgaatatgaggcctcctgccacctgcagagaccttttctgtgacctttgctgtccttcaagaatgtgtcatttgcctctgagttttgaggctgggttaacatttatttcacatttgtttcaaagaagactgtatttttctctctttatagagaactctttaaatacatgacgttaggaaaccagttacacttgtttcagctgagctgaatttttaggggaattgttgctttggtttgctctctcaagcatttcatttcaacaaatactctctgtatggctataaccctctgcatggctgacgcattacacaggcttcaggtgttggaaacctatgcaacatttattatcttagacatggctccccagtgaatacctcggtggtaatcaagaataacattgaataatcctgacacgaaatcttgtgtctttctaccattcatctgcctctggtagtgttgacctggcagtggaagctctgaggcatgctgaagcagtttactgggctcattgtttctgattgacaggacatgctgtttgttgacagaatgacatcgtggtgcagagtgagggcagggaggtcattcagcatggtggggtttcacacagccagatggatcagagggtggccaaggggggctcagttaaaaaggggtttttgagtcattttcacagcagtatttgttggtgggaggagacaaagaataaaaaggaaagaaaaatagataaaggtattggagtgagagggggattgtaaagtagtgttttagtgttttgtgtggtttccactatcttttctactctcacgaaaaccctcaattctacttttatttttcttgtcttcactctggctgctgatggatgttaattaaccttcatattcctctatagtgatccaaggatacaatcttattgtcacaaaagtgacagcaattttatacactcattcaaatcctgtttttttgtgatagggtctcactgtcgcccaggctggagtgcagtggcattatcacgctcactgcagcctcccacttcagcctcccgaatagctgggactacaggcacgtgcctccatgcctggctaatttttttttttttttttttaattcttagtacacataaacccttgccatattgcccaggctagtctcaaacccttggactcaagcaatcctcccaccttaccctcccaaagtgctgggattataggcgtgagccactgtgcctggcccactcattcaaatctttaaaccacttgtagtgcaggtgataggaagggcatttgtgctagagaattcctagttatgacttctccacctttggtttccttctgtttgacatcagaacttctgcttagagtgactccagatccttagacgtggtctcatggatcttgcattcaaaatgaagttatgacattctgggggtttgagggagaatgtcctgtactttttttcctgctgaggcaaagccttaggtggagctttctcagggctgagttaaggggacagaagggattcatcagtgagggcatttcacaccctcatgtggcatttcacttggtagtgtccagatcggattgggttttttttcctctggttagtcacggtccttggaaagaaagatatgctggctcatgttgttatgtttaatctgcagggaaaatgggatcattagaagagccttcttggggctggatgcggtggcttacgcctgcagtcccatcactttgggaggccaaggcaagctgcttacttgagatcaggagtttgagaccagcctggccaacatggggaaatgccgtctctactaaaaatacaaaaatattagccaggtgtggtggcgcacacctgtagttccagctactcggtaggctgaggtggaaggatcacttgaacccgggaggcggaggttgcagtgagccgagactgtgccactgcactccagcctgggcaacagactgtgactccatctcaaaaaaaaaaaaaaaaaaaaaaaaaagaaaaaaaagaaaaagaaaagaaaagagaagaaacttggccttttggtgggttatggaatggtgggccacccagcaggaatggttgaacccaattcacaactctgacagttgctgcaaatgtaatcagatcatagaaatctggagaattctagacttgggagtgcagtggtttcagaaattataatctacttgagaacttcctgaaaccagagggtgtgggaactctattgttatagtttgtataggtcatcctcccagggaagcgaggagggtgaaggatgatggagagtggacgtggacttggaaagtcagatgtaccaatttctgcacccctgaagccttatagtctttaagaaagactcttctaatattttgttgtgttctcccctccatattctattgtttatgtcaattatattggaactatttttaaacagtagaactgggacttctctggtaatgaacagagctctgtcatgtaagggacttcaatgaacacttactaaatgagtgaataataagttaaccaataagtagaggagaagacatttttgatgtcttgaaaataagttcaatttaattttggttataattttttgacatcagaggaaagacagctgggtaaatagacctttccaagtactttattgcagtcatagatttgtttcttcctgaggggctgtctataggcaggtcttactttattcagaaatagtgctgtccaatagaactttctgcagtgatgtaaatgtgtatcttcactctgtcatattgtaaccactagtcatatgtggctattgagcacttgaaatgtggcaagtgactaggaaagcaaattattaattttattttattttaattaatctaaagatacatttagatagccacagggggttagtggctgccatgttggaaagcatagtattgaagggaaacatttacaccaaaatttatatatttgtagactaacattaataaatgaaatgcagtaccatagggctatgaattcaggaagtgttgtgcattttctgtaaagttatccttcatgtaggtttaaaaaatgatgtaaatgttctttttccttacatgaagatggttgttataaattctcagaacctgtgcctaattccagagggtgtttatttagacatgggcaacaccacattcttggccatcttatctaggatttttgtcagagagtgcttaataaatgctgataaccttgactacaaatgtgtattttccatatggcagagtttgatgattgccagatatggggaatttgtgaccagaagtgtgaaagccgacctggccgtcacctgtgccactgtgaagaagggtatatcttggagcgtggacagtattgcaaagctaatgattcctgtgagtaaattatggacacctgtgtctctgaacagtgaacagattctaatagcttctttccttccttctgatgacaacagaattatcagcatttttgttgttggcagggctttatcattacaaatcagggatggctcctactgcctagaaaaattggtcaacattaatttcatactttgattattaaggaccaatttgtcgactaatggtgaccattattaatattttttaattgattgattgtttactttgcctaggctatcatgtcacccacctttaattgtggaataaatgctatgcctacatttgattggcttggacatttaacttttaattaattacctaccacaaaagtaggcgacaactatctacagaaataattttcacagtgttcttgcaaaatttagggatatttccaaatggacatgctaaatttggattaacaattttttgaatgcactaactctgggtaatttgttggaatcagtgtaagagtatgaaaagtagagagtagtacagagtagtagagaaaagtcatggagaaaatctgcaaaaaatagatgagggctccaaagcattttgtcgctgttgatttctccggacgaaggtctcaatataaactcctattttccaatagttatttaacacttgattttgaagtgtctttggtgtcttctgaaacttaactgctcccatgactgaagaatggcccattttctacttgtttttgtgtagaaatacctgatttgctgtgtagtaacttttaggttcagcggatttttaacaattcaatgtgtttatttttgcataggtaacatatttatatgttcacaaattttaaattataagaagatatgtagtgaaatgccttcctccataactattcccctctgcatggttttcaccttctctttcctatgagtaattgccgtttctttattttagttctagagattttttaatgaataaacaagaacatacaaatatagatatttaactgtatttacatatctatatatggtagtaaactatatgcacagttctgcatcttgtgaatgtactgaagatattttccagagctttccatttcagcacatgaagttatttcttaattattttatttatttatttatttatttttatttatttatttttgagaatgagtctcgctctgttgcccaggctggagtgcagtggcgccatcttggctcactgcaacctccgcctcccgggttcaggcaattctctgcctcagcctcccgagtagctgggactacaggcttctgccaccacacccagctaatttttgtatttttagtagagacggggtttcatcatgttagccaggatggtcttgatctcctgacctcataatttacctgccttggcctcccaaagtgctgggattacaggcatgaaccaccgcatccggccttatttatttatttttgagatggagtcttgctcttgttgcccaggctggagtgcaatggcaagatcttgcctcactgcaatctccgcctctcgggttcaagcgattctcctgcctcagcctcctgagtagctgagattacaggcccccgccaccatgcccagctaatttttgtatttttggtagaaacagggtttccccatgttggccaggctgatctcgaactcctgacttcaggtgatctgcctacctcagtccctcaaagtgctgggattacaggtgtgagccactgcgcctggccttaattatttttttataatggcataatattccttcttttatgttcataatttgtttaactagtcctctactgatcaatttttatatcattccttatcttttgctattgccaataagactgcaattaataccttgttcatatatcattttgcatacctgcgagtaaacagacagaacagatttggaaccaccattaccatctttttcagagtgatttcctggtaatctttaaaatgtcttctgtgtttaacaaaatctaaagttgcacatggggctaaggtgcccataccatcaaggagtctcgaaaatatctgagaaatactctcctcagtgtcattgaaagtgcattggactagcatccagaatgcttgaattcttaccaaattcttcctaacttactgagattttggacgcttcattaagcctttttgtgcctcaatttgcccttctgtaaaatggatagaatgctagctatctgtctgcctcagaggtttatgttaaaatcaggtaagacaacctagaagatagcatttgaaaaagcagaaagcatatcatttgtaagctacttcaccatccttgctcatctgaaggagtggtgatgccttccttcttcgcatttagttggcgaggcctccattatcttctccaatggtcgggatttgttaattggtgatattcatggaaggagcttccggatcctagtggagtctcagaatcgtggagtggccgtgggtgtggctttccactatcacctgcaaagagttttttggacagacaccgtgcaaaataaggtaaatagaaatttcagtagctgaatggaaccctgagcacaaagtgttgatagcttttcacttttagagggagtagaggggaaagttcctttgttttctaacaaaaaaggcccttgagatattttatgttaatcagcaccttttccatgctatactattacatgtgacctattaaacaaagcagtctattatatggattagccttgagcaacttttaattttattcgaagtggagtccaggagcctaattaaaagaaatagtagacattctttcaaaactggatagatatttggtagtaatttttgaaatttgatcatttaaaatgtaaaaagcacactgcttttctggatgataaaaatcagatttttacctgcatcttctaaatggaactgtaattcgggatcgagtaacaaatattgacggtattttgtttaatggcccaaattttgtttcactgtcttatttggaaagtgtgatgggtttaatttcatcttggagtaatgcaatggagatttttgaaacataaatttcagaaactcttaaagagttatggaattttatttatttcttcttacattttattataccattaatacgattctcatttatttaaatgataacttgcatgaaatttctgaaaattgagaatttagatttttagcacttctgatttgattatagctaaaaaaaatcaaaacaaaccacgtagttagtgatgctgaagaaatataataattttggtttttctttcaggttttttcagttgacattaatggtttaaatatccaagaggttctcaatgtttctgttgaaaccccagagaacctggctgtggactgggttaataataaaatctatctagtggaaaccaaggtcaaccgcatagatatggtaaatttggatggaagctatcgggttacccttataactgaaaacttggggcatcctagaggaattgccgtggacccaactgttgggtaagtgatgtgaaaacatattgattcctgtatttttagaattttctctctccctctatacactgaacatctactggattaatcaaaggctcattctgatttcttttaggctgtatactctagaagccatgtctattttgtgcccttatttatagaagctttaagagagtttattaaatataatcctatttgaggacatgttacccaaacacacctagtggtgtactaaaaatacttgttgttttggggctatgaattttattcttagtgtttgccacgttttcctagctaagagattggattttgtgttctaactcaatctaataatattattacaactaaacatcacttatgcttcattattattaagatgattactctaacatgaattagctgtaaagatttttaaagatggaggttggaactattcctttcagaactttcttgatacaggctgggattgagatatcaatgctaatatctcattacaagttgttcagtctgaatcaatccagcaacaccgataatgcttttcttcaggtttaaatttaaatttcccaatcttcacatttgagaagtgttataggagacttagctttctcctagaatttcacaattgggtcttaggacccttggataagctttaggctattttagtctttgtgaatgatgattattcagttctacttcattatatcagctatccttccttgaaaatgacggaaatgttctctgtgcctcagaatggaaaactgaggagcaaaatggcttgatagcttcttttaaaaggtatttgtaagttttcctgggtgtaaaaaagagaagcaaaggacaaataaaggaaacagaggagaaagttcagaaggtgaatatgaattttttttttttgagacaggttcttgctctgttgcccaggctggagtgcagcagcacaatcacagcgtgccgcagacttgaacttctgggctcaagcaatcctcccacctcagcttcctgagtagctgagactatgggcaagtgccatcatgcccagctaatcttttaatttttgtagagatggggtcttgccatgttgcccaggctggtcttgaaacatgggcctcaagcaatccttctatgttggcctcccaaagtgctaggaccacaggcatgaaccactgtgcctggctggctgaatatgaacttttagactgccatattagtgcatcataatagttgctatttggaactgttgatgctcctgactgacccccacagtctctttaaaaaaaaaaaacaacttaatttccctgttgttttatactgtggttctctaatcagctggataaaatttccattgatccaaacacactgttaaaaaaaattcccaggttaacttgtaaaataccagattctttcatcttctgtttttcttttgtagttatttatttttctcagattgggagagcctttctggggaacctaagctggaaagggcattcatggatggcagcaaccgtaaagacttggtgaaaacaaagctgggatggcctgctggggtaactctggatatgatatcgaagcgtgtttactgggttgactctcggtttgattacattgaaactgtaacttatgatggaattcaaaggtaagaagtattttttatggcttatggctttataagttgcagggaaagtgcataaaatggctgcagagaaatatcaaaggaccagaattaaaatattgctttgttggtggacatgatagctttaatgacctttgtactgacatttgcatgaagtgacctgctctattttgttaacttttcttgtgtcccataacacaagaggtaaacgctcattaaatataacctccagcatttgttctttgatttctcctctccaactcttcccctagtcccacatgatgcacattattttcattcactcctgagttcatttgtgctttgtttctcaagatcactttcccttttaattttctaaccttcccccaataaatacatgttttattaggtatttgatgttgcctactgggaattaattggattttactctgctcttatatatttcaaatttcaaggagaaattctttgtattgtatttttacctggtatacaaagatacttaaacagcaatatttgaatgtagaatatggctttctttttttttttttttttttgagatggagtctcactctgtcacccaggctgaagtgcagtgatgcaatctcggttcactgcaaactccacctcccaagttcaagtgattctcctgcttcaacctccccagtagctaggattacaagcatacaccaccatgcctggcaatttttgtatttttagtagagataaaatttcaccgtgtttcccaggctggtcccaaactcctaacctcaagttattcgcctgcctcagcctcccaaagtattgggattacagatgtgagccactacacctggctgaatatggcatattttttttcatctttttactctgattagagctaactacaacttaatgtaaaaaaaattattttagatcctctccttttggtattttcaaaaattgggtaaaacatgttcttcaaattttgacccaaaatattattctttgtggattcagcaaataggctggttaacttaatttttcccaatgacttgattttattgttttctcaatgaaagcaatattatagttttgtttcctcttgtatttccattttgtaaggataatatcacagtttgccattggattatatatccttgggacaatctctgcttggttaaatgaagtattgtgtattaatatggtgacttcctatcactgaaactggcttccataaggagaatatgaataaattttatgaaaaaattagctaacccaataagtcacataaaataattgtgaaattgcttaaattttttctctttgggatgttttagcattatattatatagtctaacttttgctgaagtaaaaaaaagtaaagcataaaagataaaaatcaatggaatttcaaaaagatttgagtggtttgctggctgtgaagaaacatcaaagaaatattaaagctcacaagtacagctgaaatcataaagtcattgcctctcgctttgccagcaggtggcattcagggttttggaatttgctaactgagagagaaactattctctaatcttaatgtaccatgtcattatagaatgtttcaaagtgtgcactaacctgccaccttaggtttctttgtttactcccctttagtgtgtttcccagctttaatatcttcaagtcttttcttagagctctattgtcctttttagttttcaggggatgctaagatttttctttgaggtctttgtattacgccaaaataaagaaaataagagttttcccatatcaaccgtcctctgcctcactctgttcatgagtctaactgaatcattgtttatggagacatagtcacggggggcgttgttgatttcctctcttcgcttagtgcctaattttacttctgttttcttcccagttaagtggctttgggcctccattacaagtatgatcagttgatagttccatcaagcagatgcataagagtggtagtggcattgcttcttgctttccttacagtgacatcaggaacagatgtgggcgtttgctggggcttgaaccctaccactcactgtcctgctccctaattgctaggaaatgctcaatggtgcagtgggaaatagttggcaaaggcatcttttcccagacttccaaagtcttggtatactctttcacttatggtattcaaaatgctatttcacatcttagccttttagatgtggggcaacctaaaaggaatgaagaacaaaaggggaaacagtaaattccaaaaaagtctaggacaagctaaaggattgactgggactggaatgtaagtctcaagggtcttttccaagagacaacatgaaaatccttctatcatatgtagatggaaatatgtatacatctaaaatgtatcttttctatctattccgtatttgtgacaagaaattatttagcttttcaggcatttaattgaactaactacagctttaattataataaagcaaaactaacaaattgtatgatatatatgtgtcttttataacaggaagactgtagttcatggaggctccctcattcctcatccctttggagtaagcttatttgaaggtcaggtgttctttacagattggacaaagatggccgtgctgaaggcaaacaagttcacagagaccaacccacaagtgtactaccaggcttccctgaggccctatggagtgactgtttaccattccctcagacagccctatggtaagcctcagagcagtggtaaccatgcttggtaccggacttggtggaaaggttttctcaaagctttgaaagttaataatgaggggtcttatgtgatttgggtggcattctcaagtatatgaagggttacccagagtgttaaactctctgaaactggttctgcaggttaggagcattctgaagaaactgatgtatttcacagttaaatgccaaatctagagggaatttagagatttatttaacagatgtttattagcacctgcaaagatgcttgggggtatagcagctcacaaaccaaaccaaaatacctatcctcattctactgggaaagacatctatttcaaacttctaatattacagttaaggaaacaggtcccatagaagaaaatgacatgtctaagtgtccattttcggtagcatcagagccatttttttcttcttctctgttgcatatgtatggcacctgttctttggttctgattaatctgtcataggccaactgggtttggtgtctctctggctggtcacttattttaaaaaaagaaatattttgattcagacactgcttagtcttctcctgttattttaccacgtgattttttctttttattttttctgagatgggatttccactatgttggccagacttttctggaactccgggcttcaagcgatcctcctgccccggcttcccaaagtgttgggattacaggtgtaagccactgcacctggcctatcataagctttgtttatgtttccaggttatagcttgagctttgataagtctatcaggactgtatatagctcttttctgtatttgcttgtggatcaaagaaaaagaaacataaactacactacgttggtagaaagcttaatattggtgagcaataatttagaggaaaacagatttgctctaaaactcatgttaagtgatggatctatttaggatgaagaaagactgcaaagtaatgaggttaacttaacaaaagcccaaccactagaaatgacacattcagatgaatctccttcaatgtcatcatcctgggaaagtataaacttgtctaaaaatagatattttatctgaaaacatttttggaaatatctgttttgaatagtttttacactcaattcacaactaaactcacacctgccctcacattagatccattagatcaatgatcaatgtgatcactcaaattactattttcattatttggctcagaatgacatctgcctattgtttccccaaatcaatccacctgagaagataaagagaatattttaaagaataagtcaaaggctaaaaagacaattttgaaagcagatataaaatttctagctgtggcagtgctcttcctaaggtcactactttgagagtggcttttggaagtataaactggtttgtgttgcagacatttaaggttttggaatcagatctggctttgaatcctagtcaagctgtttagctgctgaataatgttgggcaagttatttaactgtttagattcttggtttctcctctgtaaaattggaggactaatacttacctcttagagctattggttaagttggtttacttacaaagtaagcatccagtgagtaatatttattatatcctacaaatggcaaaaaagcagtgaagtgtgggttttcttttgacaattatttctaatcatggaggatagcagacatactctgacataattattggggagaaagttgtaggagtcctttctttttttttgccaccgtctgttggagagtggatgggagagcagcagtgaaattgggagggttagtgtagccagatgtggatgtatccagtagtaaccagtagtaatgttttcaacacgttgctaatccattactctatttcacctataggtgaaaagggctagaagtggcttcatgtcttggataattacacatttctaattgcaatttaaccctgtgcatttttccttccagctaccaatccgtgtaaagataacaatgggggctgtgagcaggtctgtgtcctcagccacagaacagataatgatggtttgggtttccgttgcaagtgcacattcggcttccaactggatacagatgagcgccactgcattggtaagaagtctgttttggacgttgttggcaggtgacacaggtgtatgtgtgtccaaacctctaactagactaactgctactcttgaactggaccagctccctgtctaacttcttgactgcaaataagctttctgtagcccacagggcatcttccttggtaggcaccacttctactatacacagaactatgtttgaaaatgtaaatttctgtcttttgggattttgctttaatcccacatctaaggttttcttgggttcccttccccctttgtttcctgaagcctttttctcctattaactatgatcttgaaattccatatggttgaactttgagctcttttctatgctatgtataccttttccactttagatgttagccttaactttgatgggaagtactgtacttctccccactttgacttctcctagaccaccacgtatgcccctttcaaccaggtaatcacatctgaatcttatctggcttattttttctctctgtattccaaagtaaactcctgagcattggggtggctcagttactcacacagtttttcacctttcagttcaaactttcttgtatctgcctccatattcctgatttcattcttaccttgaaggtttcctttcttcctctttggtttcctacacatctattcacacttaagccatcgcctgggccccagctaatgatgaaatgcactcctacaatatttgtttttcttattttcacttctacatttctcctttctgtgcctgtgacaaattcttgctctccagatgttgcggtttctagcgtcgtatataaattatcttattctaacccagacacatttgttaacttcttaggtagttttagattcagaaaaatcaccctcattaaaaacaacatgtatttctaactattatatcaatagtgcgttgtctaataattttgcttttaaattccgttactgcgatttttatctttgtcttgggcatacctccttcatcttcttgactccctggcatcctgtcacagtctcctctttgctgttaaacatcacttcttcttacctatttcctttatccctccccttccttccctgctttcactcctttatatctttatatttctgattgctgttaattatcttggtatctactgtaaggttcttggtgtagatctctatgcagaagttaaaccaacttgaggattgttacggaattactatagagttcagctctgtatgatttttaaacaaaagattgatggcacaggtgagaaaggtttctgtgtgtgtgtgtgtgtgtgtgtgtgtgtgtgtgtgtgtgtgtgcatgttttgcctgtttattgtaatgatacttataacttgataattaaaactcagtatctaatttttaagcagtcctttttattttatttatttatactattttactttaagttctagggtacatgtgcacaatgtgcaggtttgttacatatgtatacatgtgccatgttggtgtgctgcacccgttaactcgtcattacattagatgtatctcctattttataaattaagcatatggatatcatttttcatataaatacattttaaggatacatttcttaggaagaaggaagattctaatacttgtatctccctcatagttgcttatctttttttcttccctgtattatttctaactatgctttccaaaaatttatttttacatttatttcagaattatattttataatttaaagtttgctctgtggatgcatttatctggaatttgggaggagagaaaagaaccatgctgtgactgactgtgctgtgttattcttcctacagctgttcagaatttcctcattttttcatcccaagttgctattcgtgggatcccgttcaccttgtctacccaggaagatgtcatggttccagtttcggggaatccttctttctttgtcgggattgattttgacgcccaggacagcactatctttttttcagatatgtcaaaacacatgatttttaagcaaaagattgatggcacaggtgagaaaggtttgtgtgtgtgtgtgtgtgtgtatgcgtgttttgcctgtttattgtaatgatacttacaacttgataattaaaactcagtatctaatttttaagcagtcttatttatttatttatttatttatttatttatttatactattttactttaagttctagggtacatgtgcacaacgtgcaggtttgttacatatgtatacatgtgccatgttggtgtgctgcacccgttaactcgtcatttatgttaggtatatctcctaatgctatccctccccctccccccaccccacgacaggccctggcgtgtgatgttccccatcctgtgtccatgtgtgctcattgttcaattcccacctgtgagtgagaacatgtggtgtttggttttctgtccttgcaatagtttgctgagaatgatgatttccaatttcatccatgtccctgtaaagaacatgaactcatccttttttatggctgcatagtattccatggtgcatatgtaacacattttcttaatccagtctatcattgatgaacatttgggttggttccaagtttttgctgttgtgaatagtgccgcaataaacatacgtgagcatgtgtctttatagcagcatgatttataatcctttgggtatatgcccagtaatgggatggctgggtcaaatgttatttctagttctagatccctgaggaatctccacactgtcttccacaatggttgaactagtttacagtccctccaacagtgtaaaagtgttcctatatctccacatcctctccagcacctgttgtttcctgactttttaatgatcgccattctaactggtgtgagatggtatctcattgtgattttgatttgcatttctctgatggctagtgatgatgagcattttttcttgtgtctgttgcctccataaatgtctttttttgagaagtgtctgttcatatccttcacccactttttgatggggttgtttgattttttcttgtaaatttgtttaagttctttgtagattctggatattagccctttgtaagatgggtagattgtaaaaattttctcctattctgtaggttgcctgttcactctgatggtagtttgttttgctgtgcagaagctctttagtctaattagatcccatttgtcaattttggcttttgttgccattgcttttggtgttgcagtcatgaagtccttgcccacacctatggcctgaatggtattgtctaggttttcttctaagggttcttatggctttaggtctaacatttaaatctttaatccatcttgaattgatttttgtataaggtgtaaggaagggatccagtttcagctttctaaatatggctagccagttttcccagtaccatttattaaatagggaatcctttccccatttcttgtttttgtcaggtttgtcaaagatcagatggttgtagatgtgtgatatcatttctgaggactctattctgttccattggtctatatctctgttttggtaccagtaccatgctgttttggttactgtagccttgtagtatagcttgaagtcaggtagtgtgatgccttcagctttgttcttttggcttaggattgtcttggcaatgcaggctcttttttggttccatatgaactttaaagtagttttttccaattctgtgaagaaagtcattggtagcttgatggggatggcattgaatctataaatcaccttgggcagtatggccattttcacaatattgattcttcctatccatgagcatggattgttcttccatttgtttgtgtcctcttttattttgctgagcagtggtttgtagttctccttgaagaggtccttcacatcccttgtaagttggattcctaggtattttattctctttgaagcaattgtgaatgggagttcactcatgatttggctctctgtttgtctgttattggtgtataggaatgcttgtgatttttgcacattgattttgtatcctgagactttgctgaagttgcttatcagcttaaggagatattgggctgagatgatggggttttctaaatatacagtcatatcatctgcaaacagggacaatttgacttcctcttttcctaattgaataccctttatttccttctcctgactaattgccctggccagaacttccaacactatgctgagtaggagtggcgagagagggcatccctgccttgtgccagttttcaaagggaatgcttccagtttttgtccattcagtatgatattggctgtgggtttgtcataaatagctcttattattttgagatacatcccatcaatacctagtttattgatttagcatgaagggctgttgaattttgtcaaaggccttttctgcatctattgagataatcatgtggtttttgtctttggttctgtttatatgctggattacgtttattgatttgtgtatgctgaaccagcattgcatcacagggatgaagcccacttgatcatggtggataagctttttgatgtgatcctggattcggtttgccagtattttattgaggatttttgcatcaatgttcatcagggatattggtctaaaattctctttttttgttgtgtctctgccaggctttggtatcagaatgatgttggcctcataaaatgaattagggatgattccctctttttgctttgattggaatagtttcagaaggaatggaaccagctcctctttgtacctctggtagaattcggctgtgaatccgtctggtcctggacattttttgggttggtaggctattaattattgcctcaatttcagaacctgttattggactattcagggattcagcttcttcctggtttagtcttgggagggtgtatgtgtccaggaatttatctatttcttctagattttctagtttatttgcatagaggtatttacagtattctctgatggtagtttgtatttctttgggatgggtggtgatatcccctttatcattttttattgtgtctagttgattcttctctcttttcttctttattagtcttgctagcggtctatcaattttgttcattttttcaaaaaaccagctcctggattcattgattttttgaagggttttttgtgtctctatctccttcagttctgctatgatcttagttatttcttgccttccgttagcttttgaatgtgtttgctctcgcttctctagttcttttaattgtgatgttagggtgtcagttttagatctctactgctttctcctgtgggcatttagtgctataaatttccttctacaccctacttcaaatgtgtcccagagattctggtgtgttgtgtctttggtctcattggtttcacagaacgtctttatttctgccttcatttcgttgcttacccagtagtcattcaggagcacgttgttcagtttccgtgtagttgagtggttttgagtgagtttctggatcctgagttctaatttgattgccttgtggtctgagagacagtttgttataatttctgttcttttacatttgctgaggagtgctttacttccaactatgtggtcaattttggaataagtgcgatgtggtgctgagaggaatgtatactctgttgatttggggtggatagttatgtaagcagagattttactaagcttcctaaatagttttagattgagaaaataaatttattgcttttttatggattaaggtaaaacaaacacctttcctttattttagaaacacgttatttttgggaaccgagacgggaggattgcttgaggccgggagtttgagaccagcctgagcaacatagtgagattccacttgtaccaaaaaaagaaaaaaattagccagatgtggtggcatgtacctgtagtccccactacttgggaggctgcaatggaaggattgtttgagcccaggagatccaggttgcagtgagctatgaccataccactgcactccagcttgggcaacagagtgcaaccctatctcggaaaaaaaaaaaaaaaaaaaaggttacaaacgtgtgtgtattttaacaatgaccaatgttaacataaaagaaatgtcacgtgtatgagagccattaacagattaattgactagacactgtttttcatactcaagcagccagattgattaaaggggaagacatctcttcagggatgctggactatgtaaatgccaagggtttggtttgtaatagtaataaaatttgtaagcaatataacataccaactaagagagccagcttaggagctacactgcctggttccaaattccagcttcccacatttcctagctttgtaactttggggaagttactcaatttccttttgcctcaattttctagtctgaaaaatatgcggttcatatattgctcataaggttgttgagagaatttttggctaatgcatgtaaacacctagagtaatggctagaaaatagtaaatattcagtaaatgttggatatcattttatctgttatcaatataaaaccatattgcccaccctcccctgcccctaatccagacctgctctggggagggaacagctcttttgactatttcttcttttgtttgtctccatgtttctaaatgctttgtttatacttctatttcttgatttatcatttttgatatttacttccttgttctaggtgagcgttttgctttcttacatcattcttctctcccagcttctgacttccctccccccattctccttaaaaagctagattataatttttggttaaattaatcatatgtgtttatattattaacataatataaatataaatattgttcactgctcagccaattagtattctaggatgacatttcttgacaatttttgacaattgccccattttcatttgcttagtttttaaatataacaatcatgtattttccccaaatgctctaatagctctatcaaatgcctgtacaaagacagaaaacaatctataattttttttttctttctggagacccctatcctgtgttccaattgggacttgtttttctctggcctggtgcacagacttctctttgccactcccctgtgctggaacttctgtttgtggcaggccatttatttctttttctagatttatttcctcattttgctgaaacaagttacatgatagcttcctgagaaacataagtaggtggcatatattttgagtctttgaatgtctgtgagtgttttattttgctctccatcttgactgtttggctgggtacaggttgcaagttaatttaaacctggaatttgaagacattgctctagtgacgtctaatatctagtgttgagtccagtgccattctgagtaccatttctatggatatgactttgatatggatatggatatgacattaaaaattaatcttcctctgtttccattttctctggattccttttccttttgatttcttttcaactttcttctttttgatggaagctttttccaagtgtctgagttgctagtttggtattaagggtgaggttataaaacctgacccaaaagtctgtacatgtggataggccttgtcagctggtgagcttcaggcaggaaggtggcttggttgccagattgctccccaaggcaacattagtgagtcttttctggagatggtcaatttctccttcatagatgcctccattttccttcatgaggtaaggggaagatgtggggagatggtggtctgttctgggggtgattaatttctcctccatagatgccttcattctccttcttggagtaaggggaagatgtgggaagatggtggtctgttctgggggtgattaatttctccttcatagatgccttcattctccttcttggggtaaggggaagatgtggggagatggtggtctgttctgggagtgggcagaggaaagggagctgagggcgccctttcagtattcctataatcctcctgtactcagttccacatccatctcagttctgtgttgaggactgtgccttgaacccatagccattctgcttcagctcctccagagaaaatctgtggtcccttagaggagatagaggagtggcgtgacactcaggatctgggagggacctaggcattggattgctccttatcttgctttatctgagccccttagttcctcgcccctgcctttgttaggacctggtgcctctgagtgtgagtgcactgaggcttctgcatatgtgggtgtgtctctcttctgttgacacttagtttgtagcattttccccttcttaactgagttatcactcctccaataccttacttttcaaacatttgttggaattactcatctgctgttattttactgtcttttaagtagaatttcggaggaagaggagataaacatgtttggtttgtcaatctgctattttgaatgagaaattatcttttttgaggacttagaatcaggcccactgagcttggagcactgcagtcgagcttagttctcaggaaaaggtagtattgggtttctagctgcatgcaggccaagtctcccacaggcacctccacaggtcagcttccttctgttttgttgatctggaattctcatagtatttttggtaaacttcaagttcgtatgctgagcaacctacctttttttaatttttttatttttatttatttatttattattatactttaagttttagggtacatgtgtacaatgtgcaggttagttacatatgtatacatgtgccatgctggtgcgctgcacccactaactcgtcatctagcattagttatatctcccaatgctatccctcctcccgcgccaccccacaacagtccccagagtgtgatgttccccttcctgtgtccatgtgttctcattgttcaattcccacctatgagtgagaatatgcagtgtttggttttttgttcttgtgatagtttgctgagaatgatgatttccaatttcatccatgtccctacaaaggacatgaactcatcattttttatggctgcatagtattccatggcatatatgtgccacattttcttaatccagtctatcattgttggacatttgggttggttccaagtctttgctattgtgaatagtgccgcaataaacatacgtgtgcatgtgtctttatagcagcatgatttatagtcctctgggtatatacccagtaatgcgatggctgggtcaaatggtatgtctagttctagatccctgaggaatcgccacactgacttccacaatggttgaactagtttacagtcccaccaacagtgtaaaagtgttcctatttctccacatcctctccagcacctgttgtttcctgactttttaatgattgccattctaactggtgtgaaatggtatctcattgtggttttgatttgcatttctctgatggccagtgatggtgagcattttttcatgtgttttttggctgcataaatgtcttcttttgagaagtgtctgttcatatcctttgcccactttttgatggggttgtttgtttttttcttgtaaatttgtttgagttcattgtagattctggatattagccctttgtcagatgagtaggttgcgaatattttctcccattttgtgggttgcctgttcactgtgatggtagtttcttttgctgtgcagaagctctttagtttaattagatcccatttgtcaattttggcttttgttgccattgcttttggtgttttagacatgaagtctttgcccatgcctatgtcctgaatggtaatgcctaggttttcttctagggtttttatggttttaggtctaatatttaagtctttaagccatcttgaattgatatttgtataaggtgtaaggaagggatccagtttcagctttctacatatggctagccagttttcccagcaccatttattaaatagggaatcctttccccattgctttttttctcaggtttgtcaaagatcagatagttgtagatatacggcgttatttctgagggctctgttctgttccattggtctatatctgtgttttggtaccagtaccatgctgttttgcttactatagccttgtaggatagtttgaagtcaggtagtgtgatgcctccagctttgttcttttggcttaggattgacttggcgatgcgggctcttttttggttccatatgagctttaaagtagttttttccaattctgtgaagaaagtcattggtagcttgatggggatggcattgaatctataaattaccttgggcagtatggccattttcacgatattgattcttcctacccatgagcatggaatgttcttccatttgtttgtatcctcttttatttcattgagcagtggtttgtagttcttcttgaagaggtccttcacatcccttgtaagttggattcctaggtattttattctctttgaagcaattgtgaatgggagttcactcatgatttggctctctgtttgtctgttattggtgtataagaatgcttgtgatttttgtacattgattttgtatcctgagactttgctgaagttgcttatcagcttaaggagattttgggctgagacgatggggttttctagatataccatcatgtcgtctgcaaacagggacaatttgacttcctcttttcctaattgaataccctttatttccttctcctgcctaattggcctggccagaatttccaacactatgttgaataggagtggtgagagagggcatccctgtcttgtgccagttttcaaagggaatgcttccagtttttgcccattcagtatgatattggctgtgggtttgtcatagatagctcttattattttgagatatgccccatcaatacctagtttattgagagtttttagcatgaagggttgttgacttttgtcaaaggccttttctgcatctattgagataatcatgtggtttttgtctttggctctgtttatatgctggattacatttattgatttgcgtatattgaaccagccttgcatcccagggatgaagcccacttgatcatggtggataagctttttgatgtgctgctggattcggtttgccagtattttattgaggatctttgcatcaatgttcatcaaggatattggtctaaaatgctctgttttggttgtgtctctgcctggctttggtatcaggatgatgctggcctcataaaatgagttagggaggattccctctttttctattgattggaatcatttcagaaggaatggtaccagttcctccttgtacctctggtagaattcggctgtgaatccatctggtcctggactctttttggcaacctaccttttaaaatattcctcatagtcagtggttaaactctgtatgctttgttgagggaggcattacattgttcttttttttttttttgaatgagtacacagtatatgcaggaaatgagttgtcagaaatcaaattagctaatgtggtggtgtggtgtagtgccagatacttgggaggatcacttgaggtcaggtgtttgaggctgcagtgggctatgactgtgccactgcactccagcctaggtaagacctgtctctaaagaaaaagaaaaagaaatcatattaaaagtcaggattagctgaatgaagccctcaggagaactccctccttcaatgataccttcttttttccaaattctctttttctactgacttttccctatcatcagatatgctcaagtttctcccatcctaaaaaatatgcaacttacccttcactccatgttcctctttagtgataaccccttctctgcatttcatggtcaagtttcttgaaaggttgttttgcactttcctatcccttcttccacatttctcactgattactcacctcttgcaatctgcccaccaggtggctgacacccctctcatcctggtcacctctaatccctttcttgctaaattaaataatgcctatcagtcctgtatttggtacttcagccatcttctctcaaatattctttcttccatgacagcatactcctggatttccttctatttcttgatcatttttttttttctagtgtaccctggagatcttttctttttctcctgttctataaaaaactgtaaatctgttgttcaacattggtcctcctctctctgaataatttcacacctttcctgcctttgattactatctatgtagcaactataaataattatggggagacttttataatagtgcatttactgagtgtttttcctcctaaactggggaatgagggaaagaccaagcaagcctttctgtaggtcatgataaaaatctctatgcaagttctctctctgaggttcagacccatagtgccagctgccttttggatacgtcacctggatatcctacaatcacctctaaaccaacatgtctaagtggatgcttcatccaacttctcacaggccttagaggaagggcatgaccactcaccccttccttggtgccccatccccacctggtggtcatcatgaacatctccctctcttttagcctctatcattaactcattaacctccagccacactcctagaacatgtagagttttcagtctctgtgtctgtcaaccaccccagacctctgctttgccatgtggcccattaggaatctgtgctctcagaccatcctatgcatctctccatctcagcactcattactcttttatttttgtctcttggcctagttgcctcctcctctttcaccacctcactatgaattaccttgagggtggtgtccacacttctttccagatgcttaacttctctttgacttggttctctcatctgtagaataggaacgatactaatgcctacttgattgagtggctgtgaggatggatgaatccatgtagaatacttggtccagtttctgccacctagtaagtgctcatttaatctaagctgtgattattaacactactaacaatattgtgttttctaaatatatagttggctttctatcacatagagaactttcttttcacaatttgctgaataaatgaagagaaaaagtagtaggattttttcttcctactgcaaaagaaagaggtatggctgtttattctgattcagattttctttagtgaaaaaaagaaaaaagagggtaaaagaaagcataataactccataaagaggaaagcgtttttttttttttgttgttgttgtttttaatcagttctgatttcctttctggtatctctgctggtgttttcaaaacttggcaactttgtggctgtggaagactgttgatgagagggttgggcgatgatacctcagggttaccctcaggtcgtacctggtggtgtcagcttatcagagccgtctccgggtggtagtaggtgaactcaggtatctcttcttcagatattctacagtgagaaatttttttctggaaggttggacatgggagtaaatccaggccataccattcctggttctgtttgtcagtatcatatctactctttgagatccaaagtttgaggaatggatagattctaggtttgtctcatgttattgctcagcagcttacagagtttttttttttttttttttttaaagaattccacatgtgttcctgaaatatgctctaactctgacacaaaatttcagtgtgcattagtaggaaaattgatgccttacaaaatatacttagcttaaaatatgtccatattttaacttataggaagagaaattctcgcagctaacagggtggaaaatgttgaaagtttggcttttgattggatttcaaagaatctctattggacagactctcattacaagagtatcagtgtcatgaggctagctgataaaacgagacgcacagtagttcagtatttaaataacccacggtcggtggtagttcatccttttgccgggtaagtgtgttcatgttttcctaagagcttgaaactgtatgtcttttacagtcattgaaaagtgatgccctagggatttaggtaagttcagcaaatataagattgaactgtataagttgaaatcaccttaaattttatttcttttttcctccaaaaaactttattctgggggagtaaaaaaaattgtttttaaacccaaaacatttcttctaacttttggctttctcagtcttcactgaagagtagtttttttcacagttgcagaggaccaaacaatgtgatatagattcagtagaaaaggagtgaataggcaacagaattaacaggaaagacccaaattctttccctgctttaatatatttatataaagcttagcaaaacttgcttaatcattcagtagttttcagaataaaaagtttttcagaccacaaagtttcatgttttaccattctataattggtggtgccagacaaggaaagacagaagagttcacagtattcctttttggttcctacttttcttatttaaatatgtttaacagctactgtgtttatttagaacaaatctgagctatgtgttgtatatgagtggaatgataaaaaagatggctgctaacccaccaatgcctgattacccagggaacatccatacctgttcttccgttagatatataatctcatcagcttccaaagctagtttgtgaaggaggtatgtgtaaatacccattttagagagaatgaatctaaggcgcagtgagataaagtgacttgtgaaagggcccgcagctattaggcaacagtcagtattcaaattccagacctgtctgactggaatgcctgtgtgcctaaaaaagtctgtttgctgcatctagagtatctgctttaatttcctctctgtaagataataaaagaaacacattttaaaactgatgttattattgataagaaatttcattgccctatagagagttaaacagtttagttttttaatgaatttgtcttaactcaaacttttggcctttggttttgaaaaactgttgaattcctttcctgatgactcttttgtttaaaatgatatgaagtagttacatttcagaaagttacattttggaaaagaataattttgattcctctggatcccataaaagagaaaaagttgtttttttattttcttttgttttttttgtgttttttttttttgtttttgtttttttttgcctctagacttatctttttcccactctttagaatattaaaaaaatgcttgggtcagatactgtttgcattgcattgatttggatgctttcttcatctgagatgaatggtttcctgcaaatttatcaattccttatggaagaatgactagaggatcctgaatgtttaatctagagagaaagagattgaaatgttttcttgctctgttcgttgtttattattttattttaataacgtggaatatttaataggtaacctgaattgtgtcttgttagagaatatgttaggcgacaatagttttagttcctaaactctgagacagtggttctcttctctcaatgcccatttaaatgccatttgtatttgtgactttggttacatgttaactaaattttaactgagaattacatgagttatacactaagtatgttaagttcaatagcatataaagaaaacaaaattaattgcagtatctggagaatctctgtttgttctaaatctctggaagtcatgtagtttgtcccagtgttaacagccttaatttactactgctttttctaggtatctattcttcactgattggttccgtcctgctaaaattatgagagcatggagtgacggatctcacctcttgcctgtaataaacactactcttggatggcccaatggcttggccatcgattgggcgtaagtaggaatcatcatccccgatacttagttctcttttactgcagaacacataatgaggcaggttgggtgatatgatggtgtaaggaaactggtactgcttgccctcgcggaattttaaataattaattggtgatgggagaaggatattgaacaagaacacaaaggacataaacatagttggccagctactgctggggtgaaaactaataaattcatgagtattctgagaaaattgctagagaaagctgaatgacaagatttagtggaaactcaagatgggggaggtgggtcccaagcagcatttaaagtagggtacagatttgttgaactgtaggcagtgtgtaatttcttacagggaacatcttgagtttaggaaatctttggagtcaattaatcaacaaatgcacctttgcttacatgcactttgggaggactttaaaagtataagctatggttctcaagaaattgatgatctatctaggaatataggaaaaggaatagagtaaataagcttataaagatgaaatgccaaggtaacttatgggagaaaaaaagggaagaaatatatttcaccttttaaacatagattactaccactgtttttcttaacttgttgatttcacaaggagaaaataaaatttctggctcaaagatagcaacattttaagttttctaagacaattgattgaaagccacttcatgaaaagtagccgtctctttctgggggacataaaactgttaaatttttaatgaatataatttaaattttaaaaactttgtttaataaatgtgtcaactgaccctactgtttttggatgccctttgtgtaaagggtgctctgatagtttttggataagagataactaaatattttattattttagtgcttcacgattgtactgggtagatgcctattttgataaaattgagcacagcacctttgatggtttagacagaagaagactgggccatatagagcagatgacacatccgtttggacttgccatctttggaggtatgttttaaagcaataaaagtatgtattgtttttatacattgcaagttacaatagtaaactcatcctcatgtggcattttcacaatcccagaaaagctggccactttaaaatgaaaaaatttaaaatggtgctatatatttagacaaaacatttggtttgttgatggtgtatttcatttttagagtgtgatttttgttttgtatatattcgtataatgttgacagtgtatatgggtacagcactttgtagattacatgtattatacaattcaacatcccaagtacttagttatacaagtatcacgtgaggaaacagtaaattactgccttcattttcaagaataaaacagcaagagctgtttatagtaatcattgtagcatttcattattctccagtgtttgtaagaatctcattagaaatccttgtggaaaaaacgattacacatattcatcaactatatgctgactgaatgactttgaaacttttttattcaaaatgttggagaactgacatcgtctttgttttatggaagtgttaggttatgctttatgaagaacagcaagacataattttttttcgtcaacctttccaaataatttcatgctactagtgaagattgctgagaagcatgaattctggggaactacagtcacaatgagcacagccagtgcttgcctgtcttctcagctccccatttgagtgcaggcatgctgctgtgagttgagtttctgggaataagaatgtagcctggtaccatgaaacaggtggtttgcttagtcttgaaaacaggagctctgtgaatggttgtatagcttgtgcactgcataaaaatgccaggccaagagggtgaggagacactgaaatctatcctgggtctgtttgacaaaccatgattactccagttagaggggtcatgttttgtttaagtctaccaaaagccctgtgtatatgctagttgtgtccctggttgaaacctcctactttgaataattaacacagtgcttgaaaagactagacactcactataaatcaaagactttctcacatgcatagaatgtatgtgtggaatgaatagttagtaagtatattgcatatcttgtcctgctgtctgtttatctgtggaggagtgtgtggtatttaaaaaatgctcatgagatttttgatgagttaattataaatactcctcccgtccccctcccgccgctgccatccatttactcccttttcactaatgatgtcagacacatgctatttgctgtcacatagaaacattataaaaagttgaattttctctgctctgggctgggatgttttgggattcgagaaaatgtagttttagtatcttttggtttcatcagtatgaaaaaaatttgaatgcatacccatgaggacaacacaacattcccaaaatagcaataattatttatttctttcaacattgctgtttttttttttttttattatactctaagttttagggtacatgtgcacattgtgcaggttagttacatatgtatacatgtgccatgctggtgcgctgcacccactaatgtgtcatctagcattaggtatatctcccaatgctatccctcccccctcccccgaccccaccacagtccccagagtgtgatattccccttcctgtgtccatgtgatctcattgttcaattcccacctatgagtgagaatatgcagtgtttggttttttgttcttgcgatagtttactgagaatgatggtttccaatttcatccatgtctctacaaaggatatgaactcatcattttttatggctgcatagtattccatggtgtatatgtgccacgttttcttaatccagtctatcattgttggacatttgggttggttccaagtctttgctattgtgaatagtgccacaataaacatacgtgtgcatgtgtctttatagcagcatgatttatactcatttgggtatatacccagtaatgggatggctgggtcaaatggtatttctagttctagatccctgaggaatcgccacactgacttccacaatggttgaactagtttacagtcccaccaacagtgtaaaagtgttcctatttctccacatcctctccagcacctgttgtttcctgactttttaatgattgccattctaactggtgtgagatgatatctcatagtggttttgatttgcatttctctgatggccagtgatgatgagcatttcttcatgtgttttttggctgcataaatgtcttcttttgagaagtgtctgttcatgtccttcacccactttttgatggggttgtttgtttttttcttgtaaatttgtttgagttcattgtagattctggatattagccctttgtcagatgagtaggttgcgaaaattttctcccatgttgtaggttgcctgttcactctgatggtagtttcttttgctgtgcagaagctctttagtttaattagatcccatttgtcaattttgtcttttgttgccattgcttttggtgttttggacatgaagtccttgcccacgcctatgtcctgaatggtaatgcctaggttttcttctagggtttttatggttttaggtttaacgtttaaatctttaatccatcttgaattgatttttgtataaggtgtaaggaagggatccagtttcagctttctacatatggctagccagttttcccagcaccatttattaaatagggaatcctttccccattgcttgtttttctcaggtttgtcaaagatcagatagttgtagatatgcggcattatttctgagggctctgttctgttccattgatctatatctctgttttggtaccagtaccatgctgttttggttactgtagccttgtagtatagtttgaagtcaggtagtgtgatgcctccagctttgttcttttggcttaggattgacttggcaatgcgggctcttttttggttccatatgaactttaaagtagttttttccaattctgtgaagaaagtcattggtagcttgatggggatggcattgaatctgtaaattaccttgggcagtatggccattttcacgatattgattcttcctacccatgagcatggaatgttcttccatttgtttgtctcctcttttatttccttgagcagtggtttgtagttctccttgaagaggtccttcacatcccttgtaagttggattcctaggtattttattctctttgaagcaattgtgaatgggagttcacccatgatttggctctctgtttgtctgttgttggtgtataagaatgcttgtgatttttgtacattgattttgtatcctgagactttgctgaagttgcttatcagcttaaggagattttgggctgagacgatggggttttctagataaacaatcatgtcgtctgcaaacagggacaatttgacttcctcttttcctaattgaataccctttatttccttctcctgcctgattgccctggccagaacttccaacactatgttgaataggagcggtgagagagggcatccctgtcttgtgccggttttcaaagggaatgcttccagtttttgcccattcagtatgatattggctgtgggtttgtcatagatagctcttattattttgaaatacgtcccatcaatacctaatttattgagagtttttagcatgaagggttgttgaattttgtcaaaggctttttctgcatctattgagataatcatgtggtttttgtctttggctctgtttatatgctggattacatttattgatttgcgtatattgaaccagccttgcatcccagggatgaagcccacttgatcatggtggataagctttttgatttgctgctggattcggtttgccagtattttattgaggatttttgcatcaatgttcatcaaggatattggtctaaaattctcttttttggttgtgtctctgcccggctttggtatcagaatgatgctggcctcataaaatgagttagggaggattccctctttttctattgattggaatagtttcagaaggaatggtaccagttcctccatgtacctctggtagaattcggctgtgaatccatctggtcctggactctttttggttggtaaactattgattattgccacaatttcagagcctgttattggtctattcagagattcaacttcttcctggtttagtcttgggagagtgtatgtgtcgaggaatgtatccatttcttctagattttctagtttatttgcgaagaggtgtttgtagtattctctgatggtagtttgtatttctgtgggatcggtggtgatatcccctttatcattttttattgtgtctatttgattcttctctcttctttctttattagtcttgctagcggtctatcaattttgttgatcctttcaaaaaaccagctcctggattcattgattttttgaagggttttttgtgcctctatttccttcagttctgctctgattttagttatttcttgccttctgctagcttttgaatgtgtttgctcttgcttttctagttcttttaattgtgatgttagggtgtcaattttggatctttcctgctttctcttgtaggcatttagtgctataaatttccctctacacactgctttgaatgcgtcccagagattctggtatgtggtgtctttgttctcgttggtttcaaagaacatctttatttctgccttcatttcgttatgtacccagtagtcattcaggagcaggttgttcagtttccatgtagttgagcggctttgagtgagattcttaatcctgagttctagtttgattgcactgtggtctgagagatagtttgttataatttctgttcttttacatttgctgaggagagctttacttccaactatgtggtcaattttggaacaggtgtggtgtggtgctgaaaaaaatgtatattctgttgatttggggtggagagttctgtagatgtctattaggtctgcttggtgcagagctgagttcaattcctgggtatccttgttgactttctgtctcgttgatctgtctaatgttgacagtggggtgttaaagtctcccattattaatgtgtgggagtctaagactctttgtaggtcactgaggacttgctttatgaatctgggtgctcctgtattgggtgcataaatatttaggatagttagctcctcttgttgaattgatccctttaccattatgtaatggccttctttgtctcttttgatctttgttggtttaaagtctgttttatcagagactaggattgcaacccctgcctttttttgttttccattggcttggtagatcttcctccatccttttattttgagcctatgtgtgtctctgcacgtgagatgggtttcctgaatacagcacactgatgggtcttgactctttatccaacttgccagtctgtgtcttttaattgcagaatttagtccatttatatttaaagttaatattgttatgtgtgaatttgatcctgtcattatgatgttagctggtgattttgctcattagttgatgcagtttcttcctagtctcgatggtctttacattttggcatgattttgcagcggctggtaccggttgttcctttccatgtttagtgcttccttcaggagctcttttagggcaggcctggtggtgacaaaatctctcaacatttgcttgtctataaagtattttatttctccttcacttatgaagcttagtttggctggatatgaaattctgggttgaaaattcttttctttaagaatgttgaatattggcccccactctcttctggcttgtagggtttctgccaagagatccgctgttagtctgatgggctttcctttgagggtaacccgacctttctctctggctgcccttaacattttttccttcatttcaactttggtgaatctgacaattatgtgtcttggagttgctcttctcgaggagtatctttgtggcgttctctgtatttcctgaatctgaacgttggcctgccttgctagattggggaagttctcctggataatatcctgcagagtgttttccaacttggttccattctccacatcactttcaggtacaccaatcagacgtagatttggtcttttcacatagtcccatatttcttggaggctttgctcatttctttttattcttttttctctaaacttcccttctcgcttcatttcattcatttcatcttccattgctgatacccttacttccagttgatcacatcggctcctgaggcttctgcattcttcacgtagttctcgagccttggttttcagctccatcagctcctttaagcacttctctgtattggttattctagttatacattcttctaaatttttttcaaagttttcaacttctttgcctttggtttgaatgtcctcccgtagctcagagtaatttgatcgtctgaagccttcttctctcagctcgtcaaaatcattctccatccagctttgttctgttcctggtgaggaactgcgttcctttggaggaggagaggcgctctgcgttttagagtttccagtttttctgttctgttttttccccatctttgtggttttatctacttttggtctttgatgatggtgatgtacagatgggttttcggtgtagatgtcctttctggttgttagttttccttctaacagacaggaccctcagctgcaggtctgttggaataccctgccgtgtgaggtgtcagtgtgcccctgctggggggtgcctcccagttaggctgctcgggggtcaggagtcagggacccacttgaggaggcagtctgtctgcccgttctcagatctccagctgcgtgctgggagaaccactgctctcttcaaagctgtcagacagggacacttaagtctgcagaggttactgctgtctttttgtttgtctgtgccctgcccccagaggtggagcctacagaggcaggcaggcctccttgagctgtggtgggctccacccagttcgagcttcccggctgctttgtttacctaagcaagcctgggcaatggcgggcgcccctcccccagcctcgttgccgccttgcagtttgatctcagactgctgtgctagcaatcagcgagattccgtgggcgtaggaccctccgagccaggtgtgggatatagtctcgtggtgcgccgtttcttaagccggtctgaaaagcgcaatattcgggtgggagtgacccgattttccaggtgcgaccgtcacccctttctttgactcggaaagggaactccctgaccccttgcgcttcccaggtgaggcaatgcctcgctctgcttcggctcgcgcacggtgcgcacacacactggcctgcgcccactgtctggcactccctagtgagatgaacccggtacctcagatggaaatgcagaaatcaccgtcttctgcgtcgctcacgctgggagctgtagaccggagctgttcctattcggccatcttggctcctcccctcaacattgctgttttttgtgaatttcttttggaaagttcttttgttgtgcaacaccatagaaattgtgtacctttttactaaagggctagatcttcttgattgtgcaccacacagaactaaaagatttattgaactccttacttatttaagtatatgaggatgcctttgttagtagtgggactgggattgccaggctctagaaagatttagggagtccaatgactgattggtcattgattagaccacagataaggaaattggtcaaataaaatttatgacatcttaaacattttctgattaattagggttttctagttaaactatcattaaagagaaaatccacattgatgcaattctttcttttaaaaatatatgtttattttcctgctgcaatagttagtgtaaagtgaacatgattaaatttttgttgtttagaatcttatgtcgcctctctcttaccattgtgagcatcattctaacattagtagtgtggttgtaggtgaatccacacttgtgttgagatttttattgatcctcaaacatacactgaaagttccttttttgggctagacctgtacttttccttctcaacagcttcttatttaagtcaagggaaaaaaattacaatttaagcgctgtcattaaaacatagaatatgaactgtttgacctgggaaggatctcaggaatgattcagactgtctccttcacacagcgtagtatttgcctaagagcactcagcaggtgagtgctttagcgggtgcagacctatgaggcctcatttaatgctctgtagaagaattccccaattcttattttcactattacctatgcagaactaaatccaattgctactaaatgccatcataaaactccatatgtgcttgcctgaacctgaaccctgatattattaacatacagacttccacagagcattactagggagtaacaagtcgtggaaaatggttagagaaacatattacagatatttatgggggagatgatcgtacttgcaagaagcatttcaagcctattgcattttctcaagtgatttatttataagttagctgtgactgaaaatactaatctacccatgtttcttttcagagcatttattttttactgactggagactgggtgccattattcgagtcaggaaagcagatggtggagaaatgacagttatccgaagtggcattgcttacatactgcatttgaaatcgtatgatgtcaacatccagactggtgagtgagattgcccagttttttttatttttttgtatgggtttatttatttgttacagtggctcctgttctctttaagtacttattacttaaaggtctagctcctggtagttttatattcttgtcgttcacataatctaagagtgtaagacttgaaatctctgttcaatgctgctagccttaaacatgttgtcaggaaaaacacattttgggacttttccatacctaaatggaatgttgtatttggcgggttgatttccaagaggaagctactttttagtattgggtctgaaaaatgttttgtcctgtttgttttccttcacaaatcaaacccgtgacctacctagtgaaaatgtacatgactgactccctcggggctttgcttttgcaggttctaacgcctgtaatcaacccacgcatcctaacggtgactgcagccacttctgcttcccggtgccaaatttccagcgagtgtgtgggtgcccttatggaatgaggctggcttccaatcacttgacatgcgagggggacccaaccaatgaaccacccacagagcagtgtggcttattttccttcccctgtaaaaatggcagatgtgtgcccaattactatctctgtgatggagtcgatgattgtcatgataacagtgatgagcaactatgtggcacacttagtaagtagctatgcactggcgatatttcctgggatgaatagagtagaggtgggctttaaagaaaataaataaaagcttgggctatttatatgggaaaaatatcttttagaatttcagattcttaacatgcactttgaaggcttttaggaagctaagcaagaaatttcattcataatgttatggatggtttctggccttgatttagactatcttcaacaatttttttccttgacattggctgtttggaccaatgcagtcattatgtcttggcaaactcctcaaaaagtcaaatcgaaataaactagatctgaccaggcaaggtggctcatgcctgtaatcggaggccgagacaggaggattgcttaagtccagaagtttgagaccagcctgggaaacatgacgaaatccggtctctacaaaaaatataaaatggcacatgtatacatatgtaactaacctgcacattgtgcacatgtaccctaaaacttaaagtataataataataaataaataaaaaagaaatagatgagctcagaaaaaaatatgtatataaaattacaaatagctgggactattacaaaatacaaaattacaaaatacaaaaaaaacaaaattacaagtagctaggactacaggcacatgccaccacacccagctaatttgtattttgtattttcacaaaatttgtaaaatacaaaaatttgtacttgggaggctgaggtgggagagttgtttgagctggggaggttgaggctgcagttagccaagactgtgccgtgtacttcagcctgtgcaacagagtgaagccctgcctcaaaaaaataagcaaacaaacaacaacaacaacaaaaaccaaaaataaagtagacctaacatttagcaaccgagagaatagtatcacagaataactacttgcaatcatagcctttggaaaatctcatgtgttatattccttttctcccatgttagagtaaaataaattaacaatgaaatggtggtcttaacctttatattcttcttttgacggtaatctagtctatatagtttggggcctaataaacactattgcagaaggcaaaagtattacattcaaattaaaaaaaagatagaggacagttgaaatctcagaaatctctatcaaggtgaagttaatactaataataacctttcttttggagagaaagaggagtgacagatttgcaagagtaaagtgctcacttgtacatttttctgaaattttttaaattttcatctttttgtgtattatcttcttgtttctaagagcacagcattttaccttaatattttatctatttgcacttttcatatgacatattttcaagctttctatagtctgaatttgaaattgtggttggaggaagtaacagcttgaaagttaaggatgagctttagagtgaatccaaccagagcgtgaatcataggcaggttcctaaatctctcaaagactcaatttccttatctgtaaaatgcagacaattatatgtactttatagtattcttgtgaggatttaaagagaacttatatgatgtgtgtgggtgcataacttagaaaaatgccttttctatgataaataccaaataaatgccagccaataatgatgttagtgatgatgacatcacttgatgaacatttctccttattatatacaatgcctccattaaaaaaggtgaactgagcctttataaggcaagaactcatttaaaaggctgtaaaaacaaatgtcttcatgaccagtttgttactattgtagataatacctgttcatcttcggcgttcacctgtggccatggggagtgcattcctgcacactggcgctgtgacaaacgcaacgactgtgtggatggcagtgatgagcacaactgccccacccacgcacctgcttcctgccttgacacccaatacacctgtgataatcaccagtgtatctcaaagaactgggtctgtgacacagacaatgattgtggggatggatctgatgaaaagaactgcagtaagttttgagctggtttcccttggttggtcagcctcgtaaatagacttcaacaaccaaatggccttgcattctttcctctaaggctcatgcaattttcattgtctctttagtacttctattccacttgtcaatctctgtgtcaataggttacaagaacaaaggcacgtgcctgcacatgggattcttagagtccacctacaaatattgagttctatggaagcaaagcaaggactgcctctgatgccaaacatttcaattcagataggaattgaaaaagtgaaaatccctcagctatctatttatatatttaaaacaatactaaaagtcatatagatatatccagacctttggctattgatgtttctttttcatttggtacaagcaaaaagacatcaaaataaagaggcacagaaaatttaaatttcctttgatcttatccacctgttttccatcttgccagttctgctttcctttagcttgttgttttatttcatgtcttcaataatagtttaagatggagcaaagttccctgggctaagttctagtcctggttgcctgactaggcaagtcactatcatttggaatagatgagctttaagatcccttctagctttcataccctataagtgtgtatttaatataatttcatgttgtgggtggggccagccactgcatccgactccaaggctatggtcttaacagtaaggtaggaccctggtttttagaattgttctgttcagacttttaaatccagttttgggggtctgtctacacactgttgctactaggcatgtgggtcatgctggttttgttgcctgattgggctccattgcttggctttggtctagagtcatggacttcatagtattcatgaaatgtagtccaagtccaagcacatgatgctcactttctgaatgtggtctattttccaaggtgtaatcacagtttctgactctgccctgtaatctttttattctcaattctaaaacctatcctagttttgagttcttttgcttagctgactttgatagtgtggctgattcaaaagaattttgaacccatgtacaattgagataacttctgtagctatttagccatttttagtttggctctggtacttgttgcacaggaaataaacttgttggttttgttttcggatgacattagattcgacagagacatgccaacctagtcagtttaattgccccaatcatcgatgtattgacctatcgtttgtctgtgatggtgacaaggattgtgttgatggatctgatgaggttggttgtggtaagtgcattgccttcttttttattcacaatgtttatttagaaaaatctcagtgttaacacatggacacagggaggggaacatcacacaccggggcctgttggggggtggggagctagagaagggatggcattaggagaaatacctaatgtagatgatgggttgatgggtgcagcaaaccaccatggcacgtgtatacctatgtaacaaacctgcatgttctgcatatgtactccagaacttaaagtataacaacaaaaaagaaaaatctcagtgtttagtcattttagccctgagctaatttctaatgcttttctctttcattcttagtattaaactgtactgcttctcaattcaagtgtgccagtggggataaatgtattggcgtcacaaatcgttgtgatggtgtttttgattgcagtgacaactcggatgaagcaggctgtcgtaagtaacacatacccagaatgtttcagacaaaggggtcatttcatttttgccagtattgatattgatattgccacacattttccctaactcagacaaactgggggaaagtatcctcaaaggaatgtggtattgaacatacagtaaaattgagtagacattgccatataatgtgtaattaacaaatcaagtggttgtataaatggacacttcaaatagtctcttagatgggctaaatatttcttagatatttttgttttcacttttagtttttcttaggacttcccactttagtaggtttaaacttttgaggctctactccatataaagatattttactggtttcttttaagtttcagtagagaagtcatatcatggtgtagaaatggtatggagctgtgtttagtattgactctgatgaattcattctttgtgctattatgtgttgaatatctgctaagatgttatctatggagattatagaaggcaagagacaattaagcaagatagacagttacaagggtcttagaaatggcacagataaaattctatggaggttcagagaaaagaaatttcttctagttggaggattcaagtaggacttcatacagtataattctgatggatctataatcttcacagactggaaacctatactcacatgatttgttatttgcccactttttgttttaaatggattttagacttgcaaaaactcatcagtgagttgatcatttgtttgaacaatggtgttttagaccaaaaaagtaagttttcatgaattctcctcctgcgtcagaaaggtagtgtgtaaagccatggattaaaaagaaaagttaaataaaatgcttatatactttatagtttgcacaacatctagaaattactaatcactaattttcctgtttcacattaaaaacataaaattctgtgatgagctgaggttaaactgtcaattgccgctggcttgctgttgccttgtgagatccctggtagagagttttggtttacccttgtcaaatagggaagcagttcttacgtatctctccaggattgcttgatgaatagtggaaagtttgcaaagaactgagtatttaccatcatctttagttagtgtgtgatggtttcattaggtatagttcatctgagggaaaataataacacccaaacatgatatgaaacacatgaagttcaaagtaatcatagctatttaagctctattgtaatgttctggtgattctttcatagaaagatagataaactttattattgaatctgcaattggaagtacattaaaaacacaggaaaaggaaacaggatgttcttttgacacaggtactcatctgctagtcagcagttgtgcgttctgtacttcgtttgttgtcagagccactagctgccacaaagaaatatttctatgtactagagtgtgggagaagactctatatcatttagccttaaatattaatttggtcatagttgttactataaacctactattggatccaaaatcatttcctctgagtctagactataaaagggatcacaaattacattcacaagccgatttaccccatgttttccttctagcaaccaggcctcctggtatgtgccactcagatgaatttcagtgccaagaagatggtatctgcatcccgaacttctgggaatgtgatgggcatccagactgcctctatggatctgatgagcacaatgcctgtgtccccaagacttgcccttcatcatatttccactgtgacaacggaaactgcatccacagggcatggctctgtgatcgggacaatgactgcggggatatgagtgatgagaaggactgccctactcagccctttcgctgtcctagttggcaatggcagtgtcttggccataacatctgtgtgaatctgagtgtagtgtgtgatggcatctttgactgccccaatgggacagatgagtccccactttgcagtaagtttcctgaccacagtttactggccataaactcattctgaacagtagcctggtgtgcatcaccattgtcacagtcactgtgtagctttgtaggaaggatttcagttcctctatgagttcacatctgtgtagggggtaaccataattgaattcaaatacatcaccattggataattttctgattaaatcctttgtacttggttatgtgtttttacttctttttatgtctttgtttcaaaaaatgagactaaattgaggccattagattgtcaaattaaatttggttctgttggtaatgtgctcattaatttttctaactttaatattttctaatttcaatcagaacttatcacaaaaaaatgaagtccagggatttgtgttgctgtgattaaagtgctgtgattggcatgtaatcctaattactgtcatttctttctttcctctttaatcaatgctcactctcagatgaaccccagccaggtatgattgtgaagtatttcagattcttatgatttcatatgtgttgtgtttgttctgaaaatgtcctgattatattaacttacttccctttctaacgcatgttctgtgttatgactcttacaaatatgttagagtacacatggaaatagaaggcatttgcatccccaggcatgtgaactgtcttagggtggctttaggcattttcattttggccctgaaagtaaggcatgacgatatgttaccggatctgtgtactctaatatttcaatgacctttcccctttgatttgttcacttcatagattttctggtcttttctcttaaatgtttgtctatcttccatttctgtatagatagtagaatttcagaggaagaaaacgagaaacaattttaagtgtctttgcatgctctatcaatgacacttttcttccttgatgtcaacaatattttcccaagggttctcattgcattaaatggagttatactattgggttgtagtgaagaaggtgatcatactccaatggatatgaaggatggtaaatcctcagacaaattagagcaaaccctgaacagcctgtggaactcacccaagtgcatgctgcacttagctcttgtctgggcatcatattgaaggtggcatgagactgcataataaatattgcataagagtgaatcaaagaagcaaagattcttgattttcttttttcattattctctttcttttttctagatgggaacagctgctcagatttcaatggtggttgtactcacgagtgtgttcaagagccctttggggctaaatgcctatgtccattgggattcttacttgccaatgattctaagacctgtgaagacatagatgaatgtgatattctaggctcttgtagccagcactgttacaatatgagaggttctttccggtgctcgtgtgatacaggctacatgttagaaagtgatgggaggacttgcaaagttacaggtaattgctgaactaacccgagccagtttatcagcacatcccagagcttaaaatcaaatggcacatgtaggtatttgacaatgttgattaggagttagatcgacttgaatcctggaaagattatgcaatctctttaaacctcaattttttgtgaggattaaatggggtaatacacattaaaatcctggtgtattttggaaaatagaggttaaaacatatacaagtcaatgatttttaaagtatttaaaataataccaaatggcttttatataatttaaaatgagttctatactatatttaagcatctttatataatgcttaattgaattcaaccagtattaattcaatttctgctataagaaagtgctttttactatgtattaggatattgatttgaccactttcaaagtgaccaaatagaggaagctaaaacaaaaacagaaagtttctttcttttacatgtagtaggagtctggatgtcagagagtccagggcatggggtctgctctgttatcctcatcatgtggcttacatcaagggttccaatgctccaggttttagcttctcttagaaagtaggaaggggaaagagaaagtggagggcaagcagcttcctttttagaatgtgacctgagatttgattcgtaatttctactcacatcctattggtcagaacttagtcatgtggtcactccaaacttcagtggagggagagaaatgtctctggctggagagtctgtgccaagctaaaacttggcatgctttattactaaaaagaaaaagaagagagggggtgttgggagaattagaactctctaccatagctgagggcctcagaaaacagaaatatttaagacatgattcctgctgtccagaagcctacaacctattaaatagtaaggaagataaccaaagtacaaaaataaatacagtaaaaggaagaatgtaagcatagtttactctagactagtatttagaaacacagttaaatataacccaagaaagagtctattttaagtactcatgaaaaccagctaactattaaggttaagaatgaagtgattaaaatcattcatatggggcttcctcccctccccaccaacttactatagtttggaattacaccttctttctgttaccaaaagtattgaatcaaaagttttaaagagttgttttgtgttttctcccagtatcattgacatttttgcatttttttcttgaacagcatctgagagtctgctgttacttgtggcaagtcagaacaaaattattgccgacagtgtcacctcccaggtccacaatatctattcattggtcgagaatggttcttacattgtagctgttgattttgattcaattagtggtcgtatcttttggtctgatgcaactcagggtaaaacctggagtgcgtttcaaaatggaacggacagaagagtggtaagtacatttctgttgacctttggcctggctagttcctctgtcttgggtctgtttgctgttattcaccagtgagagaaggccctacctcatctgggtagctctcatggtaccttctgggccacatcatacccaagagacttgcgtgttcataactacgaatttatggctgttttagataggagggtggcctctgaatgcagatgtgtgattctgaattccaggtcaggtgatgcagagacctcacaatgtctttacggttccttttgcagtcttttcttgtggatgagagcagaggaaagtgcaggaaagttaaggggttgcttttcttagctttaatttagtgatatttctcaatccatctcccagaatttcagtttcttggctcctgatagttacatttcctctgcctcttacaactttattttgtaattcttggtccttaattaatagagatattattcgttgcatgcaaacactataacattttgtaatgttgccaactaagcaaatggatagagctttttcttaattgcaaaaacttttgaaaccaaaacgaaactatgcactaaccaaacaatgaagtcatcttagaatgttcagtgtgacaaaatcttgtatacttttctcagaaaaccctgctgttgatttggtggttagctacatgaggagacaaaattttctaatccccacaagtaattataggacaagttagatggtttaatctagatttttatataatatccatgtttgcattcatttatttgctctagaattcactctttattcacttttgtctttaggtatttgacagtagcatcatcttgactgaaactattgcaatagattgggtaggtcgtaatctttactggacagactatgctctggaaacaattgaagtctccaaaattgatgggagccacaggactgtgctgattagtaaaaacctaacaaatccaagaggactagcattagatcccagaatgaagtaagacttttttttaaaattatgttgccttgacatggttatgatgagggaaaaacaacagtaacatgatgtagctgatatgcatgttgctgatatgcaaaatttaaaatgatcccttgtttaaacatggtaggtgtccaactgggtgttgctatctctccttcatctgaatcatcctcttcataaagtacataagagcaattgattgtttactttattttaagagcacattgatttattagcttggcaatacaatttttgaaatgtcatataattaaaaattaagtttctaattactgcatgcagtaatagtccatagaggggccagtttgatgtaactttgataactcatgattatacaacaaaaaagctggatttttctgcttcagttttatgttgtttattagagctcccttttaagtcatataaggaaggcagtttttgcctgctgatcctgaagggaagatagagaaattctcccatgtgtttggaaatctttgaggatttctttccctgaatttacttatattttataacttagattcttttctgcaggatggtaaattaggcaagttatgttcaatgtgatgttgaattcctagatattgtaaagtattacacaccactgaaatttatgatgaattcctgatgaagaataaattgatttccttatctaaaaacatgacagggtagacaaacaaggacagatggatttttctagatcaactatttgtggattataaacaaacatgaattggcattgagacatttcaatgtcataatgtactacattatgacattatgtattacatgttttatgaacattataaaaatacccagatgggttgtgattgtgttatgacagttttactttgtgacacttagaggaaacaataaactctgtgaatatattctgaaccagagatgatttattttaagcagggcataaacaggatgttgtattatttaaaatgacagttatttttaatatttaaatacgtcccctccaattggtaactcatttcctttcccagtgagcatctactgttctggtctgactggggccaccaccctcgcatcgagcgagccagcatggacggcagcatgcgcactgtcattgtccaggacaagatcttctggccctgcggcttaactattgactaccccaacagactgctctacttcatggactcctatcttgattacatggacttttgtgattataatggacaccatcggagacaggtgatagccagtgatttggtaagttggtggtgaggaaaaccaaattaaaactacagtcgtggataggtagaaatcagacgagtatcagaaaagctaagaaattaatttttgtgtcatagacattgtcagatcaatccaggaaataccagcaacagtgagaggcagtctatcccatatgactaactggaaaatgaatattttcattccagttcatggtcagcttgtgccatatccaggaaggatttttatagctcgtgtgatttagttgagctgcagatgtgaatctgttgcttctatacctttaaaaattgtgtcaggtggccgggcgcggtggctcacgcctgtgatcccagcactttgggaggccgaggtgggtggatcatctgaggtcaggagtttgagaccagcctggccaacatggtgaaacctcatctctactaaaaacacaaaaattagccagtgtggtagcacacacctatagtctcagctattcgggaagctgagacaggaaaattgcttgaacccgggaagcagaggttgcagtgagctgagattgcctcactgcactccagcctaggtgacagagtgagactccatctcaaaaaaaaaaaaaatttttttcaagcaaaaatttataacttaacttggccaggcacattgtctcacatctgtaatcctagcactttgggaggctgaggttggtggatcgcttgagcccaggagttcaagaccagcctgggtaacatggcaaaaccccatttctacaaaaaaatacaaaaattagctgggcatgggggtgtttgcctatagtcccaactacttgggaggctgaggtgggaggattgcctgaacccagggaggtcaaggctgtagtgagctgtgattgtgccactgcactccagcctgggtgacaaagtgagaccctgttttcaaaaaaaaaaaaaacaaaaattaactagatttatatttctcagtcttgttcttcacataacattttttattctataaattctgttgaatttattttcacaagttaaatgggaaaataaagaaaatagatattttatcaaagagctgttattgacccccattaaaaataggaatgcttttacactgttggtgggagtgtaaattagttcaaccattgtggaagatagtgtggcaattcctcagggatctagaaccagaaataccatttgacccagcaatcccattactgggtatatacccaaaggaatataaatcattctactataaagacacatgcactcatatgttattgcagcactatttacaatagcaaagacttggaactaacacaaatgcccattaatgatagacatatacatcatggactactatgcagccataaaaaagaatgagttcatgtcctttgcagggatatggatgaagctggaaaccatcattttcagcaaactaacacaagaacagaaaaccaaacacttcatgttgtcactcataagtgagagttgaacaatgagaacacatggacacagggaggggaacatcacacaccggggcctgtcagtgggtgggggcaaggggagggagagcattaggacaaatatctaatgcatgtgagggttaaaacctagatgatgggttgatgggtgcagcaaaccaccatggcacatgtatacctatgtaacaaacctgcacgttctgcacatgtatcccagaacttaaagtaaaataaaaaataaaaaattaaaaacaatttaaaaaagagaaaaaattgctattgtatagttgctgtgacttgaaggaaagatgcatctaaactataacagattgatgtgaatcagtgagtggcagcacaagaccgtggaaatagccggcacaagtgtgctgatggtggagtgaaggctggggcgtgggagtgggagatgaggagtctctaagctctctagttccatctaacttttaactagtaggtgatccggatacatcaccttgctttttgtgcttcagttttgttttcatttgtaaaatagatgcccagtgtaattaccaaggcaaacataaagagtaaatggcacgtgtatgtgaaaggctcttgaatggtttagtgggatataggacgaattgtgtattttttgccgctcttttgcacaatgacttccttgtgtttttattaaataatgacatgttaaaggaaaccgtcttcttgagcagatatcctctttgactcagtgcaccttggctttgatttttggatgaggtctcactgttctcttctgcctcacagattatacggcacccctatgccctaactctctttgaagactctgtgtactggactgaccgtgctactcgtcgggttatgcgagccaacaagtggcatggagggaaccagtcagttgtaatgtataatattcaatggccccttgggattgttgcggttcatccttcgaaacaaccaaattgtgagtgatacagagaaacatcctgcctgggagtagcttgaaaaacactgaccctgggaatgctaaatgcacactgttacagacccatttgtttggacaatacattttccttttctctttacaaaccaccccactatatactttccctagtcctgacattgccattacttttatttaccatggaaatttcaaacctaggatataataacagcacatctgaattatatcatttcagcatttggctgctacctctttgaccctcacatgagtctccgtttcctcagctgacaaatggagtacagaccagatagtgccttcgatcctcttaccgctaccactctgattgaaagcagcttacttttaggactagtttattatggcaccactgccttctaggtgctctgctgtagccagcacgagttgtcctaaagtgcatggtatgggtgtctaggtgaaagacttggcatccgtactgttctttctggtgggagagggagataagtcacttaatcttcacttaatcctctctcctcaaaactctccaattgtttctcacacccttcagcatgtggctgctgctatttccctgctctcttctcccactcgctgttgccacattggatttcattatggtccaaaagcacagcaggcgactcctgcctctcagcttctgcgctagctcttccctctacctggaacatctctcttccagatctctgcatgagttgcttcgcgtgctatttaggattctacccaaatgtcactttctcagagaggccctcattgaccgctctacctaaaatagccaccccctcataattcttttgctctttaccctcatgttctgaaacctctctctctctctctgagtttagttgtttctttttgctcgaatatatactccacttttatagcgtccccagtgcttagaatggtgtttggtttacagtgaatacctaccatttttctggtgaatgaatggattaataatctattaataacatggtatgtgtaataaaaatgtataggatctaggaaacatcctgtgtgtggggaccacacagaatcctgattttcaaggtgcagagacacacagagatatcatcagtagaaaaataaaagattattatctaaccaaaatctggaaaactctaggtaaactacaaggtcacacatcaaacacacaactttttttttttttaatgcaaaaagatctcttttaggtcaggtaaggagacagattatttggcatcatatttctattacaagttccagattactcagtggctgtttgttcgtaatccagttatagactggattgatctgtaaccttgagtcattctcctctctcgtgtctcttatgaattctaagttgaaagcctgatgctagggaagttgaaagtgtgagtagttcagtgaaaacaaaacaaaagaaaacaacagaggtaacaacgtacttaagcccccctgtactggggcctctggaaggacactaagagcatgactctgttttgattttaatgtggaggttttccacttactggtgctttcttctctttctcatgcagccgtgaatccatgtgccttttcccgctgcagccatctctgcctgctttcctcacaggggcctcatttttactcctgtgtttgtccttcaggatggagtctgtctcctgatctcctgaattgcttgagaggtatagtatgctccttatgtgagctctgaagatggagctggtcatagtttgtgccaagcagtggaaactctaaaaccaattgcgactgaacatgtgctgtgtcctttgattcctcaggtgtctgcagaatgatgtgtgttgtatggggtgatgtcactgtgtgccttggttgtaatacagtttctgtatatggaactaatgttatctgtgcatgtaattgaacaatctgtaacctcatattttctctcacctgggtacagttagacttctctgacaagccatgataatgggaagttccaaattcttcacctaagaagtaaacattctcaacgtttgtgtacagcttcattttttatgtccattgtctctttctccctcttttttttttcttttttctttctttcttttttttttctttctgagacagggtcttgctctgatgcccagactgtagtgcaatggcgtaatcatagctcactgtagcctccactttccgggcccctgtgattctcccacctcagcctcctgagtagatgagactataggtgcacgccaccacacccggctaatttttgtattttttgtagagaccgggttttgccatgttgcccaggctggtctccaagttctgccctcaggccatccacttgccttagcctcccaaagtgctgggattacagacgtggaccactgcacctggctccattgtctcatttttattcttataaccaatagttaatgagtgttctagcctgggtcttctgactccaatttcagtactgttactattaccatctgatactttaagaaggagaattgtgttggtatgagatattacaagtgactgagcaatttaatatttatctcatcctagagatattttattgggtcgattgaagagtgtgtggaggattataccaagtacttaagggagtaagaaaagaaggaaaagttgcatccagttcacaaaagagatttcttctggagtgtgtacttgtatataatacacttaaaaatataattccttattgcttaaaaatctaagaagttactctaaacccaagttccctttcgtttctcagtgaagagaactgaatgaatatattttgatactgatgaaaattgctgtagacaagttcaacttaaatgtttaatgatcacatattcctaaattaagagataatagagtcctaatctagaaggaaatttagtcctaatctagaatggaaaatatatactgaattcaggaaacttttagtgtttagatattatgcagatgtaggcttactgaaaatcaaattccatcagcatgtaatattgtgcaatgatactttcatgatgaaagattttaattattggtaattctcacagagggactggcacttgccatttttcctcagagacttattatgtacctaatcctcgttgacattgtttaatttagtgtgttcctagagtctttcaggagaagattaaactgggctgtagacatttcggatacaaagcattctttcagcacacaaagactgttgaattgcacattgggggttggtgtaatcaatattactctctgatgatgattgataagtgttaattttaaatagtgccttttgttgtttcacaaataattccactagtggttttctcatgggttgactttaccgaagtggaactttttaagtatttcccagtaggtttcagagcaccagctgagtaactgattgccaatatatgttaaatgaaaaaaggtttccacatttttttttccccaacaagaagtttagaaaacttgttaacatttataggtggaaacattttacttgatttgattgttgaatagcttttcaactagtgtttactaagaggctggaatatatgtagaagtgcttctgtgatgctgttaagtaaaagaagcagatattgcacaatattggccttgtaaaaacatgcattaaaaaacacacaagtttctggaagcaaaaacacacaagtgccaatagtggttacagttggataggggaattatgagatggttctacttatttctaattttatgttataatgagtgctttctctgtatgagactttttaaattctttagaaaatatattccccacaatgccaaaaccaaatgaacaaacaaaactcaagccaaacatcacctcagcacccctaaaattactccaaatacaaatagacttctgactcggtctcaggggcacaaggcacttgcttcagtgattttgtgcaagataagagaacactccttgtccttgctccagggaaggctgcagtgctgatcagcttgtgcagggtatgacttaaggaggacctaggtttgggggtcatatatattgtcgttcaattacaacactgagttctcattcctgactatagtgtcttcatgactctgctgacactaacattaatgggattatgacatggaaaatagaaatgaagagatgatctttaacttcaaaagacagagacacactgacctacttaaccgtcaccacctcctgaattcctttccatccaaccctagatgattctgtgcctaccccttcatgccattgtcataattgtaagggctcatatacttggtcttgccctctagatgctgcgttccttgaggataaagcctctacctggtctgtagatgtatgcttattgcctgtggcacttcgtggtacatggtggcactcagtaaatgttgagtgaatgacaagctctccaatatccatttttgttacttccccagtcctctgatttttacccgtttgctccgtagaaatgtgtgcagtgttgtgaagtcacttctttttgctttcccatatagcacttttcaggcatctccctgcgccacctgttgtcttactggccagttcctttctattactcccctggcatcatcccccaccatgatgctcacagtttcagccagcgcagcattgcaggagatcctgttctctggtccattgcttgcaaatgttcattggtggtaaacgttctcagtacatcagcagttatcagataaagggcttgagacatgatccccaggaagcagtagaagcgggtggtgcttaagggaagagcaccatggaagagtcaagaaggcccatgcataatggatgagatatgcaaagtttttaggccctaaacaatgctttggttgagaattattccaattaagcaaagggagatgacccattcaaaagggcaggatcagatcttacgtaagtgagtaaaaatttaaagtcccccataaaactgggacagagatagtttctactgagccagtgaacattaataacagataatcaataaataattaaatatcatctcaatataatttcttggtacagctgaaactcataatctagcatttttttttttttttttactgttgcagttaaaccaaatgaaatgagtggtaatttgatactcaagaaatagtacctggcctgcggtatttgcagtgtagtgatgaaaaacgtagattttggagtccaggagtcctggttgtgtgacctcgtttaaattgcttgatttctttgtgtcttatttgcaaattgagggaggacctatctaacaaacaagattaggaaacttgagggagataaattaagggaaatacttacctgatgcatgcagtatggcgcatattctcaatcaatgagaagcgatttttattgcaattgcagttgttcagaagagaggcaatgtggagcagctgagagaagaagggcctggaagtgaatgagccagggtccatctcctattactgtttcctgcagaagtcacagagctcctgcaaatctcatttgctccagctgaaaacaactttgcaggcttgttgtggaagactctacattgtagtacttgaaaaatgtaaagcattaatagttgcgaaatttacattagactaaatttaaatttgtcctaggttaataaagactgggttatttctcagtaatagaaatgataggaacaagaaaaagctaatgagatgtgaaaataagtaaagaaaaaatgaccaagtcatcctgctgaagatggaaagcttcccggattataaaaataatgaaaacatcatttttagcttatgaaagttgtgtaatgattaatcatttcatactttgtcttaatatgtgatatatcttatacatatatcttaacccaaaacttagattcaaaagttttccttttctcagagaggaattttaaaaccccactcttgatggggatcaggataaagattaaattatttttgaaaaaggaacttttattatctattaaggagataagtgaactgatagtttaagatattatgggaatgtttaaattacaatgtgtagacagttttgagaactttggaagatactgtttacttattcacttatacattcatccattaatgcagtcatatggtcatccatttagttatcaaacatttattgggcaactattttatgccaggctctgagtaccaggccctgggacacaataatgagcaaatcagacacagtcattgacctttgggagttaaaatcttatagggaagagagacactagtcaagtaacaactgataggattatacattggatttatttattaaagtctcaataaatactaggcaacactttgtagtgttgttttatttttggaacattcttaaaactagtaagctgcctttcacaagaatagtctcaatgatttttttcactttttttttttcaaaactcaactctcctttccctgagatcagtgtgagtgaggtttgtctgtgtgtagaagtggaagaacttcctgtctgtgaggtttagcaaacatgggtggtttattagtgtaagtaaggacttaatgaagagtaagataaataccaacctgccttgaaaaagtccagacagcgttgtatgtggggttggaggtcttgtggtccagcagcccactgaaaccctgggaaaggcccatgcttgtctgatgaagtacattatatttattgctgcaatgctgcaatgtcattttagcccatatgatggtaacaggctattgccttccattactctaaatgtctgggaatagtgggatatgattttgactgatattcttctattttcacagatgatcaacctttcttaataactgtaaggcaacatataatttttggaatctcccttaatcctgaggtgaagagcaatgatgctatggtccccatagcagggatacagaatggtttagatgttgaatttgatgatgctgagcaatacatctattgggttgaaaatccagtaagttttgaataacattcaaagtatataatttattcttgaagagcctgcctgcactgatgttttcttataagcaaacttttgtcatgtgagtaaaagggaaacaatgtggaaataaatttatccctaagttttttgattcaatgaggggtatatatgtgagcttggcctggagcaaaaatcataacactctttagcttcagaataagaaacaaatttaagctattgtgtattatttactcattcagcaagtattttccagaagtgcctatgatttgccctgcactgaattacctgcttctaaccacagaatacatgccaagaagcagcagtcacaatgcttgcccctagaggagtcttaagctagtagaaaatattcgacgaatataaaaatgatcaaaactcaagataaaagtagtagctccctaagggaatttagtgaaagcatttgatgtggtgctggggccttcctttagaatcctttagaatatttgcctctagggtaagaatgaacacttctccagttctcttcctcagaggtcattttcttcagccttcagggaaaaaacctgtaagaatagggaaagagcaagaagactataaaggaggaagagaagaaaaatctttgtgtttcatgtttgtcacctatatacaaaatatactcctggtcttctgatccacatctgtgacttgggtttttctcatgacttgtatgcttgtggtagttaagaactatctctgtagccagtactggagatagcctgaatggtaagccttgtgtattcctgtgacacactgaaaaatcgtttgaagcctacccagtggtgctgaacctttgtttgcctttcctctgagtgtaaggactgttcaagaaatacagcagctggcagtagccacagtgaagaaagggttcttttgtaggagccatggccttggaactgctcacctccccttgtctttctttccagggtgaaattcacagagtgaagacagatggcaccaacaggacagtatttgcttctatatctatggtggggccttctatgaacctggccttagattggatttcaagaaacctttattctaccaatcctagaactcagtcaatcgaggtaatgattccataatactacttacacaaacattggatttagattgatgtaaactctagtctcaggaatagatctcacgtggattttggaatcatttttaagcaaaaagaaaaagggaaaagatattagtgttaactatcaaagtctctgaagtgaaagaggaaaaccaccttaaaattttttttaaatttatttttatttatttatttattttttttttagacaaagtctcactctgtcgcccaggctggagtgcagtggcaagaccttggctcactgcaacctctggctcctgggttcaagcaattctcctgtctcagccacccgagtagctgggattacaggcgtgcaccaccaagcctagttaattttttgtatttttagtagagacggggtttcaccatgttggccaggctggtcttgaacacctgacctcaagtgatccacccgccttgacctcccaaagtgttgggattataggcatgagccaccacgcctggctggcaaaaataaattatttgagctttctattgctctattttgtttcctcctaattatcaatactaccttgttgctataaaagtgttttaggtaatttacaaaataatatataagaagataaataaaagttgcataaggaattcaacataaagggaagattatggtaagcagagaattttactatgtttcctcatctaatcttcaatgctatttcagttctcaaccaaatttatagtttgcctctgttcttagatggaaatctttctatggctccagtacagtttttctaacagcaaaacagaaagtagaaacttgattctaattcctttgatactctcttcttcaagataagtgttctttttactctaattcccagaagaaattctagatgaggcacaggtatgaaatcacatgaagtaagtcagaggtaacttgactagtgttggtttgctccactctgagagaagggtaaaacatggaagggattattaattcacaataattttgaaagtgaaacttcccaaaacaaggagaagtttttggagggggatagttagcagagccctgacaatccactgctttaggtgggcaccagctggcaagacggtttttctctggagcattcagaaagatactgaagatgagcaaggcgcacagcagcctgctggctaatttagagcacctatctatactaaaaagcactctctgtagactaagaacacagcctatgtagagttcggtactatctgaggtttcatgcatcccttggtgatcttggaatgtatcccccatggatgagtgcagatgactgtttttatttctgccaaatgaagaaatagggaaaaggtgtcccaggcagagaaaagagctctcactggaacagcgcttgagtttacaaagatctttcactagcatctaatttaatcctcacaacattcctgagggcaggcagttctggtagccatttgtgatgagagggaaatttgcagtgtgcacaagtatctcaagccaggtagaattatcaggtgttaacatgaagggccccttggaggctcctctggttcaaactcttttttttatttttatttttttacatcagaaaccaaggcccacagaagctaagaagatgtcttaaatggtcagcttcactgctctaattcctgagcagtattctctctttgcacttttataaactacaactccggcaatccagactggtttaaccctctttgacagtggcagaaaatatttttcatgatttcaactaagactatcatcctcccattaaacaggcaacatctactgcctaagacccttactaccaaactcacatctctctaaagtccacccagtgcaaagctgtcttaattccaaatggcaattaatatgctcttattttatctctttgtctcttgattagtaaatggggttctcttcttttaaactgatagttttccaaaagcagggaacgtgtctttcccattagtgttaggtacaatgcagtagtggccagttggagaataactgagcgtgcatgtgtgtatggattggtaaggccactttaaccacatgaaccaaaagtttctaattatgccctgatgcagtgtggtacagaggaaagatattttgatttggagtccaaagacctggctttgagtctgggttgcttgctcattttattcattcatttaatgagcactaggaaatgctttctatggatcagttgatcctggatatcctaagatgaataaacattttttttctgtctttaagtagctcacatatctgtgagatggatacataaacaaatacctgtgctccagtgtcataagtgtgataaggccggtgaatataaagtgctagtgattggaggcagaggtataagtgaggggagagagcatgcagatttcccattcatggttacttgtgagctgagtcttgaaagatgactaatacatccttgcttatcggagggtttcactttccgaggtttcagttacctgcagtggcctgagaatatgtgagtacagcacaataagatatttaaaagggaggagagagagagagaccacattcacataattgttattacagtatatttttataattgttctattttcagattatggttaatctcttaccatgtctaatttataaattaaactttgtcataggtgtgtatatgtaggaaaaaatatagtatatatagcattcagtactatctgaggtttcaggcatccattggtgatcttggaatttgtcccccatggatgagggggatgactgtttttatttctgccaaatgaagacgtagggaaaaggtgtcccaggagagaaaaacagttgaataaagaccctgaaacatggaaatgcattttatgactggggacaacactgcattttctccactcatgagctattcgaccttggacaaattacttaacttctctgagcctgttttctcatctgtacagtggagtttatggctgaggaagtaaaagtacttcataacactgaggtatcctgtaaatacagagcgctgtttccctcaaatgatcaatatttttagaaaatccatgaaagacctgtgagaataatgatccaagggcaaactgcccttttaatggtttaactggtgtttccccttaggtcatttaaattgtaagtaagtcttccaggtgattgttggattaattaagaaaataggaatcgtattcactttctgtttacctgtataatattccttcctgcctaagagtagttcgtgtttaactccaacttgaaaataagagaaacattgaagaaactattatccactaggggtagctgtgttcccatccactaaaagaaattttatagctgaattttgtagtgaagcctacagaatggccgtgtgagagagagctctatatattccagaaagcaagaaaaggaactgtgaaccaaagagatccttagtcttaggaaaaggagagagattgtagcagaaagaggcaaaccgagaaaagaaaagctaccttagtccaagcaagagtgaaagataccagacaataggcagagaaaaaaatttagagaaaagaatgagggaaagaaggatatatgtgtgtgtgtgtgtatgtgtgcgtgtgaatgcgtgcacacacgtgcacacgcatgtatgagagacagagaaacacaaataatctatttgtattgaaaagcaattttatagaaaaaccttaatgcaaaaatcaacagacattttctaatttcttactaattgtctgttagactgtcttaggtacgtattaaaatagcttcattgctgtaagaaacttctttctagtccaataaactatatttctatgtgctgtatcagggccctgttaacactgtgattataacagtaataatcacagacagccttgggaaagccactaaacctctgtaggcctctttttctccatctgtattgagaaaaataatgggatctacctcacagaattgtttatgaggatcgaatacaataatgcttgctctaatacctcatatatagtaagtgaccaacagatggaccaattaaacaatagaagtttattgaacatagttgtgctgggtggtgtgctgctttacctgtattatctcttagtcccgtaaggtctacgcagaccttccatatttgactgataaagttcaaagaggtgaatttatttgcctcagattgtacagtcaggacctggcagggcagagatttcagctcatgtgtttcagtttagtttgttgacttggaacagaattcactgtacctctgagtaaatttggactattttgatcaactgtgttggcagtaactggccaccgagtgccttggtggggtgcaggaaagctgtggggttctcatttgtcttccagagatttctcttagctctcctgaaggatttttgcagtttctttaggcagtggctctgtatgttttcccaactgaatcttccttttatccataaaaatgttccctcctgaaattttaggtgagttggaagtaggaacttgggaggtgattttgctgctcttactctcattttctattgagctaatttcctcatttccctgaagtgcaatatagattatctgaatctcatgcaaatcctctctcatccatccctaatcgtgctttggaatttgttttgtacataagttctccttcatctcagtttcctttggttccccttatgaaagtcagttctaataagtgattttatgctataggttttgacactccacggagatatcagatacagaaaaacattgattgccaatgatgggacagctcttggagttggctttccaattggcataactgttgatcctgctcgtgggtgagtattcataaatggcacgtgtcttccatgcagcattgttcttgttaatgtcagggtctgacaaaatggaagatttcaaatttaggacatcttctgatttcatatgtcaacatttgaaaaataatagatctcagtgagaaagagaaatagctctgacctatatttaatgtgcaggatattgtttgtattttgtcctatggtcttcaaatgaacaacactggatttaaaattaattccaaacaagcaagaattttaggaattttaaaatagcattataagaattgacaatatattctgactttgaaaggacacggaaagctctaagggattatgtaacatttgcaatagagcttgcaggatgagaagccttctagtaggtggagaatgggttgcaaccaggcagtgactcttgaggccaagggatccatgaaggcacagaagtatggcggcacttagcaggattgtggggagagccggaaccagaggcttagagtagggagctgttgaccacatgggagatacaacagataaggtcatttggggacaaatcaaggagggcctttaatatcatgctaagaagttgaactttattcttttgagtgataaggagcaagtagggattttttttaaaaaatttcaacttttattttagttatagggggcacatgtgcaggtttgttacatgggtatattgtacccagatagtgagcatagtacccaatagttagtttttcaacccatgccctcctcccttcctcccctctctagtagtccacagtgtctgttgttcccatgtgtatgtccatgtgtgctcaatgtttagctcccacttataagtcagaacatgtggtatttggttttctcttcctagcaaggaatcctgaggaagggagtgaaagaaccaaatttgtgttttagaaaaattggtcaggattgatgtggagagaggccagggccagggagaccagttaggagaaaatggtcttaatggatgtaggctggagtcctccggtctgtttgattggctatttcattctgttgatctactataccatattataaaccagaataacaaattgtaaaatatgaacactgattttttttttaaagagattgtagcatcattccaagtggattttggcttaatgtttgaaagttatcagattcttaggcctagaagggcactgaagaagtaatttgtattagcgctctgtttcaaataaggatgacatggaaaccaaatccaatttttaaagggcacaagaagcaaacattctattctgtgcctgctggcttgtactagttttcagttattctttctagaagaaggactgtcttaggttcgaaattctacttttgaaactcaggctcactcattatttgtttttcgtttatcagacatttctgcattgtgtacctttgttgggtggtgtgttagttaagatagctaactgttgaagcaaataaactcctaaatatgtaatggctcaaagaaaatagaaatttttttgtcttttatatgggcagtggggtttgggcagaagatgggaggaagctctactctacgtagtcattcaggacccaggctgatggatgctctgccatcttcagtaggaggcttcctaggtcattctgagtatcaagatctttcgagcagtaaaggaaagaacgttcagaaatttgctgggaggtttttatgagccaggcctacaagtagtgcacgccacttctgctcacactccttaagctagaattgggtcacatggccacagctaactgcacggaaggacatgcagtccacctatttacccagagagaagaggaagacattaattttggcaagtggaggcagtctctttcatggggccatggtggggagttcagagggtggatacaaagattaaagacctaatttgcaaccttaaggatttatggcttagtaaggaggataaggcctgtgtataaataacaataacccagattcatataagattaagagccacaagagaggctaaaaaaattgggatgatagtgctataaagaggtgacatttcagcttggtggaagagatatcatttggactggatcttaaagcatacctagaatttcactgggcagagctagcttttaagatatatcaggcgatatgaaggatggaaggtcaagagcaaagggacagaaaattgagggtttgttcaagtgactaagagcaacccagttgggttgggagacaattagaagagcttagaattttgtcagaggacataggaggagaaacaagacagagacttgaggatctaatatcttggattctcagtgaagagaaagtcttgataaagttgtgataaatgttattgaaccagttgttgcagaaaaatatctttgtggatgatcactaataaagagctgaggcagttacagggtctctgatgatattcaagagaggatgttgaatagagatagtagaagttaaaagaatggaaggaggatgaggaaatgtgaatactcttttaagaattttgtattggaaagttagagaaagataaacttgtaggtcaaaatgtaacaggaaaatgtctttcagaatagagaaacctgagtgtattctttagcagcagatgaaagatcaaggatgaagaaataattgattgagagtgaaagttatggggaaggaattcgaaatttatgaagtagaatgacttgaaatagtcaatatgcggaacatgatataaagtctgctagggatgagaatcctcagcttagattagggaacttagatttttagtgaattcagaattcacgaaagttttgtgctatgtccaggaaactcttggtaccctgaaatgggagaggagaaagaaaaaaaagggcagaaacccagggttggagattagcttagacacaatgggaacccaaaagaataaataagaatattgttgaaatggttacatatgatgtccaggtgtagaagaactggagggttgggagctcaggcagggcttaagggcaaagaacaagtttaataggaaaagttaaagcaaggaagaaatgagaggttttggtcgaagcagagcatttcagagtttgagaacttagaggcggagaagtttagagttgaagatgaaattcaaaggacgggtatattgatttggtggtggaagaggtaggtgaataaagactatttaaatgaaggggtttaaggacttttcagaaaagaatgtaggagaattgtctgttgaagatatagaaggaggtgcaatcaaaaggaattaaaagttgggttcaagtctagaacttacatcttcagtggaaatggaaaacagcccttaatatattttaatacattttcatatatcatggatttggcaatgctgtgtggtaattatggttcatgtgtacctgatcgctgtgaaatagaaagaaaaaagaagtcttccttaccccataacagcatgataatgagattccactctcacagaaaagtgttactcattatttctcctattttctgtgtcagttttcaaaattctttgcatttttcatcacagaaatcaggttaggtaattaagtagccggtcttgtggtagatggtgatttggggaataattaaatgaggcctggtaagtgatcagggagtgtacttggcagctttttatattagctttggccttcactatgtactgaagatggagggattattgatgtaggtttcttccttgtcataagcttcccacacacctgaccatgctaaaagttcagctgccagtgggataccctagcttcttattccagacaccattttaagtggcctctactccagttatagctaggaaatataccgacattggtagaacactggtgaagtacccctccacgttgtatgcaacgagatattgattttcagcctttgcccattgtattgtgagcatcttgaggacaagtaatacacattgtcatttatgtcactgactcaaatccaccttctgttttgttacatgctggtgtttttcatggttgtaggaagctgtactggtcagaccaaggaactgacagtggggttcctgccaagatcgccagtgctaacatggatggcacatctgtgaaaactctctttactgggaacctcgaacacctggagtgtgtcactcttgacatcgaagagcagaaactctactgggcagtcactggaagaggagtggtatgagcaccctttcagtcttttggtctttatgctgagctggtgtagctgatgctgagtgttctgagctgtcaggcagtggttcttgaacaatcttacttggtaacttgtaccagtgtttcattgccccttctcccaataacttctctcccttgcacgtacctcgcccctagctgaagtccagttctttatagtatgtgcatagttccctatagggtaatgtttattaatttccccaccaacgtttttttttcttcaagataaattaattccatttgtcatttcttacttgtcatttcagagccatttctttcatggtttagtgatttcagtgtttttctttgaaagtactctgggttctccaattatagagaatatacatatacctatatatatggagagaatatatatataaaaaatatagagtatgtatctatactatatggtatatagaatctatatagattctatatatgatctatatagattctatatatgatctatatagatatagaatatatattatagaatatagaatatatatttatagaatacagaatatatatctattatatatagaatatagaatttatatatctgtataggatataggtatattctatgtatctacctatgtgtgtgtgtatgtatgtatgtatctatttatttacgtagcaaggttctgaactcagcatcccctcgtagctacacattcttctctaatattttaacatgattaatgcacatgcgaaactttctttagtggtgattttcaactccaaggttgggttcattatattctacaataagaagcagaaactataaagtctcgttcactcattgaaataggatttcaccttcactgagctggggctaagcacatagacaatgctcaataataattattgatgaagcattgctttgggtgctgaactgaatatatgctagtcccttccttgctatttaacagtagttacttcagatccttgacattgatgcttttcataatattgtgcagtaggtttggctttcagttcattgtttgttcaacaagtactaacttcactccgaatatggacctataatggtggtaagctttggagattaaaaagaagtgatgatgtgtgtgaaaacactttgcagagttgggtgcatgtgtgcaatgacgaggaagctcttgttacatggtatggtttctgtacacacatctgacagggcacagcttctaaatctacgtgcttgttagtggtgtgactctccaacctttctcctagtgtagttcccttatttctccttcactctcctggtttaatcatcaccaaatgctgcaatccatcctcagcctgtcactcatgcccagatcttttctgccacctccaccattctgagcaacctctctctggccttgactaggcatggccttcagtggtgaagcctgctttcatgttggagacatgttttcttcataaagccacagtcagcaagttggatcacggctcagcttggagccttgccctgaggagtagctcccaacacttctgtgaggttgctcagctaatctggtcctggcctccactctctccactctctcctccaggctcatgtttcttatattctaaattctagaactttgatcagtttcatcagcataaccactcttgtaactgctgggctcccttttcagccatggcagtaaagccacactgtgtctctcgccaatacccagcccagatcctggcacagagcaggcacttgaggcaggtttttggagtgaaattaaaccagctacatctacatttcatttttcttccagaagaagctgactacttgtcattttcccttagggactttattcttgtagttcttttccagtgtaccaaagctattttgattaaagcttgttatctgttcaaatttaatggcaccatttttggccctgtcctgtcttgctgtcctctgtggttgtttgggggcatatttccaatctccattacagaaattgtcagtgaaggtgttaaactcagggtgagtcagctcctgtgcaatggcccacgcttagatgtttgagtatatccttgaccagaatatcacatgcagggactagtggtttagctcccttttcttcaccgtgccacctgaaaaggttgactgactcatgtgagctccgtcttcattatcaatgaaaggggcacagtgacattttcctgacctgctgcttggtgtcgttgtgatgatcaaatcagaaaatagaagtgaaaaatctctgtaagggatagagggctgtataaatgtgagacattataattaggagaatattagtgtttaaatgttcaaaattttcactatgaatccatgaaactaatgaaaattccaatcctttagattgaaagaggaaacgtggatggaacagatcgaatgatcctggtacaccagctttcccacccctggggaattgcagtccatgattctttcctttattatactgatgaacagtatgaggtcattgaaagagttgataaggccactggggccaacaaaatagtcttgagagataatgttccaaatctgaggggtcttcaagtttatcacagacgcagtaagtatttgtcactgaaatacattcatgggtgtataatgcatattcacacataactcacatttgtaagcacacacccacacacagtttcacgtacatacacgtgcatacaaattgaagttacctgaaatatttaaaaaatgataatgaagtcttaaacatggttaagtgccaagggctaatttggcatctgaaaggccagattgacttcagagtaagtttattccctttctcttcccattactttcaattccttactttgcttttacttcatagaactccctgttttctattgtttgtgttacttattagaatataacctctgtacgggcaggcattttgtctgtcttgtttgctgctcaatactcggtgattagaatagtgcttggcacataaaaggtgctcagggcatatgagttggatgcctgctgggaaagtgctaatgggatggaatttttagtcttaaaaagaatgcttttggatgttgcctatttcaacatttttttcaaagataatctaatttctgatttacccctttaaattagtggtatgatacaggtattattttttgatgtattttatagctttcgtcttcagccaaagatgatcaaacaatttgtttcctgtcctataacctaagtttgtcactaggtatttttttaactgcatgtgaaagaaacacatgcaatagaaattaattttttattactataaagaatattcttttttttttatttttccataggtttttggggtacaggtggtgtttggttacatgagtaagttctttagtggtgatttgtgagattttggtgcacccatcacctgagcaatatacactgcaccctatttgtagtcttttatccctcgcccccctcccacccttcccccaagtccccaaagtccattgtatcattcttaggcctttgtgtcctcatagcttagctcccacataccagtgagaacatgcgatgtttggttttccattcctgagttacttcactttgaataatagtctccagtttcttccaagtcactgggaatgccattaattccaggactattctttaaatcttatttcatatatttaaaaaaaatcacattattgatcatgtaactgaacatattattttaagtgccagttcataggcaaattatgagcagatttatatactgacctccctaatcctcgcatgatttgtagaagaaaacaagtgaagccccattctctaactattatacaatagttgggttactggtttcatacctttaggtgttattgtataagctctagtctctccgatgttgtttttagattgctaactcagctactatatgttggttattaatttttagaataaattatttggtgacccaattaaagaaatttgagatggggtggcgagtagctaggatcaaaagttacaaatggattttgttttcatttagatgccgccgaatcctcaaatggctgtagcaacaacatgaatgcctgtcagcagatttgcctgcctgtaccaggaggattgttttcctgcgcctgtgccactggatttaaactcaatcctgataatcggtcctgctctccatataactctttcattgttgtttcaatgctgtctgcaatcagaggctttagcttggaattgtcagatcattcagaaaccatggtgccggtggcaggccaaggtatgccaactccaatataagtaagatttgacttcatctggcaccaggttgaaatccctggtgccatgaaaacatttcttcatgtgtggattcagtgcataatgaagctttcctttccctttaaatcaactggcacagcctaaagtgtttttcaaactttagtgtgtctcagaatcacctggagggctcacgccaacacagctccagacctcgtccccagatttttctgattttgtagtctagggtagggccagagaatctgcactcctaataagctcccagggcatgctgacggtgctggcccatggatcacgctaagaaccacaggcccagagcaatatagaatgtaggatgggtttgcaagaagtactacagagttggtgttccaaagaactgtgccctatttctgattattaatggagatttatggtagaaggtatactactatttaatatggtaatgaaatagtccacaaatatgatttattaatatatatttggtgaattgaagcaaaagagttcacagtgtcagtccctctttagtaatcatatttttgcagcactttgtgcttacatactgtgaatgtatgaaacgatcacttgcttcctagatgagccaaggtttttaggtataccttagcacaagaggaactaagagttttctaacatcgctaggagaatgtcacaggctaaagagagaaatagagggtagaaaggaaggaaaaaaggatgaagtcaatgaaggggttgtagagatggtcagaaaatacagaaatgcacctggagaagggaatcagagagcttccagtcccacacgtcctcctgcctgatggtcatgttcacgtggacccatgactcatctttgtttttccatatctaaaaagttatggatctaagttatcatcttgtacagatatgacaaattcaatagtttttttctcccagcttttcattaaaaaaatgttcaaacacagaaacgttgaaagatttaggaaatatccttataccctttaccaagatttaacagttgttaacatttcttcacatttgagctctcaatttgtatgtgtgtgtgtgtacatgcatatgcattcacattcattttttatgaaccttttaaaaataaattttaataccatgccactttacccctacatatgttagcatacagtttcaaagggcattatgaaatattcataatcatatttctccagttggcctcacaatattttatatatagctgttttgttccatccaagatctaatcaagattcatgcactgcactgggaatatctcattagtttcttccagtttggagtagttgcctctagctttttgctatgacattgatgttttaaagaggcagacctgttgtctttgagaatcccacactgaggatttgtctgaatatttagtctgtctttcattttttaccctgcagttctcatgaaatggaagttaggtctaattgcttgattagatcaaggttaaatacatttagcaataatactttataggttatgctgtgttagttgatacagaatcttattaggaagaacataatgtcagcttgccctgctcttagtggcatttgagtttgatcacttggttaaggtggtcactgctacactgctgctttttaaagctgtattttttttccttcttaattttggtggaatctatgcaatcacacttaggccctgtgaatgtcttggctcccaagcaccttttacccattggttttggcagccatggatgatccttgtttgaaatgattatttaatcgaggattgcaaaatggtgattttcttattttagcattccctttacatttgttagataatattcttctataaaggaaagctcttcgtgtctccccggtttactttttaaataatttattattattatgggctcaaatttttattttttaaattcagtgtgttacagtcaattactgtaatccttcttttgatgttttagtggatccattttggccagggagaacctcttcaagtggcgacctgtatatttctgtgtatgccttgtttcttggtacaataagatgtttcacactcacttcgtaccttccctgcctaaacctataatcaacatttctcccgggagccagagctccttattgtgggaaagagtagaaaccaagatgtgggtctgctcactgcaactgggaaaaaagggtttcattttgtaatggggagatgctcagagcagggggttgggaatgagggtttgagaggaagggcagacatttaaaagttctaatttcagtgacagcattttttaatgatcttttcttaacttccaggacgaaacgcactgcatgtggatgtggatgtgtcctctggctttatttattggtgtgattttagcagctcagtggcatctgataatgcgatccgtagaattaaaccagatggatcttctctgatgaacattgtgacacatggaataggagaaaatggagtccggggtattgcagtggattgggtagcaggtatgtaagctatatggtgattttaatatgtttgcatctctgtcatcttattttatgctagaaagtttagcctaactccatgtgctacaggtttgtttttctagacaattattaagaccatttaagatacattgaatctagattaagctacgtgtctatttgataaatgatacggtgtttcagtttacagatttataacaaattaatccttatcattttcttctgttattaacataatctggagacaaaagtggctaaaatattaaattatgtggatttgttttttttacacttagatttgcacctgatttctgcattagaaattttctaaattttcaagagaaagagatataaaaatataaactatggaacagcattcatttgctttgaagctgagcaattttagttgccaaattcttaattgcttccttttattcatatataaaaatcccttagatcatgagatattttattagtaatttttttaaatgcctggtccagtattatattaacttagttgtatttattcatgcacataagcttgaataacccctcatttttatcactcatctgagtaaaaataccactcataattagtggtattatatgttttggaatataatccaattctacataaaatcagtatcattgaatcaagcttggtgagtaggcatcacttagaaatattagcatgtaggcagggcgcagtggctcatgcctgtaatcccagcactttaggaggctgaggcaggcggatcacctgaggtcaagagtttgagaccagcctgaccaacatggtgaaaccccatctctactaaaaacacaaaaattaaccaggcatggtggcgtacgcctgtaatcccagctactcaggagcctgaggcaggagaatctcttgaagccgggaggtggaggttgcagtgggccgagattaagccactgccatcaagcctgggtgacagactgagactctgtctcgaattaaaaaaaaatttaaaaaaaggaaatataagcatgtattatgaaaatctaagtactataataagagtttattgcaaaaagtaaatatggaagtatggttaaataaagctttaattgggttcctaactcccgttcctgaatagaaattactatttctgagggtatagataaagcagtagtcagcaaactatggcccgtgcgtcaaatgcagcctgttgcctgtttttgtaaataaagttttattgtaacacagctatgcccatttatttgtgtattgtctatggctgctttcatgttacagtggcagtgttgagtacttgtgaaaccatatgctctgcaaagcctaaaatatttattatgtggccctttacagaaaaagtttgccaaccctggattaaaggattggaaatgagcaaatgcatacatagcaagtagagttaggtaatgaaaaaatgtatcagtaacatatttcacattggcctgatttctctagaggtggtttgaatcagatataggaacaaaatatgtgtgtcttggtagtagcattgatagttcaacaacagactttcaactacatgaaatcaataatttgtggtcattctctacttattatactatcttcataaagttatctttttattctagcatgtacataaggcccaaagggaaatggacttttggtcacttttagaaggtccatgggatgaaaacacctacattagttagaaagactaaggaaaaacttcatgttaaccttaagttcaaagaccatttgataacattaataacaacctgagatgctgctggtgctccctctttgctacttttatcacattgggatggaagttgtgctatgaaaatgtatatttagagtgtttcaagtaggtattaagcatttagagcttcagatagaaaaggagggacattctggaaaatatacctttcagtagaaagtgggttatgatgttgctatgaattctaatctactttagaagctgaagataggcactttctctctaaatttgaagacacaatctctataattcctaggagtaagaacttatttttctaagcctagactgggacactatcatcttggaaaagacaacatatagtgacccagacttcaaccttatatattttgttctgaatttgtaaagttctccctttttttcttcttggttctccattgatcagcatgcactttcatttttcccataggaaatctttatttcaccaatgcctttgtttctgaaacactgatagaagttctgcggatcaatactacttaccgccgtgttcttcttaaagtcacagtggacatgcctaggcatattgttgtagatcccaagaacagatacctcttctgggctgactatgggcagagaccaaagattgagcgttctttccttgactgtaccaatcgaacagtgcttgtgtcagagggcattgtcacaccacggggcttggcagtggaccgaagtgatggctacgtttattgggttgatgattctttagatataattgcaaggattcgtatcaatggagagaactctgaagtgattcgttatggcagtcgttacccaactccttatggcatcactgtttttgaaaattctatcatatgggtagataggaatttgaaaaagatcttccaagccagcaaggaaccagagaacacagagccacccacagtgataagagacaatatcaactggctaagagatgtgaccatctttgacaagcaagtccagccccggtcaccagcagaggtcaacaacaacccttgcttggaaaacaatggtgggtgctctcatctctgctttgctctgcctggattgcacaccccaaaatgtgactgtgcctttgggaccctgcaaagtgatggcaagaattgtgccatttcaacagaaaatttcctcatctttgccttgtctaattccttgagaagcttacacttggaccctgaaaaccatagcccacctttccaaacaataaatgtggaaagaactgtcatgtctctagactatgacagtgtaagtgatagaatctacttcacacaaaatttagcctctggagttggacagatttcctatgccaccctgtcttcagggatccatactccaactgtcattgcttcaggtaagtgcactccaggtgctgcttgtcctgcaagtagacacaatggggtcaacacacatggatgactgagtgtttctaatgcatatgagactctaatgtctttgtgtgtgcttgtgtgtgtgtctgcctgtatgtgtccaggtatagggactgctgatggcattgcctttgactggattactagaagaatttattacagtgactacctcaaccagatgattaattccatggctgaagatgggtctaaccgcactgtgatagcccgcgttccaaaaccaagagcaattgtgttagatccctgccaagggtatgccatcatcttccttgttatatttctgtctgcttatttctggaaaaaatggggcctgaaattatgttcatagatagccaatgtgttatgggcttataaaactatggctacagattcaaaaatgaaagcatattgagtgattttacgtgggaaggagggtgcagcgcatagctccctttgatggcagaaaggttggcaacatactaggaagtcaacaccctgacttactagatctcctttggacaagttgtgtaagtagaaatgaagtttcttttgccatgttactggcaatttgcaattaaagaatattgtccttttttttttttttaaaggactatgaggttccctgtgaattaattattgactccttttgtatgactaggtacctgtactgggctgactgggatacacatgccaaaatcgagagagccacattgggaggaaacttccgcgtacccattgtgaacagcagtctggtcatgcccagtgggctgactctggactatgaagaggaccttctctactgggtggatgctagtctgtaggtgtctctggttactcatgtgggtgttaagaagaggtttttcttccatttccaaagaagagggatttgcatcatgtgatgaaaatatagcatgccagatagacattgccagaatatagaatcacagttttaggaactatgtttatattggaacttggtgaacatactgtgaaaatttatctatatcatgcattgaataattatgaactaaaagacatctaaagatgcattgctaaatatatctataatttcagctataattataaatgtattttctcaatttagaattacaaatgaaattactcaacttacattctgcaggccctaggtaactgctataaaatctgaatgacttttaaatgccaattgatattatgtttttttctgggctttagcattcaatgtcttttagaaaattcttttcttaaaaaaaaaaaaagaaaattcttttcttcagtctttgactttttgtcatcttttcaaatagaccctttcttctctggcaagcttctcctcagcgcatttcttaatattttccttttgtcaactctaattttgtatgtaacttctccaagtaccccccatatgtctcacattccagtcatcctaatggaatagttgaagggatgaaatgattttgtttattatggctggtgtctacatatcgggaatcttaatttttcttgcatatttctttggaattttagtcttttgatgccaagacctaacctcctgatcttttctttattctcctatttgaaacaaagcagtgatgctttgagtctaagcttggattattctaggtaaacacctcaaggtactcaataaacatcaaattgaaaaagtcactaaggaagtgggatggaaaagttattgttttattgagagtctgctatgtgcttaacactgagttccatgcattacatggattatttcatgttttcctgtttctaatatcaacctgattccttttgtaggattactattcatatttggaagtcaatgattttatataggctattgtttgataagcaaacaagacctcccatcaccagaagaaacatttccagctgccatatgccccatttgaaaagaaagtttgcagcttgtgtaaacaatgatgaggcgcatgcattgggctgccagttgaaaacttaactcacttgagatttcaacttctaaatttttttttgcttcattttaggcagaggattgaacgcagcactctgacgggcgtggatcgtgaagtcattgtcaatgcagccgttcatgcttttggcttgactctctatggccagtatatttactggactgacttgtacacacaaagaatttaccgagctaacaaatatgacgggtcaggtcagattgcaatgaccacaaatttgctctcccagcccaggggaatcaacactgttgtgaagaaccagaaacaacagtgtaacaatccttgtgaacagtttaatgggggctgcagccatatctgtgcaccaggtaaggcactgaccatgaaaattagaacatggagaataatgatcacaataccaattggtaaggaaagctgaagttctcacaggagaaaaaattcaaattctccttgatgtcagggtaatttatgaaacagacctggggctatattttgagaggaagacttggcaggcttcttttctaatctatatggagcccttttatgaaagcattttcttttattttatttttgagacggagtctcactctgtcgcccaggctggagtgcagtggcgggatctcagctcactgcaacctccacctcctgggttcatgccattctcctgcttcagcctccctagtagctgggactacaggcacacgacgtgtccagctaatttttgtatttttagtagagacggggcttcaccatgttggccaggctagtttcaaactcttggcctcaagagattgcccacctcggcctcccaaaatgctgggattacaggcgtgagccacagcactcagcctatgaaggcattttaaatacaagcttgatggagttagaaagaaagatgaaggccttggctgccctacttcatgtcttgactaagaattctgtcaatgagctggccttccttataaaaggatttacattttctgcttaagaggtattatttatagtttgaaatatttctggtgatatttgcgggtgggatcatatgtgcttcattgtgcattttataaagaacaacaaattcacgggaagatgtgccttttgatgttgttgctttgcaaattttgctgagaagagtcgttgatatttcctgttgtttagaaggaatcggcacatttattagaaattggtgattgctcttcttgatggaaaagtgactcagaatatagttaaaaggttaatgggcagaacttccatggcgcttcttagggagcatttaatgtagaagctgttgcaagtgctattgtggaggggtcaatgtgaacggtggctgcatccatcttttacttcttctgggattatctttcttcaggtccaaatggtgccgagtgccagtgtccacatgagggcaactggtatttggccaacaacaggaagcactgcattgtggacaatggtgaacgatgtggtgcatcttccttcacctgctccaatgggcgctgcatctcggaagagtggaagtgtgataatgacaacgactgtggggatggcagtgatgagatggaaagtgtctgtggtgagttggactcttggcgcttttggtaggagctaatggcatcttgatgtcaagtgtttggtatggaatcctgctatgtgtgaatgtgtttgaaatgtgtgcctaggcatcctggtagagctgaaaaatgtttcctctgataatccagactgtttctgttaaatcacctctgtagtggttaagagcacaagcacaatcatcatcctggtgatcgcatttgtaatctgtatagacctgggaaagttacttaatatctcaagcctcagacatctcatctgtaaaatggagctactactagggttcttgcgaggagtaagagaaacaatatgtaaaaatcccttagcatgaggcatggtgcaagctaagtctagcttagcttgggactaaggaaacgtatcattttaccaattttcgtagcacaaaggtcattatttcaaaaattttatgaaaataacttccaatcctcagcttccatctgaatagagtgaataaaacacagtggactttctcagggagttctgaggttggttaccttttcctagcagactgtgataggggctaggagtttttattttcctgaaataaactataattgcatgctttttgtgattgagataaattgagattatagagaaacagaatgactttgatttgtgcttaaattacttgatttgtgcctaaaacaattttaaaaatgtatacaacatattttgcttaatctaactaattaaaagtgttatctcactttgcatgcagtccattttgcagcgttttttgccttggaaggtaaattcaaagtgtctcttttatttaattgtatctttttaaaaattaggataatgttttaatcaagagggtttgttctcatgtttttcctgttcttagcacttcacacctgctcaccgacagccttcacctgtgccaatgggcgatgtgtccaatactcttaccgctgtgattactacaatgactgtggtgatggcagtgatgaggcagggtgcctgttcagggactgcaatgccaccacggagtttatgtgcaataacagaaggtgcatacctcgtgagtttatctgcaatggtgtagacaactgccatgataataacacttcagatgagaaaaattgccgtaagtttatcttaagtgcttattgtgattttgggtctgaagtcttggatcacaggagatgaaattattatataaaaaaaaggctttccaaaaataaaaaccctaagtatttatctaaaacgtaaatttttggctaggcgcggtagcaagtatcaacaaataccaatcttgtttcatttttctctccttttttctagtattttaaagtgactcctagtcatgcacttcactgataacattttggaaaataactaccatgccattataatgcctggcaaaatcaaaagtgcttactaaatatccctgagtacctagtccatgttcaaattttgtcacttatccccaaaatgtatttttactgttctctgttcaagttagggttcagatgagatctacaactgattttgattgttataattcttcaatctcttttatgccacaacacttcccactttttaatgtcattgattcattagaaagattaggtgatttgtcctgtagaatatctcacattctggacttgactaattgcataattgatccatttaatttatcttatccctcttatttcctatgaactggtatgtagacctagagttttgatcataacaggtgcaattctttgggtaagagtatttcagaggtggagctgtgcctttcctgttgcatcaccttatgaggcacatgatgttttgttgccccactttaagtggattctggtgtcagcctgaatcatctcttatgaagctcccatcatcctttcacccagtggttttagcatccatcggtggttgttccgtaaacccattatttctttaagagttatgaatgggctctttagaattctagtgttcctgccgcatttattagctgaagtttgataaagaagacatttcccttaccagcttttgttggtaattagaatctacaggataaataccttttgcttgtcaattttcagagtaatgagttggtgacaaaggagaattaactttttgtttagtttagtttagtttagtattatattgaactctttgatcttcatgtatttgatgagttttaatacagtgctgtcaactgttttttcttggtgcccagttgtccaaacttaggccaatgggagtccttaacttgaattttctgttctttggcatgaccccaatccatcttcttatagctcaagcttgtcttatatttcctgtcccagtcctggaattagccacttatccaaggagacctcattccctttgtggtacttagaaattatcacagggttgagttgctcattcctacttagctttcattgcttctagtccttttcaatggtcagagctaggaaatacagtttttaaggaaaaaaaatttttttatttttttgagatggagtcttgctctatcgcccaggctggagtgcagtgacgcgatctcagctcactgcaagctctgcctcccgggttcacgccattctcctgcctcagcctcccgggtagctgggactacaggcacccgccaccatgcctggctaattttttgtattttttagtagagacgaggtttcaccatgttagccaggatggtctcgatctcctgacctcatgatccgcccaccttggcctcccaaagtgctgggattacaggcgtgagccactgcacccggccagaaaaaatttttattgatatttcccattgaaatttaagattacaggttgtttacattttagattttataatgacatctcttcttatgcttaaaatcatagtttctcttgacatttagttgttttattatatagtaatttcaaaatgcctataataatttcaacattattataaccactcaaagaatactattaacaataagtctactaagtgcgagattcttcttgctttttagattatgtcccactagagatatgcagtcaaaggtatgactttaaagatatttggaatttttttttctgcagggttatgctatcaacctgatatatagttagctttatctattgctgtttccaaattttattttattttattgattttatttgtacaaaatagcatacatagttccaaagttaaaactacatgacgaggtgcatttatagaagtccttcatttcttcctctcctttctgcttcctctgtgctcttctcagtctatccagagagatgacaatttttgttagtttatcttttctttgttgttattgtttttaatataagcatctctctcttgctacacacacacacatacacttatatcgtcctttttcttacacaaaagttagcctactgttttgaatcttgctttcttactattaacaatatatcctgaagattatactgtcattacttatcagtatatagaaatcttctttattcctttaatagctacatattactccattgtgtggaaatgccatagtttattttaccaagagttggaactcttgttgatgctattaattaatgaaaacagatgatttaagttacaaaccagtgtctcctctcccttctccccagtatcagctggaaatatgtttttttactacagaatctataggtaacataagtatcatggatcctgcctttctgatggctttgaaaatgccgcccttccagtggtttgagttccacaatagatgtgttagcacggatactgttcataatacatatttggtggatatattcctaatatttatctggttgtctttttcaagctgatcgcacttgccagtctggatacacaaaatgtcataattcaaatatttgtattcctcgcgtttatttgtgtgacggagacaatgactgtggagataacagtgatgaaaaccctacttattgcagtgagtaagataaaactgctttctttctatcgttccagagatgcatgttgtgagctaatacaaagatatgaagcgtgggtattcgggctgatttcaattgtcatttcacattgaccttctaagtagaggtggtaggcagttgctttcatatgtgattgcaggggtatgagaaactctttctctctgttccctggctagaattcccagaccctgaatatttcttccagagatctgctactattggagagccatttctcccagtgttgaaagccttttgccttcatgtacttaggcagaatttgcccgttaagcccttataatttactcttaatattattatagtggccatcagtaactgaaaattatttttttttcagacagtctcactctgtcacctgggctgtagtgtagtggtgtgatcacagctcaccgcagcctctgcctcctgtgctcaagccatcctcccatctcagcctcctgagtagctgggattacgtgcatgtgacaccatgcccagctaatttttgtattttttgtagatatggggtttctctgtgttacccaggctggtctggaactcttgggctcaagcgatccacccatctcagcctcccaaagtgctgggattacaagtatgagccaccgtgcctgaccagtaactgaaagtatctttatatcccctagatacgttggaatttcagaaatctctatttcgtatttagcaatttggttcattcaaacaatttcctgtatttatagctcaaattaaaaggcctttcttaagtttgataactttgagactattagtgtaaatagatacataatttaaggatttagtgattggacttccctgttctgtgtatatgtagttaaactcttgtcactggcccctcccaaggaaatcaaagggcatcataattatttgtcaccaaattagggtacagcacaggaagaggaatctgttgtaataacagcagcacaaggaagcagaattcaggttgcagccaccagatagggctagacagataggaattattgctgacttttcagggacctctgcttccattgtcagttctcccctggcaaatcatcagatatcaggggccaaagcaaaacggccttatagaccagaagaattacaagactttaattagatgtgcacccacataacaatttggaaaatgcatataaccagagctacctaaaattactggagaaaagagtcaatgttcaaacataggcagagtttcccacttactcaactaaaagtctggtattccaaggatgaatacgaagataactttgccaactttctagagttattatctaacatagctaaaaggttgtgtgtggagcgagcttagatatgatcacattattgttttgcttttaattatcattgcaatggaatttatttaatcttacattatagtagaaaaaataaaaccaagacttataatttgtgatttcatttatcacaaagatagttctttggtatttctaacaaatacaattttttttttttgatttctggaatctagaaaaacaaattggggaattggggcaggattgacttccttctgtctcccatacttcttcctccccacagaaagcttacacaagcatccattttccaggctcagtcttccttttttggtaactattatctagctcagagatagaggcagattgttaagactgatgggaacatgcttgtgttttgctcatgggttttatcttctttccctcctgcagccactcacacgtgcagcagcagtgagttccaatgcgcatctgggcgctgtattcctcaacattggtattgtgatcaagaaacagattgttttgatgcctctgatgaacctgcctcttgtggtaagagagtaagcaagcatgaaaaacatcacgatgcagctagacaacttcagtctcttccaactgcttcaaatacagaccagggtcatggctgctgaatgcttggacttcctgtcccagctttcatctggaatgctgacaccgctcagcggatattcattaagacctgttagtggagagcactgtgtggggagctgatcaggatacggaagctgctgattgatgctgataaaatgaaattatattggtgatgcacctaatacagtgcttagctggtagaacttaattttagttggctctcaattgaagtttctgaatttggttgagtgctggcccagaaagctgtcagaggacctaaaagtgattggagtcatatacatggggaaggagtatattaggagcatgcatcctcttcctgttctctctctgtgccagtttatgagcacaagaggcccaagaagttgcaggagcctttggttgtattcctggggacagttatgccctgtttacatttggaggctgctatttgccttcacaaattctaatctatatccatgcacattttttacataattgtaaaaatataaaaatacaatcttctacattgctttaaaaaacctgtcaataaatcatattgctatataggagtcagaaaactatggctgtggccagttgcctgtctttatagatagcattttactcaaatgcagccacatatggctgctgtccctctactatggccacgtcctgtaggtgcaacagagaccatagggcctgtaagcctaaaatatttactatctagttaaaaagtttgctcgtccttgtcttcatactgccttttaatgactataatattccattgagtggttatagtatcatcaaattaactgcctctattattaagcattaggttgcttttattttattcctctatagtatatatcattgcagtaaatattaacatcgtatttaaaacattttattttcaggatattttcttaggatcattagtatagttttatagctgaagtcaaactattttcaattccagttttctctcaggtttaaattctgtgttgaagagtggtatttggagtgcttcactaagttctttttccccaacactgaaagttttatagaaagcaaagggcacatagagttttgaggacctgtaaaggaaataactaataactgctggatgagtagaatagtcttagagattgtttcaaatgtatgaattattggttcaaatatatgaataattaatatgagtttttaaacttctctatggtaacaaaagccatagtaatagcagtgagtaccaatgacctgatatatttaaataaaaataagcacataatctatatatgaatatatcctcattgtagtaaagtaataatattcagaaatatattttaaagaaataatacgatgtacaaaaaagtaaaatttacattttttcatccttctccaatcccctcactcctcaaaggtaatcactattaaaaggttgagtgtgaatttgacttacttttatcttttatatatcttactttacttttatatatcttgatatatagattttaaaaaaacagatggagtcttactatacatattttctgcaattagcttttattttttaagcttaacatcatgtcagcaaatacagaccagcctcattcctgtacactgccaaagaatattttaaaatgcgaatggtccatgtatttttatccttttcctagtggttggacatttaggttgtttccattttttcactatgaaaaacagtgtcagggtgaacatcctttgtgcacatgtggaaagatccttatggtctagatgtccagaaatggtgctgctgtatcaaaggagatatgtctcttcaaaaaatctggatcaggccaggcgcggtggctcacgcctgtaatcctagcgctttgggaggccaaggcaggcggatcacaaggtcaagagatcgagaccatcctggccaacatggtgaaacctgtctctactaaaaacacaagaattagccgggcgcggtggcacacgcctgtaatcccagctactcaggcaggagaatcacttgaacctgggaggcggaggttgcagtgagccgagatcgcaccactgcactccagcctggccacagagtgagactctgtctccaaaaaaaaaaaaaaaaaaaaaagtctggatcaatgtacacacttttcatagcagcttctgaaagagcctgtttcttgttactgttatgatataggctgtgtctttatcagttgcaactatactttctcttgccttaggctaattccagggtcccctgggtttgggagcctatgacaccttcattagttaaataggaacatgtggggttagggttagagcatctgaatcagtgatggctaatttgaagtagaagagtgacttattttaattcagtatttattgaacagtggtgttctaggaacttttgggctgtgtcagtgaataagacaacaatccctacccacatggagctaatattctaaagaggggagacaggcaaccaatcagtaaattgtctagtatgttgaaaggtggtgctaagtgttatggaaagaaggaaagggagcaaggaagcgggcatggggagtgcaggcgaggggagactttgcacaaaacaaaatggttttggatgaaaagtagattttaaaatagaaacatgtgaaatagtaggtaattcatatctttcctgggaaaagaagtgttctttctctaccatacacataagggaatattgtatctcattttagtcaccaaagataattagggctttgcactgtcagttgactacttttacctcaaactgttggtcgctggtactagtcttattggaggactaccctagatgtatataattaaataatgctctgtttcaggttttctagacaacccatgctacaaccagcttgtctccagattcctggactgtaaaccactttttttcactgagaatgctattgatcttttcaggtcactctgagcgaacatgcctagctgatgagttcaagtgtgatggtgggaggtgcatcccaagcgaatggatctgtgacggtgataatgactgtggggatatgagtgacgaggataaaaggcaccagtgtcgtaagtgaagccaattaattcctctgcagagtcacattccagggaaacacagtagagttgtttttctgtgtttggagagtatgattgcagatttctctgtaattgaatggacactgatagaatgttacctttgtttctccatgctgggagtgtttgatatcatccacttaaatgcttcagagtgatgaaaaatgactttatgtttactttctttctcttacatttggctaatggacataatgtcctacatttctaggggaaaaaaaaaacccacaaatacttggttgtctccttttcttttttcttttctttctttctttttttttttttttgacaaggtcttactctgttgcccaggctggagtgcagtggcggtatcatggctcagtgcagcctccaccttccaggctcaagcgatcctcccacttcagcctcccaagtagttgggaccatacgcccaccaccatgcctggctgattttttatacttttttttttgtagagacgaagtctcactatattggctaggctaatctcaaactactgggctcaagcagtcctcttgccttggcctcccaaagtgctgggattacaagcatgagccactgcacccagtggttggccactcttaatagcaaccttcacagtataacaatgaactgtctctggtttcctttgtcaccttaaagcggcatggagggaggggtgttatgcctcttgagtagataatggaacatcattttcattaccaacagggtatggaaatcttagctagttcaagaattaatctaatcggtgttagaataatgtctttctatggtagggcaatagactcaatggctccctgctgcttgcatctgatggcaccctcctgtgttgtgactttggtggtgggtcacaactccacatttaccctatccaccctatccactgacatgggtggttttcagctacacatacatggattgtggtgtatgcatttctctcacctgtctttaccaacatcatcttctttcttttgtttcctattcacctgcaatgagtctggataaaacccctgttcttttattttgtggacactaatgatttgatgtcagcatctcacctctttcctcatagcatcatggtttctgacaactctgttagcatatgcctttcctctccaccccaatattgcttggggtggtagctataatgtagttggaaaagcactaaatttggaggagaaagacctaggtttgaagccccagctcttcacctagttctatgactttgagacatccagttaaccatctttgagcttcagttttctcatctatacaaatggtgtaaaaatacctatttcacattgtgcttgtgtgattatactttgtaaactaaaaaaagttaccaaaatataaggcattcggtatccagttaacaaaatggtagtggttttctgaagccctaagggaaaaagtatgaccattctaatgtattttatggaaaaataaatgagacattttattgtattgatttctttgaaaaagccagggtccaaagcaattaaaatggaatctttggaggtatttttattatgatctattattataatagcagtgtaatttgtctacgtgttttcctcccatttcctttcatacttagaatggtaagtaacattaaagcaaagagaattaactgctgcactgagctctcatgctttctgattcttgcgtgctttggtttcagagaatcaaaactgctcggattccgagtttctctgtgtaaatgacagacctccggacaggaggtgcattccccagtcttgggtctgtgatggcgatgtggattgtactgacggctacgatgagaatcagaattgcaccaggagaacttgctctgaaaatgaattcacctgtggttacggactgtgtatcccaaagatattcaggtgaattgaggattcagaagttacccagcatgcctcaaatgtccatgggggctgggctcacttacctatcaggcaccccgtggccacagtgcccagggcccatgatgcttttagtggcttatgaaaatgtttggattcctttccaaatcaaagggaaaaaaaacttttacatcaaagaaagtattttaatatataatattaatatatctggctttataccaatatgattgcattaaaatgaaaagaagttacttgaattattaatacataataccatattaacaatttaaaattaaatataatttttaatatttttatggaggaaggaacccaagaaggcaaaaatgcctagggcctgtgaaagacagaatctggccttgcacagagggccagggagatgaatggatagggcttgagataagaattctttcttgaagctggtgacccgcttagttttccacttggagtagaggcattggtattacaagaactgtttcactctcttctctctactacaagaaaaataacagcacaagcatgatgataaatagagcttggctcttaggctcagagtcaagtagaggcaggtggagtgaactgagacaatgtctccaactaaggatgcagacattgatcaatatcatgcagaagggctggaaggccagactttctgatgctctctttttgacagaagttggaaatctggattttcatttgaaatactctgattttaaatgctggaaacaaattttaaaattcttaaaacactgtgtggatcaaacagattcggctcacagcctgctggtttgggggacctctcctgcaatgttccattgtttgacttcttacctctttctccaaatgggcctcttcaaacagtttatatacattcttaacatcccaacttctcatcatcccacttaacaaatacttggattatggaaggaaatggagaagaacaatttgtaagtttcaatcctgattgactaggaaaatagtacgagcattagcaaaagtaggggagtccagaaaggcgcttgctcaaggtggaaggtgagtttgacatagtaggacttcctgaggtgaaagtatgtcttaggtatttgggcacaactggagccgtgaagagatattgcttgtgccaaggactgttaagggacacacacaggcacattgagagcatcaggaatggccaccttacagcatgcgaaggaagacagtgggaaagatatactaagtaggcacaagatcagagaagcagagtcacaggggccattgactggaggggcaggcagctcatcaacaggcgctaatgtaccgttggagtccagtgtggtgtacgattgtgtgtttattgtggtggtcctgaggaagaaggaggaggtgaaggagcagggactcagcagtaatttaaaaagtagataaatgctatcaggaaaatacactctgtgggtgattcatcctctgatgagtggacattgctgagaggtggtagtttgtgaactgacaatgcaaagacattcaagaggtggagctgtcttcttttgtagtgaagctgcagtagaatatgctttgtttgtatttaagtaatatgaatgtaaagtgtagatttttattttttgcacctaaagtggataaatctttgtctatattttctccctactgctcaagagttctattgtgttgcacttctatagtttttctgaatttggtaaatagctaatagcattagtcttagatgtaaatatattctgaatacctaggcttagactctaggcacaagaatggtagcaggtgttgattttgatcagactccaagttatctcctttattcctcccattctgagctttctgggttcttcctttatcattactatgatctcacagcacagtaacatttcctctctccctttctttgttcgtccattgttccttccttcactttccctccctttctctctctctttctttttttccttgagctttctgaatttccttgaaaagggctatagtagaagagaaaaaaaaatactgtttgtttgaaaacctgagctatcagcttctaagtaagtccaaaatctgtgtctggagtagcctctactaggtgtgctgttagtgtgcatctccttgcttgcttggcagaaagtgtgctccccatttggtacagtgggacaggagatcatttttcctattgaccttctttttttcttggctcactactgatgctgctgaaaaacatggatgataagactgaggggtgacaatttggtgatgagctggaatactgacttgcaatagtgtctgaaagcttggtgatttgcttgatgacttgtttttcctcctgcattggatctaaattagacaaaggaaaacattggtgttttcaaaccatttggaaatgagttaaatagctcccgggagaccaaatgaagctgagccagtctgccttgaccacagctttcttcacaattacatgcacacattttgctgtaaatcatgttgacaaggccctgggtttatggatggcagtgctggttagcaggcctggttataggtcagttgtaaaactgaccacattcaccgttgttgccttcacattttgtaatgctctatgtgccgctcctatgctttctatgataaattgttcaaaaccattagctttgttcactcttatcaaagattccttgatgcatatgtgagaccccctttagacatcataacttttatgggatcttggagtaatatggagaagaaaggccagtttggctcacagaacttcaggaaattatattgttataatgatgcctgtgtatgttaggtcccgagatagcttctagtactacagcatgccttcttcctttgccagtatgccatgctaacctactagcttgcctttattcacatcaccatgaagactcacatctcatgatagatggcaggagtgtaatgaaagatggaaggaacaggactgacaatgtaaacgttattccagtgggaagatatgtgttcttagaggacacacccaataatcttatttataatatatagcactcaccctatgagtttccatttgggtatgggcacttttatcatgtgattacccagtacattgccagtgcctactggctatctcattatctgttgaacatagatagtgccactgttcataagctgtctcatagatctgatgtataccaaaattacaaaagttgtatttaattagtttatcaactaaggaaaaaatgaatgcaattatttttaatagctatagacctactaattatctatagctattaaatggtagcatttaatggtagcatttctaatggtagcagccagcccctgaggaagttgtgtggaatgccaaatattggattcttctagaattggcgattagtggggtagacgaagatgatgggggaaaggggatcaaggacactggtgatcttgtcgaaatggttgacctggcatttaggtagataaagaaggaagcaaaaccccaagtgggtaatagttgaggtttattgccaacctctctgaaagtggtactggatctcatgatacaggtgtgaccggcacaatgactgtggtgactatagcgacgagaggggctgcttataccagacttgccaacagaatcagtttacctgtcagaacgggcgctgcattagtaaaaccttcgtctgtgatgaggataatgactgtggagacggatctgatgagctgatgcacctgtgccacaccccagaacccacgtgtccacctcacgagttcaagtgtgacaatgggcgctgcatcgagatgatgaaactctgcaaccacctagatgactgtttggacaacagcgatgagaaaggctgtggtgagtacaacagaggatttgggaaaaggaaacaggggagactgaatatggattctcaacccttcacgacttagactttccaacctgtcctctaactacaaagttaccataaaatcactattcctgatatagcaaaaggttaccaaagtttcttggtatataagatggggacacacatttttttggaccaattctttgcttagatagtcattagagagaacagaagatgggcaaatattcaggccatcatttaacattattgccaaataaggtactcaagaatgaagggaaccaggttgattctctttgaattcttgtaatgactttttgcctgaagcatccctctgctagaactcgttggcctgttcttcatttttgtcctcaggtaattgaatgggagagtttaatatctctctcaccccaaccaccacaagtaaagcagttgagaatccacagcatgggcattgtttgcttagcaccatcttgaactccataatattggcagttcgtcctgtttgtggtgtttaatccttgtaaccattgtttcatgtatgttgatattgtctctgtaataacaatttagagaccatatcctttcatttattttgttttctttattccacttgttcattgtcagtactcattgaaagcatttgcctaattgacccagaagtatgtaatgtagtttttatccttatatgaaagataagatttatatgaaataacattaaaattaaatgctagacagaaactgctgtggaaatgtggagaagagattatctatgcataatattaaaaaatctgtgcagcaaaccaccatggcacgtgtttacctattataacaaacttgcacatcccgcacatgtacccctgaacttaaaagttgaagaaaaaaaaagaaaaaaatttaaaaatcatccaaaaactggcttttgctctattgtaagaaaaacttctataaatttctaccaaagtttcaaaaaccatttaataaattaagaaaaacatgtgctatattatacatttatacaaaaatcatagggaactttcttatgtttactcctaattcatatagattcccattgcattttaattaattttgccttacctcaactataagaattaaatcctcaatagtacataattcaaattaaaatttttagcttgaagacgaagtgatctcagtaggtctcatccaaacctatgaaacattcactcttacaactggaaggagtactagtgatcttctgtaccctgttctctttgcagataataagactgtagcccatagatgggaaacgaattgtttgggggtgcacagtgaactagtggaagagcttggcctgatatttggataatggattttgcaatgcatgaagttttaatctattgctccttgatgagtagagaactaataagaacttgctgtcctccctctgtagatcatttttgggtgaggttgcccatgtgttacaggaccagccagagggacatgtagtgttgtgttgcacctagtgttgagctcatgccatctcgtgagaggcaaatgtgtgtatctctttgtggttccatgttcagtgatgtcacactggaagcctgagcttgaccatggtgtgaacagtcacactggaacatgctacaaatcagagcatttagaaaatttttcctgagtcctgtttgaccagcacactggccaggctcttttcttctcctcttctttctcatttctcctgtattagttgttgaaaccactgatgaaggagtaagttggtgaggaagttgaaaaatagtgacttttcaataatccacagtctttggaagtctttgttgtctgtcttagcatgattcattaagaattggcactgtttagtagaaatgttgactttgaaccattatagtgagttggtcgttgatattttaggatctctaagaactgctttttacctacaggcattaatgaatgccatgacccttcaatcagtggctgcgatcacaactgcacagacaccttaaccagtttctattgttcctgtcgtcctggttacaagctcatgtctgacaagcggacttgtgttgatattgatgaatgcacagagatgccttttgtctgtagccagaagtgtgagaatgtaataggctcctacatctgtaagtgtgccccaggctacctccgagaaccagatggaaagacctgccggcaaaacagtaacatcgaaccctatctcatttttagcaaccgttactatttgagaaatttaactatagatggctatttttactccctcatcttggaaggactggacaatgttgtggcattagattttgaccgagtagagaagagattgtattggattgatacacagaggcaagtcattgagagaatgtttctgaataagacaaacaaggagacaatcataaaccacagactaccagctgcagaaagtctggctgtagactgggtttccaggtaagaaaacactgatgagctttttaaaagttaaaaattaaaaaattctaaccatgttttcatcttgataggaaattaatttttcaacttgggttaatatgcagatacatttaatgtttctgcaggtttattttctgctttgtatctgatattcaaatgatagattcagaacagaatatctaattattttaaaaatttatagtatcatttttatggaaagaggaattgcaagggaagagagttcactgttgctggccattcacttaactggagatgatatgaagggacgattcatgcattcattggtgcattcagtcgttacttcctgagtccctcctacatgcccagcgtgatgacaagcagcaggggttttgaggggaacaaggcagacatggcccttgctctcctgaagtacatagccttgcttacaatacttgtcattggccgggggcagtggctcacgcctgtaatctcagaactttgggaggctgaggtgagaggatcgcttgagcccagaagttcaagaccagcctgggcaacatggcgaaatctgtctctaaggaaaatgaaaaaaattagccaggaaaggtggtgttcgtctgtagtcccagctactcatgaggctgaggtaggaggatcccttaagcccaggagatgcaggttgcagggactgagaacatgcatggcactccagcctgagtaacagagtgagaccctttctcaaaaaaaacaaaacaaacaaaacaaaaaaaacaaccaatactagtcattcccagcatgggctgggcgtgaaaactggagaatggctaacatgagactcttgttttgagattgcccttatggaaactgacagtctttaaggcaggccagtgatattttaactaaactaccagatgaaccacacttcttaacatctctattgaatatcaaatctatcggattcttggcagcataaactaattggctttgtggtcaatagacatcaatctgcaggcactgtaaagatgtatgctgtaaagattcttgttgcagtcagcccagacctccagagggctcttccccacatccttatatttgactcccttaagggtaaagatcctaaaatgggtggggacagttggcttcccagttctccctgaccagtagctggcctgacataggtgctgagtgcttgctggataataaatgaaacgttgactaagcattcctattgtatgtatcaattcctgttttacgtatcctacatgtcaaaaagtatagtgattaatgatttccaggaacagaactgagcatggtactgttcttgtcaccatcctttgttccactgcagaaaaaataatatttgaactgtaagacattgtcattcagccctctctctcagaaactgctagaatgacgtttctcttggatttcagctatttcctctctatctcggtgtgttctttatcagaagagaattaaatacatgtgaggaagatgggcaagaaagtctgggtgagggtagggtaaacttttcttgaaagtccaggagggtgcacaaccaggctcagtgttcctgaaaacacaaaggcagaatggagcccagttacatttacattggtagggggcagttctaagatactagctacactgaaattagaaacaacttttttctccaatattaataaatatttctgctgtcagcattagggtgtttggtttccaaagcccttgcatttgatataactttttaaaccaccattacgcacattggaagatactgttggctctcagttatcttaatttttccagtagtggagacggaatatcttctccatgttttcttgagaagaatctgttcacaggatgtcttttgactgtggaataaagagaaattaatgggaaagcagtaagctcaacagagtagagtgccctatggggtagccagtctgccaggacttgaatggtaatagcaacaggaatactaatacgacaagaataataatagcaactccttctaagcctgttgtgatctgaaataatataatgttttaaaaagtccctggtctgaggcctggcatttaacaagtgttcaataattagctactattattctcactgttcttagtgtctaccatgatggaatccaagattgtagccatctcattcatcaggatttactcatttacccaagtgaattaactggcaagacttgtacatatatggatactcattctttcttgctgaagcctgaagcgatgctactgtcctaactattcagatatccagcatgaatggttaagcgcgtacttgttgcaaagaggcattcaggtcttttggaagggaaatcattctccttcattctccttccggttggaattgattatcaaatcctaaatgaccttctcactataggtgcatttaaccctttggaaggttatggatgctataagactctggtgaaagccctgggcccctttagaaagtacacagatcaccaaagctggcttccctgattctgggtaaagaccttgggttaagaacacttaccttataagaaaaataaattttattgaataaaaatacatttataacagaaatgtccttgaggtagcagtttctaacagatcctaatatgtttctaaagcttcttaggtttgattaagtgaaatgtgtctcaggttgagaaactcattttgacagcctgtctgacagaggcagggatgtctctttatcctaaggatgtcataatctttatcttaagaatgtcataattcagagtttctctgtgcagtttcaatgacacacttagacaagtgtgtttccttgactccaccatttaaactgtaattcatgatactcacctctgcttccctgttctgctaagcctttgcactgcctggagagggtgccttatgctgcatgaggaaagtaaaaccagacccgtcgaatgaagtgtgtcccccgtattttctacatgacaccaccttaaagtgggaattattgcacacagtcttgcaccctctgttgcctcactgcaggaagacaaacttcctgttttcccctgccctcatttgcctgaagaaaggtgacttctaacaactgtctgtgattctcaggtagcttgggtaggaaactgggtggctaaatatgtaccatttcacaaagtgactgtattggttaactcctggctctccattttagaaagctctactggttggatgcccgcctggatggcctctttgtctctgacctcaatggtggacaccgccgcatgctggcccagcactgtgtggatgccaacaacaccttctgctttgataatcccagaggacttgcccttcaccctcaatatgggtattgtctccctgcaatcctgggcttttctttcacctccttcttctgcctctgttaccgagaaggctgttcatgtaactatctcaaggccaatgtcttgctggggtttgtcttctgcttttcctacttggtaaattgtttagtgtaatgagtagaagcatggcttcttcaaatcatcatcatcagctcttctgttttcttttccctgacacacttttgcacttttcaagtcctgtattttggctgcatgcaaagaaaactgtggtttcagaaaaccgatttctttactggactctcgaagtcaaagccactgaaatccagttaactatgtttatttgtgagcattttctgtacattgtccccttcctttttcttttttagattatttgctgttagctctctttcttttctgaatgcagaaaagaattcagaatgcagtctgctctacagaatgcagactccatttctctaaatggagaaaaggtgtgtattttggctactgacttcttttggcatcagggactgaccctttgtgtttgccctgacaggtacctctactgggcagactggggtcaccgcgcatacattgggagagtaggcatggatggaaccaacaagtctgtgataatctccaccaagttagagtggcctaatggcatcaccattgattacaccaatgatctactctactgggcagatgcccacctgggttacatagagtacgtacatagaaaagcataaaacaattgtgtaactgtttatttcaaacatcagagcttgtgattccagtctattagtcccctctattgtctaactggcctgtctgttggaagtcattcgggggaagtcacacttctaactaaaactgctgagctctatggtatggtgcagtagaaagagggtgaacttttaaatcatatggatcagggtttatgacctgatgttttcacttcttattgtttttttatctagaaaatggggctaataatctctccccatggtagtcagctcagtgtgcaactcatcttaattttttttatctctttaatttgctctcccctatgaaatatatgattaataaattttagtatttgagaaaaggaaaagaataaaaggatctggaaaactttccctaaaatactttggcacatttatggttaagtgcagtgcagtgttttaggtggcagtagagtctgttaacattaatccaatatgataaggcatttacatctttctggtaataggataatttttaagtgtgttaaatatactgttcaataaaaaatactcattgtaaaaagatgatacacattattaatcaaaaattaaacaacaatacccatattgaattttgctagttatggcctagttggaccatagtattgtcttctgcataagcatttatggataacgatccaggaacagcctgttgcactcagaagcatggaaatgccattcattcagtagaactatttcaaatttttttattttatttttagaaattcctttcttctgttatatttattttgctgccaaagtcagtgtagtaaagtttgaagttctctaacaccatgctccctggggacatgccactgaaaaagaaggaatacctggcacacacgccagtgctctttcttcctgtgctcatggcaggcataattaatcaatccaagtactttctcttgttgaactggttcatttgctacactaaggtagcctttagcattctcattgcagaatttaccgtagcagatattaactcactcttagggtagagactaactttaattagaagcagtacaatattatttctagtttacttataccattttgatgtgatatgctgatggtaatacccttagcccttcccacagtgtgtgtatcctctcttaaaaggcacatcaaagagctgagttagctttccatataatcctatattgaattagtagaagcatcaagatgttcaaagaagcttcaacaactttctaactgacatttgttgttctttgggtcctatagattattcttggtcttgaaagcttagtaggtgtcactcagcatacatttagacagtgtttccaggagcattagagatgaaaaaaggaattttctagttacacaatattctgttcactttttgataaaatctaatatagattatttacgtagatggattataaaatttaggcagtagattttagtctaaaagtcaaatcataatatgaggcactgtgatctgggaataaaggaaactttaatattcatgagccatgttaaattggttacctcttggagaggtagcaatgcctgtgttcagaaatatatttcatagatgcataaagcaatagatttttatagagcatgcaattgattccttgtacatcttgggatgcaccaacacatcactggagctgtgcctgtagttctactcttactttttttttttgagatggaaattcgctcttgttgcccaggctgaagtgcgatggcgtgatctcggctcaccacaacctctgcctcctgggttcaagcaattcccctgtctcagcctcctgaggagctggtattacaggcgtgcaccaccacacctggctaattttgtatttttagtagagacagggtttctccatgttggtcaggctggtctcgaactcccgacctcaggtgatctgcctgcctctgcctccctaagtgttgggattacaggcgtgagccactgcacccagctgtgtagttctactcttgacaaaaagtactcatagagatatctgagatctctctacagagattacagatgaactggaagggaaggtctcaggactactttctggtctatgatttttttagaaaaacagatggtggctaggtgcagtggctcacacttatagtcccagctctttgggaggctgagcagggcagattgcatgaactcaggagttcaagaccagcttgggcaacatgacgaaaccctgtctctacaaaaattacaaaaattagctggatgtgctggcacctgcctgtcccagctactcagaagactgaggtgggaggatcacttgaacccaggaggaggaggttgcagtgagccaacattgtgcaactgtactccagcttgggcaacagagtcagactatctctagataaataaataaataaataaataaataaataaataaataaatcagatggtgactaatttctggtcatttacctgcatccttatcaacaaaggccaagcacatcttcaagttttcctatgacttttataagttaccataaattatattttgggaaatatttttaacattgcatggctaacattatcaggtttcttagttgctagcttgttctatctcctgtttgagttttaggatctgttccaaatttttaaaatattaaattttcactattttagaaatgatttctgatatagacccacagtaatgaaagcccttggaactgagaggacttgggaatttggctgtggatcctttgtaacatcttgaaatcggagaaccttctctggaggtttattcatctgtaaaagtattcgctaatggtgccatggcacgattaataataaatgtcctgctggtgtttgcaaagttaaccctgcaggcctgtaagttgtgttcccctcaggttatactgagaatgcaactatctcctagaataacgtcccctccggaatgttaatgagaaggtagaattccagtataatattgctatcttctgatttcttccaatggtgttggaagaaacaagaatggtgttcaccccaggatatcaaaagggtgcttaatgaggaacatcactataagaggccataaacctacaacagctataacagcttcatccgcaggaaagcagctgtggttaggaattagtgattatttaaactcctgacactattcctattttgttaagtattgctttttcacttctacatcttttgttcaatttgaattcatcctttaagtttaatttttgttttaattaaagactaggagttttgaggatctgaacttatattatctctaggaggtagaattttattgatttgtgaattcttttatcctgcaagacattagaggagaggaattacctttatcacataactgtttctgcttactgctgcaggtactctgatttggagggccaccatcgacacacggtgtatgatggggcactgcctcaccctttcgctattaccatttttgaagacactatttattggacagattggaatacaaggacagtggaaaagggaaacaaatatgatggatcaaatagacagacactggtgaacacaacacacagaccatttgacatccatgtgtaccatccatataggcagcccattggtgagtaggtgattgaggggtttggcaaggttgccttgggttatgtgcatgtcatgattgtctttaagcatgaacttcgtgatttacaaaaagtttgttgcacttgttagtgttttcttcaaagcatatgctgaaagttgacagtaggcaaatatctttagagtttatcccccttcccctgggaaagactacctagaactcttcatcttcttaaaactcgctcaattcttcaagatcatctttttttttttcctttgtttttgataagatttaacagttatcatgttgccatatttacttcatctatttctatgggaagactgaagtattttaaaggaattaaaaatatggcatttcagccctaaatactaaatactaaataaatgcatatgatattgtattgtgtataaattagatattattcttatcttctagaagataatgtcaagagcagtgcgttttagtgttttttaagtaagagaacttgtttttatttgattgtgaacttatattccttttatgcaattaaagcaactttatgatttagagtctgaaataaagataaaggtctgaaatatattttggggatagactggtttttgtgggtctgctttgttgtgatgtcttgctaaaacatatgataaacttggaattaaggaaaaatgagaattagcaaaataaagaaatttagtatttctttctggaagttaatattcttcatatcatttttattagaagttcaagcaaatattcacctcaaagtggtgaccaggaaaattagtaaagatgctgctcagtttattcatccacattatttttggccaaacttgttacctgtatacttagaatgagggaatgaatatagcatctgttggaaattaaaactttaacctaggtctaggcaaatgaacataagctaagtttactgcctgctttcccaggacttggagaaacacatcttttctagtcagaaacaccagtgggtatagctcacttctggtagcatataaatgagctttcttaaagcacagggttgttgcttgtataactctatcatctgttttatttaggaacttttgggaaaatcataaatctaggatagttttttttttactaagaggtgatgagtttaaagtcaagatgtgtaatcagctaatctgtgcttgatactctctttcagcaaatgaacacatattttcttccttttccactagtgagcaatccctgtggtaccaacaatggtggctgttctcatctctgcctcatcaagccaggaggaaaagggttcacttgcgagtgtccagatgacttccgcacccttcagctgagtggcagcacctactgcatgcccatgtgctccagcacccagttcctgtgcgctaacaatgaaaagtaaggctctctttcccctctcctcagtgcctctctagcccgtggacagacattgaccttcaaggctccaagggatgggagttttctagtgagacaagattttggttaattaacttggttcatgtggaacacagcaagactctcagcctccaacttcagataatattttccatgaatagaaggagcttgctaaccaaactgttatgcctatatatgcaaactttcatagaaaggaagcaaaccatatatttctcatttctaattgtcttaagtattggagccagagtgtatataagtacatactgaaaaattgtccctagaagtaatagaatttcactgtcttttccatgtctatgccggcctagctccttagctgcctatgctaggggatccagggttacacattcaaatccatttttgatcatttgtgtttgctatgaaacatggccacagattattttcttaacaatgtccacaggcccattgataactaggggacctgagttagagagtggcatggagagaggcattaatgcagatcatagcatctaagatgcagaggtagacgattgtagtgattaaataagatatctgagattaagaatctagcatacatttatcgtgagaaagaccctcaacagtttttattgccctccaacttcccaaacaatacttttatatcaccctggcagacaatctcaaccaatcactgctcctagaacacagctcaaaacacccactctttatttgtttattgttttttttttgtggaggaaatttattcatcatattaagagcacattttcagtttgtatttggatcttaagaaacctgttctatcttgccaagttatgttttctctgaaaatacaccattgtaactgagatttaattgatcctcttctagggccacgagagagctcatgcatgtcatttcttggaattcagtgttgacttcttctctccagataactgttgcccctggtgctttgctaaagaagtgctgtatgttctctgtgcaggtgcattcctatctggtggaaatgtgatggacagaaagactgctcagatggctctgatgaactggccctttgcccgcagcgcttctgccgactgggacagttccagtgcagtgacggcaactgcaccagcccgcagactttatgcaatgctcaccaaaattgccctgatgggtctgatgaagaccgtcttctttgtggtgtgttgagtcgctttatgcctctttttccgacttctatgttgattgtatacgatcatgattctgtgggtatttcctgaatatcatgaactaaaaaccagttcaaagtcctagaaggaaactcaggctccatcctttttctatttttatgaagtttttttttttttttttttagaaatcttaaggtttttacaaggcaaatggttgaagtagacaataagttgtctctactggtggctcttcaccatgtgctgggcattgaatcccctttgagagctaacattgaggaggaaacgagaggtttccacccccatttttaacagggactctcagttgtcatatttatttatgtttccatttaaaaggcaaaaaaaaaaaaaaaagactgagcacagtggctcatgcctgtaatcccaacagtttgggaggctgaggcaggtcgatcgcttgagcccaggagtccaacaccagcctaggcaacatggcaaaagcctgtctctacaaaaaatacaaaaaattagcctggcatggtggcatgtgcctgtaatcccagctacttgggaggctgcagtagaaaaatagcttgatcctggaggttgaggctgcagtgagccgagatcgtgccactgcactcacttggtctcaagaaaataaataaataatcaaataggcacaaaataaaattcccccaaactaaaaacaacacatcaataacagtaacaaacacaaagtttgaagactattttccagtaggagaatagggacagaggaaggtatgcttaacaggtcagggtgttcagttcttatctcttaagtctgtatgcaataaagagatatttaagaatttgggagacagtaatagtcaaaagaagaagtgctccatgtagtagtactgactgataagtacattaggaaataagtcctctaaaaagaaatcatgatcctgctatccaggattcactgatgtcaattaggagctttcattcttgatgccttccaagctgataaccaaatgtccctgctctcagagaatcaccactgtgactccaatgaatggcagtgcgccaacaaacgttgcatcccagaatcctggcagtgtgacacatttaacgactgtgaggataactcagatgaagacagttcccactgtgccagcaggacctgccggccgggccagtttcggtgtgctaatggccgctgcatcccgcaggcctggaagtgtgatgtggataatgattgtggagaccactcggatgagcccattgaagaatgcagtaagttcctgtgggaggaccaaggcatgaccagagcagggagacacgaggaaacttccatggggactgagagaggacatggagctttctttttcagctgatgggatgctcccccttggcactccctgcaaactctggcactgcaaggcagagtatagctgtgtggcttgcaggtggaaccagactctgtttctgaagtggctaatacctccttttgatacatagaatgtctaaccaaccagaatatgataccaagaacttatattttatatatctactgctttctcacttgagccacagagaaatgttatgaggtagggaaggtgggtgtgaaccaattccattttacagatgaggaaactgaggttcacattaagtggatggttacattactgtttagtgtcagacctaacacttcaacccaggttttttacttcaaaccctgtccttccccaaccccacccacaaagttatactgtaaaacaaatgagtggtgctgacatattgagaaaacttaggactatttttctgctcatggtaaacagatcacatctaaaacagacacatatcgccagaggcggtttgcttggtaacatggtcattgttattcctcagtaccacaacctcaatgtgacaatggaaaggtgctttcttgtaccttcagttctgactttgatgcctcctcccttttcagtgagctctgcccatctctgtgacaacttcacagaattcagctgcaaaacaaattaccgctgcatcccaaagtgggccgtgtgcaatggtgtagatgactgcagggacaacagtgatgagcaaggctgtggtaggaggggccacaggggagtggagggagggacaagaaagtgcacatgtcaagtgccatttattagatgagagatgagagtgtatttcccatgtcatcttttctttgtttacctctgtaaaaaaatggttgattcttctaataacatgttacatttttgtagcattttgcagggttaccaggggtatttaatttgtagcactttaagtcatgctgtcattgaggaagacgttattaagatgttagaaacttgtgtaatttcttccaaatgtagaatccttattcatacttgacaagtttaaattgtttctctaattttataaattggttgaaattggtggaaaggggttagagaaaagacttcgtatctatctctaaaaaggatatttccaaattaggatatttcttatttggggattttcatattctgaatgtctctctgattttccctgttatctattggacatctgtagtctctctggtaacatgggaaagccagataaattaatggaatttgtcaagattagtcatagtctaacttgaaaccaaagcatctggagtatgtgtgttgggtttagttggaagagaagtaaggaagatactaaattcttttaagaacactgagtccaattgactgaagataatatgatcaaaatatttatttattatggcatcattttagcctcccataccaggcctttgttgcaaattacaaaccagataccatttcattctttgcatggtttctaccaatgggaatggatcgagtttcaagtggtaggataggctcagggtagctaaaagagggaatgttgaccatgaatgttgctggcattcctctctttgggagcttcaagagtgagctaatacaattctcagactgtctcacaaggaagccaatactactttgtgcatttctctgccaatggtttatgaagtctttgcaatgactgctttgcagaggagaggacatgccatcctgtgggggatttccgctgtaaaaatcaccactgcatccctcttcgttggcagtgtgatgggcaaaatgactgtggagataactcagatgaggaaaactgtggtgagtgttcacagtcctatggtccttatataccaccagagctgtgatgtttgctttttgtccataattcaactgtctatgtcattgatcctcaatgggtaggatgatatcaagctgtctgatctctttctttctgctggtcagtacatttctactttctcttccactaaagacataagcatctccttctgagatgtttcaaatcaagcttttggaggaaggtatttactgaagaatatcttttatgtgttgaatttatttacatccaacttttttttccaaaagaagttgaggtgacttatgataaaggaaaaatgtaataagataaatagaatagaaatagaaaaccaggaccagagaagtagagggaggaagggtgctaacccagagacactgcttcttaagctctttccccaaaatggccttcataggagaggagagagaacttgtgtttgcattattacccttcctagaatagttgactattttaggagggctaacagttaattaacaggacaggttttagtttctctctcccagtcgaaggtattgactacaaggcattggatagggaggttgaggaaaggaagccaagaggctgagatcatatcaaattagatggtcagaacacactcaatgtgtgttctgaaaacaagcttaatgaagccctgcccagagtgtatatcactgacccatgatatgcgtcaatttctaattgactaatgaaacacattctaactttgtttaccttttggaagaaaaaagtgatcaccacttgcgataagcaatgagagatttaggaagctgactacacctgcaaatatcagttagctaaaaacttatacaaaagggtaatccaattggcattttgtcttttattaataaaagtcaatgttgaatcctataagaggttatctagagtttcacgaaatagaaaaaattaagataaaatcaagctgggcatggtggaacacacctgcagtcccagctacgcaggagcctgagcagggaggattactttagaccaggagttcaaagtcagcctgggcaatgttgaaagatcctgtttcaaaaaaaaaaaaaaaaaaaaaaacagagagagagagcaagagagaaagagagatcagatcacctttggacaaacttcttaataaaggccattctttacagactcaaaattaaggtgaaaggtctagttttggagggtgaatgatttgcccaagcacacctctggggcttgggacacaggagggtgctgggcacccagggcactatggtcagctcacaagatgtctcctgtatgtgattcctggtgcacactcatggccaggtgcctttcctttccagctccccgggagtgcacagagagcgagtttcgatgtgtcaatcagcagtgcattccctcgcgatggatctgtgaccattacaacgactgtggggacaactcagatgaacgggactgtggtaactgtcatttgagaagcttaccatagaattttgtactgtgacagtgtaggggcttcaaattagtgtttataaggcttttagaggaaaattatttttgtatatgtgtaatatgtaaaccttagcataacacagtatcttctgctctgtattttctatgcattattcttaactcatagcagtctagattagtcataattgaggaaaatagcaaggaattttaaacatttaattttaatatcaacacttcttaggagcagattttaatctgcgttagccttgtaaacaaagacattgatcttgctactattccacggaaagtcaccctaaggaatatgcatgtgctcctatgactctcttgtgtagagatcagatcattgacagagtaatcctaaacccaaagtaatttttatagctctttactgatttggtgttgggtcttaggaaaattagaaaacattgaagattggggaattccgatttctgaggaaaagcttaagagctggagattatttaatattagggagctaggtacttccatctctgtatgttgagtggggaaagtgtgagttttgagaatgtattaatttgctaaccacaagttgtgggtttgctgtgagccagtcacagggtgtagataggaatgtgatggagtaaccactatactccaggtacctaatatctgtctgaaaatgacaaggccttctcggaatgacaatcttttctcttcagagatgaggacctgccatcctgaatattttcagtgtacaagtggacattgtgtacacagtgaactgaaatgcgatggatccgctgactgtttggatgcgtctgatgaagctgattgtcgtaagtccctagacacatatgtagtactgcttacctgagagcatggatatgatagtttagacatcagtccgctgccgcttcttagattaaaaggccataagtattgtctgttcagcatgcactgataatgatcagttcacctgagttctaagtcatcataatcatacatttcacaatggccgttcaagtgtacttccttgctattttaaatggagaatatattaagtaatctgtgctaacaaagtatttatatattatcagctactatacaaatcattaattagataaaaaacatttcaggtaaaaaaatattcaagcaacgaatacattagtataaagaacttgggttgggtattcgaacatattgaatttatagcattaaaatttttctcagtcacacgatggagtataaaaatgattaaaacttgaagggggccagcccctccacacctgtaggtatttctcctcaggtgggatgagagactgagaagactgagagagatcaaaatggagtttcttatgtcttccttttctacatagacacagtaactgtctgatctttcttttccctacaaaaactggaaagccaacatgattactcagatttgagtctttatggatcacttgaatcaatgcaaactgtttatacatcattattgctgatccatcaacaataaccatcatccatgataaccatccatgatggttatcgttgatgatgtggttgccaaagagactttataaatgtatgtgggtaaaaccagtcttgacatttgcctgtagagattaagtccagtgctgtccatgccatggatgattcatgccattggaaactgactgggctctgacaactgcccttaagacatagtccgttcaactttcagacaggtcaaggccactatacatcttgatgaataaagaagagcaggctataatggcaagagccaaaggagaaatagcaggaagcttccccaaagtagtcaatttgtataataatttgaatatgtttttttcccccatggcagccacacgctttcctgatggtgcatactgccaggctactatgttcgaatgcaaaaaccatgtttgtatcccgccatattggaaatgtgatggcgatgatgactgtggcgatggttcagatgaagaacttcacctgtgctgtaagagggagagaaacggagtgaatgggagtggtgttgtctgtcaaatctcattgtttcttacgtgtagcatgtgagcctggagagcagttgtacaattgtttaggaatggacacaggatcagcgttggtgttatttcactgggtcttccagcttcagttctctctgtaacctgagaaagttgggaaaacctccatgtttttaaatgtattatggccttagaaaacaatgtctttaagggaaatgttgcttgaaaacctagtatgcataaataaaggcaggtctgttgtggttgaagtctgaggaagggtagggaggaggctgtacctctcctgctgtatcctactttgggtgcccctgaagtaccctctccaaacccctagagcttcctggagcacctttagaaaatgctaagactttcttaatctttacagtcacttccttttaacatggtaattcaaggccatctaattccctcttgctgaatgatgcatatatatatatatatatatatatatattttaaaccctgcttgtttgtgagtctcaattcaggtacatgtcagtagcagaggaggaggggtatttcaaaatcacatgccctggcctcaccctaggcttagacctgatggagcagaatctccaagaatgaagcctgcacatacgtatttttaaaaggcttcttagccttttagtttagtcccctggttgagaactactgattttaatgaagtgaacgtaaatagagtttgttgcagtcattttgctacatgctttgagtcattggaggaactctagggtaatagttctcaaaagtgtcttacctggactaggaatgtcagtgccacttgggaatatgttagaaatgcaaattcatgggatgcaccctatccaaatagaaattaaaaatcaagaccaaaagaagtagaggaaggaaaggcattaactcaaagaccctgctttttgagctctttccccaaagtggccttaattttgtgggaaaattaagggcccagcaatctatacattaacaggcccctcaaatgattctgatgcaaactaaagtgtcaggattttgtgtaagtaaaagcccttaacctaggagacaagacctggagaagcactcctgttggaagttcacgttgcatcttccatcccctttcccagcttcatcactactcatttttagcccagagatttgacttgtgaagatgatatatcttagtattttgtttctcctcagaaaactttaattagtgttcattatatttcacagttgcatcccaacatttttctttacttgttaggaactagccttgttttgctttgaacttcatgaatcttgagacacatcttagacatgtttaactttcaaagaagtccttaggaaatctcttctctccataaggtaaaatgcccatagctagtaaaaataaactttggagagtcagagacacagctacattaaaaggtttccaatactgttttataatattgaacttgcctttcacagcaaataattattgcaatagttctattaacaatacttccaagaatcagcccttagatctgaccctttcccctcaaccaatcttattataagtctctcctcttgatccctgtgtgtgataccaaggcggaaggaaaatcagacagcccaaatcctccatgtgaaagacagaccacatgtgaagaccacatgtatgttgagttcactgcatttgtggtacacgcatagtgaaccatgttccctgtaccaaacaagtaggggacctggggactacccttgagttcctcacatctgtacaggcagcagctagaggtctcactctggacagcaagtgtgtcagggtttgattgtgagatatcgattttaaatgtaagaggtgagggaattcaggaaggaaaatccaacacaatttaaagcttcaataaaagactcatgcggtagagactctatgacaactgccatcaggaggatcaaacaaatggcttcctggctgttaggataagagtccatgtactgccagtctgtccagcctcacagccaccattgtgctccacgatccatgctccagccaccgaggcctttattcaggtccagagacctgccatcctcctctctgactcagaatctatgggaagtttcttccaagccttcctctccctaacttaagtcagatcaccccagtagatgtttcatagttgtaattgaatggttaatttgaaaagcctgtttctctactagaatgaaagttccatgaggacaaggactgtgtctttcttgtttcccatcatatctactgcctagcacagtgccttggtgtgtactatacatgtaaggtgtatctgctgattgattaatcaaatgagtaaatgagtgcatgaatgaagcaagcctggtgctgacactggagtattttagatattgacacttagattctactgttaacttgtaatttcatttttctatctttcctttcagtggatgttccctgtaattcaccaaaccgtttccggtgtgacaacaatcgctgcatttatagtcatgaggtgtgcaatggtgtggatgactgtggagatggaactgatgagacagaggagcactgtaagcaaaagtcaaaagggagaaggaaaaaggaaggaccccaagtggtctgcagtttggaaaatgtgcctctgggatttcagtttgttctatagagttgtgcccatgactgcagatctctgctgacataattgtttacaagaccatgcaaacacatgcattgcttacatgtaaccctgcctgtttcttcctgtctcatttgagcatgatgctggcaaatccattaatttttcagtctttgtttgaacatttaataagccttcccctcctcttttctcataagaaactgagaacaaacactaaatactgattgagccacacctcgcaaattaatagtttattttttcaaatatgagatttgatcatccttcagccttcaggagttgctaattgctaatctaggcaggtgcccagctgcagagatcatgtgaagcaaggcagcactggtgttaacagagcttatctaatatccttgttgaaaatgaaagttcatttcccagaagagaaaagtgatagattagtttaagatagaagttccaaactggctgcatttaacaatcgaggcattgaaatagctgtactttttctgcactttcaaaatgttttaaaatctatccattgaaggggaaagttgaccaattttctgggcaatttaatttgcctagaaaatgtcagtgaggaaaatcatttccccgactccaattatttttttccccaaaaagacattatctgggaaaattaagataaatgcctgatttctccactttctatttcttgtattgatgtggtcttagaacgctttgccacagaatgcttacttccagcccccatcccagaggagactgtcagggaggactttgacactaccacaaccttcaagttcgtattcctgttatcattattactggcagagatagcattaatacattatagcattaatatgtttatttgaggcatagcgcaaaagcatgaaagcccagaaataaaatatttttaaagaatttgagcagatttcccccttccccaaaatctctttccatttcccctgctaaaaatgccattttttaaaaaatggagcaagacatttgtagcacatggtcaaatcccagagtggaaaaaagaatccataaacttctattcttttcaaggaacagggttttagtctgggagaccactaccagtcaccacaggaagcaacctgcaacatttcaatggcttaaaatggcaaaggttcatttcttgctcatgtaaagtttaatgacagtcaagcaaccctcctccatcccataattatgccatcagggacacattcaaggttgccaaggcaggagaagatcaacatggtggaggcacacagcttcttaacttcctgagcctggaaatgacagacatcctcttgctcatagtccattggtcagaaccagtcacgtggccctgctctaactgtaagggagactggaaaatgcaagaatatgcattctcatacaatttacccttgtgtcactaaatactcctttatgattttcttctcacacacagaacacccttaaccccttcccaagggacatagctcatagtccattccgaaactgaaatccaggacctctgggtaatgggcagtagccactcaatcagttccagatgtggttcctcttggttgggagacccataaactaataaacaatcagtgccttctgtgcctgataggtattggcggaacaggggcaacacaatagaaataaacactcccattggaaagaaagaattggagactcatggccatcaccaatgtatagcaattctgaagtcccactgggctgggatgacacatgttagcacaggacagtcctgattcatgtctgctgccccagtggaattatgaatagcaccaccttcactttcaaaagcacactggcttggaaaggagagtaaattacatggccactctgggcagacattgtaaaggtcccttctttggggagtggagggtatttattgattagctcatgcctctgctctgggaggagctcctgtgttaaaatgtctctcactgtttctgactctaccctttgagagttttttcttgtctattttcctctgcaaatgaagagggaaagggaaatatgctaccattagggccagcacggcagctttctcaccccacttcttgcttatagaaggtcgggagcccaggagttgttttttgtttttttttccaagtctcaaacagtcatagtattttggtttatttggttatatctttctctcagaaacataccaggcatttgatctgtttgcttctagcctgttctaaaagttagtaacctgacctagtgctcttttggagacatagttctcaaatctgcttttttctttgctttctttccttcatagagttctgtctgaacttattgtcacttacatccaatccatgtagaaaaatagatgggcagtcattttatccaatgaggaggttttattgggccttcgtgtctcacagccttttaaacttcagacttttactgtttgggatgtagatacaggtggcttttctcacacagcaaatttctgggctttattttatttctgcttgtaaggtaaccagttcttcccttaggttctctctttcttatactatcttgccaaactcaggaatggcaatcaatgcacattactaacattctatcttctaacctcgctccatgattgacaggttcagtaagcatgtgatctgccttccagtttttccgaggtgatagctttatcaaatgctttgactttgcataacatgatctccacctttcctgcctccactatcagtgtccttgttgcttgcctcctgactgttaatccaatgccaaatattttatgtttttattatggcagtactctacttccctcatcactctatgttattcggagtaattaatactagctgttgcaaccagcatatcctgaaatctcaggggtgtaacataatgaagccttattgagcactcataaaggccaacgctggtttcacagccctcctgcatcttgcagctgtgctgcctggaacacatggcttccaaggttgctgcagcagcacaggagacacggaggaggcacgtgtgcttttcattgcttcagcccagtagtgacacatggcacctccaactgacagtacgttggctagaactggtcacatggtcctaacccagctgcaagggagactgggaaatgtagggaagcacttgtttatttggtaagcacaaactgtctctgtcaaagaaggaagtatcttgcttcataaaagaaaaagttttgattttaacttgtttttacattgcaggtagaaaaccgacccctaaaccttgtacagaatatgaatataagtgtggcaatgggcattgcattccacatgacaatgtgtgtgatgatgccgatgactgtggtgactggtccgatgaactgggttgcagtaagtaaacacttgtttttatagttcattgtagtaactcaggtttacctaattaaaacatgcaataacataatgtagacactgaccacattttctccttaatgtactttttgcttgaattccagtcaagcccatagctagctgtgactgagtgcttatcctagaccagacattgtgtcaaacattctacatgcctggtagcaatcttatgagttagatgttattatctctttcttatgtacaaatgagcaacgaacttagaggttaaacgaattggccaggtcttactgtcattaagaggttgactcaggatttgaactctggtctgtttcactgcagagcaagtcctcttcccagtccactgggtgcctcttagcactttaaggctacatattttgtttattagtctgcacattatggtgggaggatgggggagggatagcattaggagaaatacctaatgtaaatgatgagttaatgggtgcagcaagccaacatggcacatgcatacatatgtaacaaacctgcacgttgtgcacatgtaccctggaacttaaagtatatacatgaaaaaaatcttaagccaaatgcagtatccttggtacctgaaaatccttctgagggtgtttgatcaagaagggaacgccacaggggacctgggaagggacatttatttttatttttaaagttgagggagtggctggatgcagtggctcatgcctgtaatcccaacactttgggaggccgaggcagacaaatctcttgagcccaggagttcaggaacagcctgggcagcatggcgaaactccgtcttaacaaaatacacaaaaatttgctgggtgtagtggtgtgcacctctagtcccagatactcaagaggatgaggtggaaggatggcttgagtgcaggtaggggctgcagtgagctgtgattgtgccactgtactccagcctgggcaataaagcaagaccttgtctcaaaacaaacaaacaaacaaacaatcaaacaaaaaagaaagtagagggagcactttgtgtaggaaaaggatgatgaacataaccaaggaacaattctagctcaatattttgatggaaatgttaaaatgacatgttactaagtcacacctttgtagtccatttatgactcataaagtgctttcacatacattatttaatgtgttactcaagttagccccattgagttgctgttattgtctatgtaataaagctcagagagcttaagtaacttccttgtggtcacacagaatgtcagaggcagaattggagcagtcatgtaagtccaggttaggagggctggcctctggatccctgccactagctgtgccactttgggcacatactgacctctccagtctttggtttcctcacaggaaaaaggaggcccttctccaaactctaggagcctgtgacttagtcatcctagtgagctccatgtgctttcaacttcttgggctctaattgactttttcctgaggcatccaaaggattttctatcaatttttctcctgcgtgagttacgaagaggtatgaataaccagccatattgagttggcttgccatttatttcacatacgttttctgtgggacttggagttattgacagaatgaagtgacttgataaaatattttaaaagcctgaacatgatagaatttgcaaaactgaatggcaggtttgggttctgactcccagagactgataggtggcttaaaatagactacagtactttcttttcaaatggcatttaattagtagcaggtttttttttttttaaggaaataagtagcacaaacaattcgggtatggaagcagcttctcttttcagatattaagtgaatatgtgacatggaattcagtcttatttctctggactaataatttgaggcatagaattcttttttaatatactagttcttgggtgctgttaatttatttgcctttgtcttttttctccttcctcctcttctccttcttcttcttccttctcctcctcctccttcatcttcttcttctccaaaagcatcactgaagtgtttaagacacattgttcgattttttaaaattgaaggtatacaacatgacattttgatgtacttatatatagtgatgtgttataatcaagcaaattaacatatccgttatctcacatagttatctttaaaaaaattatttttgtggtaagagcacctaaagtctactgtcttggcaaatttttgggaatgaaaatacattagcattttttctagcaccattcaggtataaaggaaagaaattaacctcaggttgcaaatattatttatgtgatcataaagatagattgacttgctgtttctctggtagttcttattccttcttcataaaatggaaagtagggtatttcttttataaatagagtgccatatgtttgggtttggggaaatcagttatacgggttaaaatggtgatcattttcaaatgaaaacaatgataagaaagccctcacattttaggaagaatcctacagtgtcgtgtggtttctgctcttgttaaggactcttgcttcacaaaagggtgactcatttagtggatcacttggtccagaaattcttgactcctgggacccctaatccctttatagatttcagagctaggaggaaattacaaagtctagtgatgcatgtgagacccatggaggttatgtgactggctcaatgatatccaagttaataaacataggtcagattcatttagcaatgtagaggggatatcactgctaatctcacagaaattcaaaggacagtaaggaaatactatgacaaattttatggcaataaatcaaacaacttacgtgaagtgaataaattcttagaaagacacaaaactctgaaaatggctcatgaaaaaaatagaaaatctaaatagatgttttaacaatgtacagttgttaagagctcctataataaaggctaggatctttattataagactttcatgcatacagctttgaagtctgcactccaagggcagcattccattgaatttcattgtactttattttggttatttttctttttgaaacccagtgttcttaatgtactcagaccacatatagtgatatgatcatttaccctaaaggactctgagagtgattaagttcacctcattgcatactatggaaaacagatagatataaatctattttgatttgaaagaattaaatcaggagataccacagtctctttggctaaaatactcagaagcctatgaccaggagactttttatttgagaggtagatgaagcttaaatccttaatggagataaccactgcctctctttcccccattatcactcactatctatgttcatcttcgccagtttttctgtaagacctaggtttggggatagatggaggataaaagaagcaaactgataagaatgacaaggatgaaagccagatggcttggatagatattggtagagacaagatcttggggcaatgatgaacaatgaagtgttagggtaaagtgtgagctgttaaaagtctgtcttggaacatctggatcagaataacagggatcatttatatgggctctacaaaaataaactgtgttttttttgttttttttttactgtgaaagttcaataacaatcaaaagtaaaaatcatttgaatcccatcactaaaagagaactaacctttaaagtttggtgtacttttgctatcttttttttgcatatgtatatgtaagaaatatttcttagtattttgaaaaattaagaaatattctatactaaatggagtttttcagtctttttttcaatttattataggtatttcccatgtcaaagtatcatttgaaactataaattttaataatcacatagcaattcatcatgtagataatcataacttattgcttctaagatgtatttttttatattttaacatctttgaaaccaagatatatatcttacaattaataacatgtcagcgtaagttccagacatattcaattttagtgttacataaagtaatggtgcatcattaatgtcttagtttttttatactataacataatttattccctatcactgaacatacattcaagttgtttacaaacaaatgttcttattgtaaatatttttataatccttaaacgtaaattatactgcatattccttctcaagggaaaattcattaacatggaataactgggtaaaagagtatgaatatttttaaagtccttggtgcatacatacatagtacaaaatttctttccttgtgtactaatttatggctctaagagcagttgtatgatttagaactctatgtattttactgcaccctggtcaacacttgatatacatgtatatatttgtgtgtgtgtgtgtgtgtgtgtgtgtgtgtgtgtgtatataatcaattggtcaatgttagggaaattatagtcttcttaaaattttataatttcctcctatttgtaactttgttctaacctatctgtatccatgtcttttatttatttatttatttatttatttatttatttatttatttctatctgttatctatctatcgatctatcatctatctctctatctatctattgatctatctatttgcaataggattaaagatagtagagcaggtggtaatagctgtagagtgtcaggcttcatagttgtgcagtccagaattggatgctctgaggataagcctaggagtgctgcatataatgtgaaaattgcctcaaagttttagcattatatgcatttatctaaatggtattcagatcacgatcagaaataggaatcctgactcccccagtgccctctgtcctctccaaggcttatggaaaggggttatctcaagatgtcctatagttggttacgagtaggtgcttcttttgatacaccacttgactgttatttgtggctgatctggtttgtaatgctgggattttgtttttcagataaaggaaaagaaagaacatgtgctgaaaatatatgcgagcaaaattgtacccaattaaatgaaggaggatttatctgctcctgtacagctgggttcgaaaccaatgtttttgacagaacctcctgtctaggtagagtatattttttccaattcctgtttaggtgaactttacatctaaggttctccacccactcccctttgttaaataaatcactatttaattcccttaatggtaccatactcatggtttcatggttctaggtcattaaactactcaagaattgctttcccccacctgcatgcatgctatctgaccagtgcctacctgagtgcttgtcagatactgtgtgctcagtagagtctgtggaattgatatgaatgatgaaggccttggtgatgatggctgcttattgcaccagtgtgtgaaatcaaagttaatttaaaaaacaaactaggcttactttcttcattgtaagtcaaacaaccaacacgtatttattatacacctacttacgccagacatagatgagttgtaaggtatggagtcagaaggtagcttatcaagatggtgagtgatgagcatgattttaggtgccttttagtatttgaatttactgtttctaattcatgatatgtcatagtcagaagattgtaagagttccttttggacttgaagcttaagaactcaattgaaaaactaaatcaatgactcctgttcctgaagctggttagcagaagtgaagagacaccgaacaatacaacacaacatatgccttctgaaagggaaaatgtgctctgctattgcagagtcatagagtttaaatcctgtctccattgcttatcagctttgggactgtgggcttaatcgtccatacctcttaaagtcttttggcaagactaaacgaggaaaatatttgaaaagcatgtgaaacagtatctgaaacttagtgtttcacaaatgtttgtatcattgcttattttcatctgtacccttctcggtcctcattgctggtgaatatgggtttaaacagaagcaagatctctaaggaatggatgggaacagatgttgcgtatttggttttattttgcctacagatatcaatgaatgtgaacaatttgggacttgtccccagcactgcagaaataccaaaggaagttatgagtgtgtctgtgctgatggcttcacgtctatgagtgaccgccctggaaaacgatgtgcagctgagggtatgatgggttcatgttgggattaattgacttttggggaaataaatactgctaagtacactatacgatgaaagaaacttcagcttctcatagtttttcttttctttctttttttttaaactcgccagctgcttctcttccaacacctctttagtcgctccttctctctcctcccctgccagcttaaaacaatagctacatcccccaacaaatatgtagcaattaaaacaagagccaggtgttacttattataatggatttagcctcttgtctaccttgataaaaacttcaaaaagtggacaagatgtcatctttcttaaggctcaaacaataacaaaagcttgcctatgggatggtcatcaataaaaggaaggtaacaaggccctctagctcccactccactgagaataagatttgaggcccagtagtccaagagggctcgtgaattggggcaaatcaaggacatatcccttttgtattgttcatggactactgatcacaggcagaaaggagtctggcacagtcataacttcaatcatgagttttacgttttaggttgatgccagtgtctgacaatcgggcctaataaaacagagaaagaatgtaagtcagatgtattatactccaaattccagaggcctgatctaaatcatcatatcctagttaagaggcatgggtctttattttgaatttgaagtttgtactagagtttaaggaacttgataagaaaatagcactttattttgtaaattaagagtaaatggccaaaatggctgttcaatttcttcatacaaattgagcttttaaagcatacatttgactagcatacttacatattttaccctcaaaacactgttgacagtgaatgaaaactagagtgaaagcatttgaacagttggtctggtaattaagcagcaattttttaaatgtttaaatcctttaactaaggacatgactgaaacaaattggaatattcatataaaacataatgtcaagatagaggaaatatataaaatgaacttttaaaagttacttaaattggattcagttgacattatgcaagtaaattaaacttaacaaattctagacagtgcatcttgggatgagtcaccattaagtagctgctttaggttaaaaaaattaaatcaaggacaagctaggtttattttgtcattagctaggagctaaattgggtcatagagctgattacctgctaaaaagaatcataaaatctgtcaggaaacagtaaggaatgagacttttctggtaaacttttagtaagactataaaagtatttcttctgtgagatagaatgtctgcagtctagtctgttttgatgtcagtaaataaaaacaattcagtgaaaatgaggactgtacgtagggttctcagtctagctttgttccatactaccactgagtacaaagaataaagaactgataatgtccctaagagacatattagctttccacttgaagtggagaatgtcaagtcacggattttgtaacccagttggagagtcagctttattgattaacagagatagtcagattcctataaaaactcatgttctttaaaaaggggacaggtacatactgtgcattttatatcctactttatataggaaagtataattcaaacagataaagtagccctttgtttgtttacaggtagctctcctttgttgctactgcctgacaatgtccgaattcgaaaatataatctctcatctgagaggttctcagagtatcttcaagatgaggaatatatccaagctgttgattatgattgggatcccaaggacataggcctcagtgagtataaactttggcatctttcattgatattaagtgactttatagaattttaaggtgttgacttttaaggaatttattgtttaatgagtgaattttgttgcattagtggaggaggaaactcttccaatccagcatgctcctgatgccttagcgtggccttgaatcccagccaagctttcctgatttctttctaaaactcctccgatcactggggtttatcctttctggaccatctcacatcttcttgtattttgaaatttccttgtccttgatactgcagatcttgttccttcctaccattgtacaccttgaaaatttctactcagacctcaaagacccagtttaatgtcaccacctctgtgacaacttctatcactccttctggcagagttctatgattgctcaccatgaatctatgtcattttatggcacatgttactctaagttatatagctagttgaccacataatatctttctatcctctagacatctgctttttggggacaaagactgaatctaatttatctctaaatgcctagcagctgacccaacatctagtacactctatgtggtaggtgatcaaaaaatttagttgaatgaaggaaaaagatgaataatgcttattgttgaatctctcatggctctatctggtgttgggggagatgacagtagggtaggagtcagaaaacttgtcttctgtgcctgtaaacttatcttttatgccagtctcccttatctactagctttgtgatcctaaataattgtaacgattctctgaatctcaattttttttctacaaaatcaaagtagtaatcttgttctgtctgcttacctctgagagttgtttggaagattgaatgagatagtagatatgaaaggctttgaaaactatcaataactataccaatgtaggatttattattggtgtattttcacacatattcatgcaatacaatacacttttcaagaatggtgcatacctaggaaagcagcaggtgtccagtgcatccctctacagtcacagtcttcctatgcttttaacatgcctgctgtccaccatccttctgtctgtatataaaataggacttctcgttgacatggcttctttattgcctctgatcttgagtatgctttcaaattctcaacagcctgccctggtttatctctatacattctgttttggaaactagaacttgatcctaataagagtaaataagcactttgttgaaatacgtttaaatgaatcacttttaaatagagatgactaaatctcactaagttctcagttgaagcatttgtagctcatagctcaagtttgataggttttaaagtttgattatactgatgtcattgaattattcatattataacaacagtgaggagggaggtagagatgtcaataaacgaacagtacttcacctgattagacccctgttcttcctttacttgatgctcttgacatgaaactgacctgtgtgtcttcctctgtaggtgttgtgtattacactgtgcgaggggagggctctaggtttggtgctatcaaacgtgcctacatccccaactttgaatccggccgcaataatcttgtgcaggaagttgacctgaaactgaaatacgtaatgcagccagatggaatagcagtggactgggttggaaggtaaatttgccatacattccccccttacctgttctgttttcctggttagagttctctactgcactccatgggccatgagtgagtctgggcctggatatgagtacactcagccatgggtgcagctgggcagtggttgggcttgctgaagccccagcaactacctccacttaccccagcatgtcatggagacattatcatatcctgtattctttgtgggccatgaaaaaaattgggaaagcacccaggtcaatatctggatatagatattatatctaggatataatagtgaatattatatttactataagtgaatagcattcttgccaacagagttctggattccaaaattaactttcagtatggcagcactgctcattttgtgaagaaatgggacagcctcacaattctcccagcaaagcagttgagatgaaactttttttctatggtagttatcttggggacgaacaatccacatcttgtgtttttagcaggcttctagttaaaacagattggaaatttgactaaagaagtctttggaattgagttaatagaggtgtcagtctcttctgttcttctagaccttctagtggcccagggaccagagccacacattttggatggtttttaagtagaacttaagtagggttatcatcaggtaggtgtgtgaggtacaaatggatgtggagaagttagtaagctcattcttcaaggaagaggtttgcactgacttacattggtgggaaaatgattccttgaaaatgaaccaataatgcaaacatgtttgagggggaaggttcaggagacactactctcctggagaatggatagttattttcagtgtaaattctttttcaccttttaaaaaatgtggctggtgttcctggaagagcatctttgaagaagctaattgggtcccgctgtgcctgcaggctaacaggagactcattttagcattttcagtcaagaaacagggccttagagtactgttgctagagtcaggaactcaaaactccagacattaacactctcttctgaaaaccaaccagggaatggcagatctgtcttcttgtttgaagttttacctctttctcagccttaatgaataagagaattaagaaagtggtggaactttttctgcttgtaagagactgagacctgcagcctcagaagtggaaataaggcaggacagtcttgccgagtttgttattttaaaaggctgtttccactcatctttgagctgacaccaggttcctattgattctaacggggctctttcctgaggaggaaacagactcatgggcagtcagagttaaggcaccagccccaccgtgccttatgacttctacctagaagcccatgtctcataataatgccagtcagaggccagtctgactgctgtgtctatggtagttatcttggggacgagcaatccacatcttgtgtatttagcaggcttgtagttaaaacagattggaaatttgactttcctgtttagtctttggaattgagttaattccattgtggatcctgcgtgattcaggtgctttggctgttgggcaggagtcccctcaattccttactcttccaagtgtaacctgccaaacatgtccccttggctgtagttcccccaagagagggggactatggtctgatgataggtatctgagcagctgtctcaccagccaaacgaaatgctctcatcttcaaacctcttacccagtaatgattactctaggctttgcagttgtttaactttgtccctctgaattcaggcatatttactggtcagatgtcaagaataaacgcattgaggtggctaaacttgatggaaggtacagaaagtggctgatttccactgacctggaccaaccagctgctattgctgtgaatcccaaactagggtaagtacttggagaagtcttcaacatctagatatttctccctggattctcatcaaattccatgtttcttataatttttttttcctagtttaactgaaattgtccttcaagtttttgggagtagcgtctatgactgtttcaagaattataacatgcccttgagatcatatagaaccaaccatttctgatggggaaattcctttagaacacatctgagaatctttctagttacatggattccttgccaaatcagagctctgaactctaaagttctttgtggatataactgttttaagtgaaggtttcaacagaattgtttttcctttcatttggatgttttaaagtaactcattcattgaaatccagctagggatttggtcatatttcatttaaaaattaaacatttatatccaaaatatataaatatttaaaatgacacatgtataaatatatattatccatttgtataaatattccaatttgcaatttatctataaatcatctcagtgtaaatgagaacaagttttgttatttttctctacatttcaagacatttatttgaataatcactaagctgaaatgacttggtatttacatattagcttagcttcagaatagtgacactttaaaaaagttttttgaatgaccccaaataattttcctacttgggcaggaccagtctagccctctgtagatatgccagtatttgtaggtagaaccctatgagctgttattactttaattctgttatatttcatatgttaaatcataccctcagaaactcagcaatgaaatatgaaaaatacttgactgatgagattaacctgtagtgaggacttgtcctcagcattagtcattgctgcttatatcttatctacacaatatattaggagcaaagagatgcagtgtgttctatggtgtgaatgatgtgactgtttccagtgtgccgtttaattttttcctctgtaactaatgtttaaattcatctgatattattatcatactctgatatccctccactgtttttttcatagaaattcttttttttttttaatttttttggagatggagtgttgctctgttgcccaggctggagtgcagtggcatgatctcggctcactgcaacctctgtctccaagattcaagtgattctcctgcctcagcctcctggcagctgggattataggcacccaccaccacactgggctaatttttgtattttcagtagagacagggtttcaccatgttgggcagcctggtcttgaactcctgacctcaggtgatccatctgcctcgccctcccagtgtgctgggattacaggtgtgagccaccacacctggccagaaattcttattttagtctttgtaattcctttctctctggaatggctcagtgtagtcctgtgagggataggaagtaagaaaggagtgagaaagggtttcactgcctaaggcctgcagacccgacctacaacctcctcatttcatgatccatttgaaaggctcatcatccataagttttataagcataagcatatatgatgtgttgaaccttcttacagcttctgcggtataagatctgccagtgggtccaaaggatgatgaagatgataactactgataataccagcaacagcaatgagaagtgccaacatttattctattcttgctgtgtgccagctactctgctaagtgtcctacatatataaactcatttgaattgtacaaaggatctataaattagtcataggtttctatcccttatttacatagatgggtaaaataacaccatgctccttcagacagcaactgttgactataatataagatacaaagggagaattgtcatgaggacactgctgaaaaacactgtgatagttctcctaccttacaagggttcagggaagctctatggagaaagtagcactgaactgaatgttgaaggttgggatccactggtagtataaccagtgataaagtatgtgacatgtgaggtcaatgtgggtgagagtgagaagggccacttcccagagaaagtgggactgacatagaacctagatggatgtcttgggtactgataggcaaaggagccaggccggctgttcagaagctcaggcaatagcataaacgaagtcatggaggaaacaaaaatcattctgtgtaccttttgtgtgttttttccattccattccctacgttttgttttttttagttttgagtatttaatactttttaatttaaattaaattgaattaattaatttacttatatagacagggtcttgctctgtcacccagactggagtgcagtggcatgatcatagctcactgcagccttgaactcctgggctcaagcagtcccctgcctcagccttctacttgcacaccaccatgcctggcttattatctttaagaaaacagcttatataattcacatatggtatgtatggtatgatacaacttacccatttaaagtgtacaattcactggcttttggtatatgcagagttgtgtatccatcatcataatcggttttaaagcattttcatcaccctacaaagaaaccctgttcctctgagccaccattttcctgccctcagtacctgctaatctgctctctgtctctatagatttgcctattctggacatttcctacaaatggaatcctacagtatgtggttctttgtgactagcttctttcacatgtgtgtcctttttaatgaaaaccaaacaaggtggtatttaccagttgttgagactttaaaggcccctggctgcattttttccagagcccagtttgtctaaaatccacacattcgtcagtagaatttaaaacttggcctatgcctgatgactggtttagactacaggctgcaaagcagcggctggtgggccaaatatggcccataggacatatttggctgggacaacacagagctttaagatttttttttttttaacatagtgctgacatttaaaatttaagaaaagaaagaaaacctgtatttcttgctttggaaatcagaggagcggattacactgggtaggtctgccttcctgggcactgacaggagctcttacacagggtcttgctctccgcatcacttgatatttacaaccgggatctctcctcattcatcttacatacctgttcctctccaggtatttgaaatcatgcaatccctggtctaggtaattcaatgtgagatcatctttgcttacatagacccttgctctacaattaattattaattggatgcaaaagacatatttaaaaagagttgctgggtgtggtggctcactcctgtaatcccaacactttgggaggctgaagtggggggattgcttgagtccaggagttcaagaccagcctgggcagcactggtcaaaccacgtctctactaaaaacacaaaaaactagccaggcatggtggcacatgcctgtagtcctagctactcaggaggctgagatgagaggatcgcttgagcccaggagtgtagtgagctatgattatgtcgctgcattccagcctgggcaacagagtagctccatgaagatagaaatctttgtatgttttgttctctgatagatcccaaacacagaacagtgcctcttacacagtaggccttcaataatatttcttgaagagtgaacagctttcataatacagctttcataatgcattttaaagggtctgaatatccatccttcggccaatttctattaaggaggtgcagttttcaagaaggataaatcatatgtgctcttgcgcccctatttttgctccccatcttctgtaaaatataaaactggtgtcactgagcacccaggtccctgagataaacagttggtttccctgtaggtaatgccctgtgctctgctgtagtggagaagtcttaccaggtgagatgctacagtgaagaaatcttctgttataggcttatgttctggactgactggggaaaggaacctaaaatcgagtctgcctggatgaatggagaggaccgcaacatcctggttttcgaggaccttggttggccaactggcctttctatcgattatttgaacaatgaccgaatctactggagtgacttcaaggaggacgttattgaaaccataaaatatgatgggactgataggagagtcattgcaaaggaaggttagaaattagttagaaagtaatatattaaattaataattaacatatttctaatgtctttgcctgttttctcaagaaggagccctgctcttaggaaatggcttatatagttttttagataccacccctccacccccaccaactcccacctgctgaattaaatgcagatgagttcattagcaataattaaatccttttcgtcctttttacacaactttaaaaaaaaatgcttctcagcagaagatattgaaataactgagtttcctgttaggttgccccagtagaggtggtttcatgtgtaccaatgttaattcatgtctaaccgcttctggacacattcattttcactttactagattgcccagtatgcacaactgtaaatatctaggagatgaacattttttgttgttgttgttcagactctgcagaattgcaatgacccagcacatatcacatttttcctatttggtcagatagatgtcttatgttcaaaagaaaacataaaatcttgccatttaaattgttttccaaaaatgcagtaaaatcagtaacttgaaagtgagctagggccctgtgattggtgtcgggtggtatacatcaatgtggtttaatttctatcttcttgacctcctaatgcagcacactttcacagtcccatgtagctaaagtcagcctgaatattcccagagcttcaaggcattgtatgagggaataattcaagcagaatgacatcagatctagaagtggcggtagggtgtagtgggtattttcttttcaataaccttctgttttgtttttcccctgtgggtaagcagcaatgaacccttacagcctggacatctttgaagaccagttatactggatatctaaggaaaagggagaagtatggaaacaaaataaatttgggcaaggaaagaaagagaaaacgctggtagtgaacccttggctcactcaagttcgaatctttcatcaactcagatacaataagtcaggtaatcaccaactttggtataagatgctcctcattacttggaaatcttatttcaaaataatggctatattgctggaagatggcagtagataacaacaagctaatctcttggtgcatgaaaggggtatatgtgtatgtacgtttgctgggggagaggaacgttttaaccattttcaccaaagaaagataaaattggtggtcaaatgaaattatgcaaaccatcagcaggtaagtaaaaatattagccctcatcattgtttggagtgatggatatgtacttctaggccacagaatccagcagacatcagtcccctgctaaatgtgagttgggttaacaagtcacaaaatgggtttcataggcatcagaaatcttatccttcccattgcaaggctaggctagtcaggtcaacctgagatatgtaggtcttagtttaaaatggccagtcatgtgcattcctacccgctcccctctgtctcactttcccacttctgggccctgcttcctcaggttacctgtgcgctaatttatccttcagcagtgtgtggagcaagatgaaaggcaaagggaagtgaggaaaggaaatagccttttactaagttcttatgtcaaattctctcttcagtgttaattcagccatctattacttcaattaccttataaagacctcccaaaccttataaagacattttattctcatctcaaataaagaaactgaggccgagacagatttagtaacttgtgtgcctaagtcacataacaaatgggtgagttttaatctcagaaatgaaataatttttaggttcaattctatccaacccaaaactcagcatcttgctgtattggcccagtgttcagtatgccaaagtcccaggttgaatgctatggatatgtggcctttgacaagttactcccttcctgtccccatatgtgagtcatgggtggagtctggggttgtcttgagtctgctgatattttgagaccttgatcagccttgaaaaattgcaactcaaagctgagactcccatgagatgacaggggtggcaaatgccttttctagggcatggcttccttgttttggaagtatatcaccaaaacactccagaatactccagaccctaccaatagaatagcttttgtgtcctaagtgcccttgcggctctcacacttggcaattttaaaggtaggagaggaaggcacagtacacctggaaaggctatctcccctccctaccgcctctggaccctgaggagaaggcagaggaaagtctggaggctgcccctgaaggaaaagcatctccctccggcagctgatgctcagggaaggcggctcctttggaaagtgctggtggagtgggggtgggggtgggggtggggatggggagtacagccccagcccagcctgtttgaaccaagagttctgaaagttgagcatgcctcagaattatctggagagcttgttaaatatagattcgtgggccccatctgttgcacttctgatgcaatatgcctgaggtggcctaagaatttgcatttctagttctcctgtgacgttgatgctgctggttcagtgaccacattttgagaaccgctgctccagtcccttgctactcagagtgtgggccatgggccaggagtcttgggatccttatgggagctggctagaaatgcagtctctcaggcccaccccagaccttctgaatcagaatctgcattttagcaagattccccaggtgatggatagcacattcaagtttgaaaatctccactctggagggccgacgaaatggtaatgagacagatattgatggaggcttttggaagatgtgttactaatttatagctatgctttgtctgtggttacatcttgaatgacagacaatcaggatcacagaatgttagtctgagaaggaatgtaaagattatccactccagtacaacccttggataaatcataatacatgctaaggtagaattaataaggctctagacttacctagggagcttttaatggtaatacttgaactctaccccagaccaattcaaatctgaatctctgtgaatgggcatcaataggtttttttgtttgtttgttttttgtttttgagacggaatcttgctctgtcgccctggctggagtgcagtggtgcaatctcggctcactgcaagctccgcctcctgggttcacaccattctcctgcctcagcctcctgagtacctgggactacaggtgcccgccaccacgcccagctaattttttttttgtatttttagtagagacgaggtttcactgtgttagccaggatggtctcgatctcctgacctcgtgatccgcccaaagcggcctcccaaagtgctgggattacaggtgtgagccaccgcgcctggcctggcatcaatagttttgaatagctcccaggtgattatgaggaaccattgctctaaattcccttttcttgcaattaaggtaactgaaacccagaagaaatgtctccttggagggttggggtggaaatcacatccagtatactttggatagaccatatgttatgatctgtccagttttgggtagtgacaaatcttggtataatatgtggatctcactggtcttttgaaccatctcaagttgtttagcactgagtagattttgaggttaggcagtgaaccagatacccaccttccaaacctctcagggcagcagagaagataagtgatgccaatagaaaatgtgagtggtacagaaattggctggagggcccagagagggactatcccactgcagtgtggtggcagagatgatagtgtaaatgagggtgagtggccagctgacacgtggacgagaggtattgagaggatgcctaggctctgctgtcacctggcagagccacttccagttgctgggtattcaggttattcattctgtcaggacctaactgctgttctcacccgctttccagtgcccaacctttgcaaacagatctgcagccacctctgccttctgagacctggaggatacagctgtgcctgtccccaaggctccagctttatagaggggagcaccactgagtgtgatgcaggtaggagcactgcccaagcagctatgggggcctgggagcactcctctgctgccttcaggagtcagaagaatccctgtatgctgggtcctttgcagcagagtggggatggctggaaggagggttaagggatgtgggaggtatgaacagagttgagtgggacttagggggcaaacagaactgtgttccagtgactgctgagaattatttgctaagatctgcagaaatatagatccagtgtccctaaatctattgctgtgttgttttgtaaagacattttgaagagtgagtttttataagacctctacctcaagctggattcccattgccccagaatccactcaaccttaattgtagctcctcagggtagagaaccatgtccagttttgacaactgaaaaagggctaccttttgaaaagtgctttatattatcaggagacgaagaccagcatgaggaagctgtggtttaattctagtcccaaacgctgtgggtgatctattcttggcaagactttttttcaatgactcttttaaggagttaataagccggatgggggcgaataactagtgtccctaactagcatccggtgctggaaaagcctgtgaaaaagtcgtcctgcaattcactagcggcccattttatggctcacatccttggggccttcccccagttttagctgatggggaaaggaaaacgcttaaccaccttctaccaccagggggagcaggcagttagaccaggaaccaccctttgactcattccaaacaggctgaggagttggcaggtttagggaatgaatccagggagaaaaaactgtttcttgtcacccctcttcccctactcttgcactcatcccaacgctactggggaaatattggtaggaatccaatatttcgagccatatttggaacaaaatgacaatttcaggctttgagatttgttccatgctgtggatagattgttttgccacttactgcaatttcacatcgtgggagcagtgtggtcctggttgtcacctcatctactacttttctcatttaaactttttgccaagtggattttattaagattcttgttttaaagaactttaaccgaagtaagcacacgaatgatggcagtcattccatatagggcctcggtttggtataataattaagcaattagtccagtgagatttcttgagtgccagctatgtgccaggcactgttctaagtgctggaggtaacagaggtgaacaaaacagacaaaaccccctgtgtgtattgagtttacattctaagaggacaataaatagagaagtcaataaatacatggtagttcaggtggtactatggagaaaatgaaggcagaggaagagggatgaggatggggtgagtggggattgtcctttagatagtgttcagggaagacctgtctgatacagtgaacattgagtggagactcagattgaaggactgagccaggagggtatctagactctttaaataatatacacatgtaacctatacttattaagcatcttcaatataaaagacactgaagcactaattccccatcaggcacatcctgggagtatgtacaggcctagctgggagcagggacttggagtaagggcagtttgggaggacttgaaaactcaggagctctctagctaactgcctatcaaatatctctatatctgtagctatgtgactgcctgtggactgatcaattactgatgctttggtgtctttagttgaagtttcaaggtgggcctacattaaactcttgattttaactgggttcacggaggagaattctgaaaacttcaaatgagaatgtgaatattttaagagattattttaccactaggttcttgtaactattaatatatgtgctccagagtctagtacctctccattgttttttgggaaaaattctataaactgccccctttctttccactaaatgtatgttactctccaagaccttaaggaaactcactggacttagggggaaggtaagctttgacagggagactaattggctggcctgcccctcctcccacccctaacctgggccggtttgcatggtgtgggcactctgctgagtacagctgactaacacctgcatggctttcccttcctgcagccatcgaactgcctatcaacctgccccccccatgcaggtgcatgcacggaggaaattgctattttgatgagactgacctccccaaatgcaagtaagtctgaatgttgaggtcccagctataggccttgcctcttctggggaaatttgagaccttaaagtagccaggaaaacaaatacaggaacctcaccagttcactaattcttacattttaaccagcttgccttcccttgagggagtctacagagaactgaggcagtgcttctttaactagaatgtgcataagaatcccgtggagatctggttcaagtgcccattctcacgcacagagattctgcatttctaacaagctctaggtaggccacagggtcttggaccacactttggggagcaaggagttagagaattggcagcagcattttcctactcacctggtattgttgattacaacagggctgtgggagaagagctgtctgcagggctgctttagtacaaggcactcgtgatgagcagaaagactgggatggattcggaaagaagatgactgtgttgcgaaaactctaacatggagcaagataaatggatgtctttaaaaagcatttaatgaaagcatataaaagaaagaaacataaccatggtttccatttgtactctctaaggaagcattgcatagattagacaccaataggttttcgtggccagactcaccccctcagtgccacagctactccattacaagtgcatttctaaaatcagagcactgttctttctgcttgtcttctcttggcagaatgaacaaaagtcatgcaggatacattgtctgttcaacatgtaatttatgcagtcaaagctctctctacttcaggatgtgctcagaaaaatgcagtagaagcctaagaacataacagctagtgaatgatttgctttttcctttcaggtgtcctagcggctacaccggaaaatattgtgaaatggcgttttcaaaaggcatctctccaggaacaagtaagttttaagaatgtgagcaacttggaaattactcatggcccctacattgaatgctgtcacagcttttctacttaacccagtctttgaaggagtggttctagcccccagtttctgccaggattgcgggctcccatgtgttgatgtgctctctgctatcttcttctatagccgcagtagctgtgctgttgacaatcctcttgatcgtcgtaattggagctctggcaattgcaggattcttccactatagaaggaccggctcccttttgcctgctctgcccaagctgccaaggtcagtttcattatggggaacgttgatgtttgaagcctaagaaattcatatgaagccatgtgaaggacttagttttctttctaagttaaaaaagcacaatacgcagttcaccgattccacagaaacaaaaagtagtgaggatgtaaagcagtcacttcaaatcccaacttcttagtcaagtgcttctctaaagcctgagtgacaagctgtgttttgtagtccaaatggttgtgcctactggtaggtgttcaggtcagagaggagtgaaaaggcagctgtgtgatggcccaggctttatccttctatgtgctggactctttttcttttagatctcatggttcaggaatgtgctttaacgtttccaggtagctaagggaacttactaccatatttgacagtgtaaatttagagtgggaattgagcattacatttgaggaagatttggcaatgtggaggagagggtactattgtgaaaggttgtatttgttgtttttgttgttgttgttttaaataacaagacactgttttggttacttctttccagcttaagcagtctcgtcaagccctctgaaaatgggaatggggtgaccttcagatcaggggcagatcttaacatggatattggagtgtctggttttggacctgagactgctattgacaggtcaatggcaatggtgagtatggtttcaaaatgattatttgaaggttgtcatttatagaataaatactttttataaagaacaaaattcacctagagaagactgaaatacagtattaggcctctcagaataaggtctgcactacacaagttaggaaacattaggtttgttgctgaaaggtgtctaaaaacattggtaataacattggaatttacccctgctctaagccacgctgttgaattggaatcatgaacagtctgaagtttaacttgaatattgaagagctttctggtttttttgagggtggtgtgtgaggaggacatgatattttgtttttatttgatgacttttatatgtataaaaggagtagggaactatatttttcctagtgtcatatatttttctgccaatgtatagtgatgaaataaacagtgattttagagttggcgttggtccagaccacggctctgccacctactaagtatgtgacaatagacatggagcttgatatctctgaccctcattgtccctatttgtaaaacaggtaaaataatacctcctgggaggaccaaatgaaatactttatgagggggctgccacagtcttggcactgagggggctttctgtaatcagtattgggaaaccactttcagaattttgtctctccctcaaatctttcattgttttccttccctgagaatattatattatccattctttttccttcccctctctccttattcttcttttcttcttccaccattatccttttctctgtggcccagacccaattcccaagtgagttatttaagagaatttggatataagaagaatgttaccatttccttgagttggtaaattagtgcatgttatgttactttgcataataatttgccatatggaggtcttgtgttttgctggcctttttttttttttttttttgcaagttctcttttgggtaacttatgacgtagcacctagcgtacctccaggtgtgaggaaggcacctttctttgtgtgtgaaccagattagtatggtgtaatctctctctctgtttctctctctctctctctctctctttctgtctctgccatcagagtgaagactttgtcatggaaatggggaagcagcccataatatttgaaaacccaatgtactcagccagagacagtgctgtcaaagtggttcagccaatccaggtgagaaaccatacagtcttttctttcagttactgctgtcgctggatcttaatctattgagtcatgtcttaggattttcctaaccttccctccaaagggaaggaagcatagtgagtggtccatgctgcagctgccctatctgcaggaacaggaccaacccaaggacataagacctgaaaacaatcagaatcctgttctgttgcacagtggtggaggtttggcagccatgccggggctgctggccaagaacctttcattttgagtggtgtcagagcaagagaggtctgagtcccttcaggggcctgggaaacacagtgcctgaagcaccacagcttctctacaaatacttgtgaaatgaatgagtggagaattgtcaggtcactatacaggaatttggggacggggcccactctctggttcttgctgctatcccaagcatgtggtttgaggtggattaaagggagagggacctcttatgcttgctgttgccatacttttctgaaaagtacaaaggtctctagagttgatgggcagatatctaaatttccttgttgcagccttgttgctcagtcatctttttttgtgtgtgtgagcaacaaggctatttatttcacctgggtgcaggcgggctgagtccgaaaagagagtcagcgaagggagataggggtggggccgttttataagatttgggtaggtaaaggaaaattacagtcaaaggggggttgttctctggtgggcaagagtgggggtcacaaggtgctcagtgggggggagtttttgagccagatgagccaggaaaaggaatttcacaaggtaatgtcatcagttaaggcaaggaccggccattttcacttcttttgtggtggaatgtcatcagttaaggcaggaacaggccattttcacttcttttgtgattcttcagttacttcaggccatctgggtgtatacatgcaggtcacaggggatgcgatggcttggcttgggctcagaggcctgacattcctgccttcttatattaataagaaaaataacataaaatagtattgaagtgttggggcaaagaaaaaaatttttgggggggtggcatggagagataatgcgcagtgtttctcagggctgctcaagtgggattaggggcggtgtgggaacctagagtgggagagattaagctgaaggaagattttgtggtaaggggtgatattgtggggttgttagaagaaacatttgtcgtgtagaattattggtgatggcctggatacggttttgtatgaattgaaaaagtaaatggaataagagaaggagaaaaacaggtattaaaggactaagaattgggaggacccaggacatctaattagagagtgcccaaggaggttcggcatagccctgccagcaaagattatttatttactttaagagggagttaagagtggcggtttggggatagcaccacgagatatcagctgtgacggcttggagaaacagtgtaaaccggtggtataaacaagagcagggcatttatgagtagttgagaacggtgaataggagtatgactagacagaagatagtagggatgacaagttttttggggtgcagtccaagttggtctggtgtctggaatgagactggggcttaataaaaaggagcgtctatacaggagcttaaatggctgtaccctgtagcattctgaggacaggcctgaattctgagaagggcaagtggtaaaagtattgtccagtcctttttaagttggtggctgagcttggtgaggtgtgtttttaaaagaccattagtccattctacctttcttgaagattgaggaccgtaaggggtatgaaggttccactgaataccaagagcctgagaaactgcttgggtgacttgacaagtaaaggccggtccactgtcggactgtatagaggtgggaaggccaaaccgaggaattatgtctgacagaagggaagaaatgaccgcagtggacttctcagaccctgtgggaaaggcctcttcctatcctgtgaaagtgtctacccagaccaagaggtattttagtttcctgacttggggcatgtgagtaaagtcaatttgccagtcctgggcgggggaaaaaccccgagcttgaggtgtagggaagggagggggcctgagaaattcctgaggagtagtagaatagcagatggaacactgagaagtgatttccttgaggatagatttccacaatggaaaggaaatgagaggttctaagagactggctagtggcttgtaacctacatggaagaggttatgaaatgatgacagaatagaatgggcctgtgaggctggaaggagatattttccttggtctaagaaccatttgccttgtgtgggaagagattgataggtggaagtttcagcgggggactaggtgggagtgactaatgtgaaggagaaaaactgactgtgagggacagaagttggaacgctagctgcttttttagctaatttatcagcataagcattgtcctgagcgatgggatctgatgcctttttgatggcccttgcagtgaatgactccagcttcctctggaagtaaagcggctttgagaagcgtttttattaaagacgcattaatgatagaggacccttgtgtagtgaggaaacctcttgcatggtggtgcaggatatggaaggcatatatagagtcagtataaatactgacatgtagtccctttgcaagagtgagggtttgacttaaggcaatgagttcggcttgctgagaggtagtggagcggggcagagcggtagcctcaatgatagatgtggaagatactatagcatagcctgcctttgctggtgagtggcgattaggcctggtggaactgctatcagtaaaccaagtgtgttcagggtgaggaacaggaaaaaaggaaatatggggaaatggggtgaatgtcaggtggatcagagagatacagtcatgggggtcaggtgtggtatccgtagtaatgtgggaggctggattgaagtctgggccagaaacaatggtaattgtgggagactcaacaaagagtgagtacagctgaaggagctggggaacagacagtatatgcgtcaggtgggagaaagaaaatagattttggaagttatgagaactgtagagagtgagttgagcatagtttgtgatttttagggcctctaaaagtattaaagcagtggcagccgctgcacgcagacatgagggctaggctaaaacagtaaggtcaagttgtttggacagaaaggctacagggcacggtcccggctcttgtgtaagaattctgactgcactaaccatgcctaggaaggaaaggagttgttgttttgtagaagggattgaggtttgggagattagtcagacttgatcagcagggagagcatgtgtgtttttatgagaattatgccgaaataggtaacagatgaggatgaaatttgggcttgactgaagtaatgggggctgtctgtgaagctttgcagcagtacagcccaggtaatttgctgagcctgatgggtgtcaggttcagtctaagtgaaagtgaagagaggctgggatgacgggtgcaaaggaatagtaaagaaagcatgtttgagattcagtccgtcatctttaagaagagctgggagatgaaataggaatataggtgaagggaataactttacataaggtctgcatcaatagccccagcgccacttttactgcttgtcaactgcgaacatgtatctcctttgtcacaacaactatggccttagtgacaatgaataactgtcattgttaacacctaatgctccttttgaactcgagatatggcacattttaatacagaaactagaaatgtttattttacaaatattttgtgattttaagatcggaaatgtttaaatcttgaaagcattttccctgatcctctgataaacagatatgaaaactttaatcacatgataaaagagatacgacatttcatttgacatcttcacttaaaataaaatgaggccatgtatacaaatgcatatccaagtttcagaataaacaagtaatgaatgtgaaaatataggaaaaggagtgaattgtctaccttgtagtttattatgcattcatggtaatttggtcttaaaagggaaccttggaattgtatgaatgttatagaaaaatgcgtagaagattattaattctatcattctcatcttttcaaaaattcaacctctttttagtagtactatgaaatcttaatttccgaagataggatttattaatattcaaagaaattattaagatccaaagataggattctcagttcatcagtgaggttggggaattattcttgctgttcttctaggatttggcttccagtatataactagagtatgattatccaaaaatttggtcaacagtgggagtaagaaggtatagagaatacagtagaaattgctagtaataagtgagagtgtgaccagtgagggatgtatttgcctcccaggattaaggtatgaggtgacttagtggttgctgctcttgattttggggcggtgggagtgatgtttagtcctggcctactgggtcatgcaataaaaatggtgcctgatgatgtctgtgggagaacaagatggcaaaaagagccagagttggtacaaactttacagcaaatttatttactactaaattctttcaaaattgggtaaaggcctttaacatgtccacaggtgactgtatctgaaaatgtggataataagaattatggaagtcccataaacccttctgagatagttccagagacaaacccaacttcaccagctgctgatggaactcaggtaacagttgccgactcctgaaataatgtgggatttggaaaaactttgggatgactgggtttttattaaccttaagcaaacaagggagattctggaaggctcaaagatctcaagatgtgttgacagttaataaatataattttttaaaaagtcatagattgaaaaactttccaccaaataaagctacattctaacatcgagttgggaataatgttccttgtaacataggaggacatgtcacaaagaagaacaaatagacttctggatccagtatcttcagaccagagacatttaagttgagaaattgactcagtatgaataaagatttcacggtgtcaaagatacagatgaaagatccgtctgtgtgtgccgtgatttctctacagcatgcatctttattctttcaagctgttcttcgctctcctgctattacagatctttaccactagatggcactaatttttccattcatcatccatctattcattattggccaaccaatcatctaactaacgttattcccctcgatgtgtcagggatggtgtttaatactggagattgaaagaaaaaaatgccactagatggagcttcttaaacatgcctgcaggtcctttgcaattggtacactatttggtctgcaggaagaaattcaataaatatatttgatattaaactctgtattaatgtatatcattagttttaatgaatgcatttgcagctataccagatatagctgtttgaatctggacaaactgttttacttctggggctagagtcctcaataatatttctcactgggggcgctattggcatattgagtgggacagttctttgtgctacaaaactgtcctatgcactcagggaatttcagtatttctggtccctgtccactaaattccagtagtgtctcccctaattcagtgtgaccccagaaatcacctcccctccccaacacatgtgcactcactcctggttgagaaccgctaggatctggaatgtctctgttctaagattctatgaccaattttgtgaagtaatgtaaagaaatgaaagtctaagagtagttggaaattttaccattttatacaatctttatttctcaaatttcatagtctataaacattgatatcttggtaacttggcagtctcattatcaccttaaacattggtttctgttctgctgatttaaatcaaaataaaatttgacctaaattgatgctgagaagagtctatatcaaggcttctgtacaccttctcaaattcccttatttcttcttctcatgtcacacacacacacacacacacacacacacacacactcatacactcacagacatacataaatattgtctagaaaggaattttcagtttcagatttttcaagggactaaacattttttctttaagctatattaaaaatggattttgaagattaattttccacagacacacggatgcttgaatgtcatatatttggtcctccaagcctgagtcaaccccaagctagtgccagatttattttatattttcaacattttttctcagtccatctctagtctagtgatcttcttcactaaatagacattttccccagctggtgcaggaaggggactgtggtggggaggctgtaacctctgatctgcatgtctgttatcagaaacaaaatgtaaactgacagtctctttcaaaggagagcagatcttcaccaattgtagtcctttctttctcttcccttttgtaataccttggttcctcctcttacttttttacattagtgaggctgagaccctctaaaatgtgtcttccatgttatgtccagggatctcactgtatttcttccctcctgggcactgagttaacagccagcatgctttaaaagcagtagaggcgcttgggtgagatcacctaggttgatttgaatatgccagagtcccacaaatgtatctttcatccataaatatgttgaaagactaacaattaaaaacatgggctgggcacggtggctcacacctgtaatcccagctctttgggaggccgaggtgggtggatcatgacatcaggagttcaagaccaacctggccaacatagtgaaaccccatctctactaaaaatgcaaaaattagctgagtgtggtggcatatgcctgtagtcccagctattcaggaggctgaggtgggaggattgcttgaacccgggaggcagaggttgtagtgggccgagactgtgacactgcactccagcctaggcgacagagtgagacttcatctcaaaaaaaaaaaaaaaaagattcagttctatcattttccaaaagttacattgatatgcataggatcccccaaggagacaaaaatgaaagtcaccgtccctttcctcttgttagtaattgcttaacttcaagttagccatttcattttgaagcaatgacatctaagagactttggcccgccccacttaactgtaagcgcccagaggcagggctctgacctgaatgtcttcatgttccccttgggggcactatgtacaaagcaggttctcacttgaatgtgggttaaagtgaagacctcttctacttctgtagccctgtgttccccactcctccacaggctggtcccctgctgtcacagagtaagagacaccccataaaacctgtgggctccctcagctcctgttgagagtaggctgtctgttcccttgtctcccaccaggtttttatctggcagtcagcatgacaggcaacttttcagtaaagcgtgggccacgcaccatggtccagggtgattatctttgggttctccagtttatgggcctctgggtcccctgagtaatcattacctgcccttctacctgcaagttagttgtataatcttgctgtgactcagcaagtataggataataagtgtacctacctctggggtttgttaaaaaaaatcagaaacttgtaaaactcttagaatagttcctgacacatagtaagcactcaataaatgttagatgtttttgttattattattgtgacacaggagggaatgatgaagggagaagggatactcttgagttgaccaaagaatgttactttagggaataagagttacagtttggctttgccatctccacccaattttcaggcagccccagaaatctctttttctccagatgcatcttgtgcatgtctgttttatgtgttctctctgtactgaggtaaccaggtgatttgcttgtagatactatggcacaaattctataatatataaatttgaagtcaaagaagtgtttaaaaccattcgattaaaagagcccagagtttcagttactgttcagggaccataggaggaattgaacaatttaccatatgggctgaatcacatggtcccaggtcccaaattgctttacccttcagtaagaagaaattttaaaactgagacaggaggaaaagaaacccacaaaataattccattactgagaggtttttgttttccccttttcatttaggtgacaaaatggaatctcttcaaacgaaaatctaaacaaactaccaactttgaaaatccaatctatgcacaggtaatttttaacaatttttcttagcacagacattttttcttagaaattatttgcttggttaaattggacacacacttagattattctgagcagagtggccacaaatagtcttctttatgaaaaaccgtgtatggtgaccttgggggaataaatggctgattcctgttacattgtattcttagatggagaacgagcaaaaggaaagtgttgctgcgacaccacctccatcaccttcgctccctgctaagcctaagcctccttcgagaagagacccaactccaacctattctgcaacagaagacacttttaaagacaccgcaaatcttgttaaagaagactctgaagtatagctataccagctatttagggaataattagaaacacacttttgcacatatattttttacaaacagatgaaaaaagttaacattcagtactttatgaaaaaaatatatttttccctgtttgcctatagttggaggtatcctgtgtgtctttttttacttatgccgtctcatatttttacaaataattatcacaatgtactatatgtatatctttgcactgaagttgtctgaaggtaatactataaatatattgtatatttgtaaattttggaaagattatcctgttactgaatttgctaataaagatgtctgctgatttggttggtgatcattatagtaaatgatccaacaagaaaaggaattgactggggacctttagccgtgtctaaagaagaggcaccactcatatttcctataaaattatctaggaaaggaatccaggccccgctcttgggtccatttttacacattagcacttaattaatgttcaatattacatgtcaatttgattaatggctatgttgataggggccactatgtgttgtatagacatctggacttgactgtagactcctcagataatacagaaggtaggaaaagcaattcagtttggcccttctgtgtgttggcattgtctaaccagaactctctgtttcatgtgtgttctctcactagctgccaagacaacatttttatttgtgatgtctatgaggaaatcccatatcattaagtgccagtgtcctgcattgagtttgtggttaattaaatgagctcttctgctgatggaccctggagcaatttctcccctcacctgacattcaaggtggtcacctgccctagtagttggagctcagtagctgaatttctgaaaccaaatctgtgtcttcataaaataaggtgcaaaaaaaaaaaataccagttaagtaaagcctcaactgggtttttgtttctatgaaaatatcattataatcactatttatttcctaagttgaacctgaatagaaagggaaaccattcttattaagctttttattaggccctgtggctaaatgtgtacatttatattagaatgtactgtacagtccagatcttttctttaattcttattggttttttttttttttttttttttagagatggagtcttgctatattgccaaggctgatcttgaagtcctgggctcaagtgatcctcccacctcagcctcctgagtggttggggttacgggcgtgagccactgtgcctggcttccagctctcctcttaaatagtgggtatagtctgcacaacaggaaccatggcaggaatatacactttcccatagcaaatagcatacctgactctctgtgctaatattgcacatttgttaaacaatgaatgaatggatggatggatggatggatgaatgaatgaaacatatactactgattattttattccagagttctcaaaatatttgttgctgatattttgagtgctgactgtaattactttgattagataaacaactggaaataatgctgctgaaaaagttctaataaatgtgtattttatcaga

SEQ ID NO: 24 - DNA, 233624 bp, Pan troglodytes
  variation 17319..17830: note = n is a, c, g, or t
  variation 50744..50753: note = n is a, c, g, or t
  variation 78666..78865: note = n is a, c, g, or t
  variation 91489..92414: note = n is a, c, g, or t
  variation 92534: note = n is a, c, g, or t
  variation 92600: note = n is a, c, g, or t
  variation 96548..97238: note = n is a, c, g, or t
  source 1..233624: mol_type = genomic DNA
gcagggggcgggccgggcggcagggggcctgcccgctggattcccgcatgcttgttccggggcggtcgggtctaaagggctttatgcactgtctggagggtggggactggcgcgggtagaaaacgggatgcctcgggcgtgggggcaggcttttggccactaggagctggcggaggtgcagacctaaaggagcgttcgctagcagaggcgctgccggtgcggtgtgctacgcgcgcccacctcccggggaaggaacggcgaggccggggaccgtcgcggagatggatcgcgggccggcagcagtggcgtgcacgctgctcctggctctcgtcgcctgcctagcgccggccagtggccaaggtaagagcccagccggagcctctcgtggagcgcccacttccccggctgtggcagggttgggtccgcgggaggccggaggggagagcgtccgggcaggggctagggccgggcggcggcgcgggagctgctcccggtggggcgctcaagttgcttcgcgaagccggagcgggagcgcccctcttcgctcgccaggaactgagcggcagcaaacttgagaaagcagccccgccagtttcggtgacagcgcaccccacggagaccctgtctttgttcccacgggcgttggtccgatgctcctggaaagcactttgcgggagaacgaggttctccgccgtttgcagcctgccctcccgagcggagttctctgctgggcggcgcggtccggggctctgctcagagcgcagctttccacctgcagcgcccctcccgggatcccttcgcgcgcccagggctgcgggccagagcactcctcccaccaccggcgaaacttggtcccgcggtgacccccagagaccgctctcaccatacagatcatttacgagccaagataaggccgggaggtgggattggccgagagagtggctgagggactggagtcttttcttgaagttttcctttccagctgggagctgggggcttttgtgttgatgaatggggcccgtctgcatggccagagttttggggatcgaatgcagaaagtttctagtatgaagtgctttaaacttctctcaagttgtccgatagtttatgttttaacagaaacagagaagagggaaagagagggagaaagaagcggagagaataaaactagtaagaagggaagaggagagagcgtaagagaagcaaataggaataaggaaagaaggagggaagagagaacgactggggcgggagaagagagagagagaggacagagaggagagagacagagagagagagagagagacagagacccggccgaggatgaatgggaagggcgaggaggaggctggaaccggcgagctctccccctggctttgcgttgctaggtagcagccgggagctgcgtgtgaccgaccaccagacagacagaggggacgctgctgccaccgcagggactaatctgtctgtggggatgggagagtcccccctttcccctcctgctccttccctcctgtcggacaacttaattgccctacaatgaaaatgaaacccctattgttgtaggattagccaaagcaataaattgattttcctggatcacatattggggttgatgggtggggaatgtggaagcccccatttacggaggagtgaggggagggcttgtggatgggccgtggcatgtattcaaatggttaatctgctttctttcctcaattcttagcgtaagctccttagagggaatcaagtaagtaattatacagcaactcctagcagcacccatttcagacttcctgggaagaagtttggaaaccctaacaaaccccacaggtcttgcaaaagtcttcagaaaggcaggagaggcaaggagagatcattaataaccttcctttgaacaccctttctcagtgttggtaacgcagaaagagggtttattattattgtgcagagtttgcacaatgcttagggttatatctcatgtcctaaatatagctacaggatttactatatgttcccgtcagtgcctggcaaaaggaaatcttaccttgattcatctatgtccttgtacaaccaaaacagatattctttttcctgggttgatgatttagtcactaaataaccaatacctactcttcttgatagttttttgcacccatccatcttccattctatgataataatatataataataatgtgtatagtaatagtaacccagcatacacatatatgtggcaggctttgttctaagcactttatgcttattgactcaattaatcttcataatatcctttggaagtaagtactcttattatcactgttttacagatgagaaagtggaggcacagaacaattcagtaatttgtctcagttcatactgctagaaaatggcaaactcaagggattctgaattcagagtctataattgctacagtatacagtatctggttttctctctctctctctctctctctctctctcttttttttttgagagagacagagtctcgctctgtcacccaggctggagtgcagtggtgcaatcttggctcactgcaacctctgcctcccaggttcaagcgatcctcacacctcagcctcccaagtagctgggactacaagcccggggcaccatgcccagctaatattttgtatttttagtagaggcagggttttgctatgttggccaggccggtcttgaactcctgacctcaagtgatctgcccgcctaggcctcccaaagtgctaggattgcaggtgtgagccactgcacctggcccaatttctcttttttcttttgtacaaaaaatgtcatgctccctaacttactgtccatgtgtgaggttcctaaagaagctgaggggcaatatgcaactcataccacctgctccttcataactgtggatctttttccagaatctctcctcaggtttctaagaccagaacccaagtctccccattcccagtcttcctacttgatcattttaagatgcatttcctctgattgtcctctgcctgatacgttgagatttctagaatcctgttgtaacgatcctgacttaatatatgaagtaaaatccaatgagattgtaagagcctttatttaagcactaccttttaggtaggctaccattgcaaacttcgcatcactaaaattggagggggaaaaaaagagctctgagtattctatgtttagtctttgaaaaaaattataccacatctgttgttaaaaattatttgcattttctttatcttttgtgtaatgcttttcaagaaaaaacattttgcagagcctgaactcgagtcaagctgttgggttccaacattggctttaccactttctagctgtgtgaccttgggaaagtcaaccaactttgcatagctcagatggcttatctgcaaaattgacaagataataagagaatttacccaatgacatcttgtgagcataaagagataaaatatgccaagtgcttagcatggtgtaaagcatatagacagtgaaaataaactagaaaataatctaaaaatataatatttttattatatttatcaacccttaaagtaacatattgttttgcttcctattcatatttccaattttcaaatatacaaaggaaagtcttctttaagcatttttcactaacagttctctgaagacttctcagaccctagcatgtgattgcaagattttttctttcttttttttttttttttgagaaaatcgtattggccttaaacaaagttgtattctgtttactaattaaaaaacttatttttcaaaaatagaaatggggtctcactgtgttgcccaggctggtcttgaacgcttggcctcaaatgatcctcctacctctgcttcccaaagtgctgacattataggcaggagccaccttacctggtccaacattatatcctttaatccaataaaaatgtggtaatgtttttaagagttagtatcagcttttatgacaattacatcttcacatgaagtttatatgtttaaaaggattgtgggggcaattgcaaacttgtatcgtttttattccatcacaactctggaacctcactgctgctttaatttcacagttgttggcttctctttctctacttgaaaaagtttctctttaccagtcttcataagacttctgcctgaactcccttcagtcatgcacctgtctcattttaatagaaactcagactttttacagctagagggaaccttagatatcaactggtcggcttgcattttttttttcttacagataagcaattagcccaggagggagaagaaaggggctgagaggatgaaagggaaggcggttaataggtttcttgcctaaggacatctagcctgtgatagagctaagatataaatttgcagtggaccattttttagattcatgccttctgaatgtccccagcctgtttggttggttgagatttctagattccttttggaatcctgacttgccagataaggcacagtctgataagcagatgaatcttaaaaacaattggatgggttacctgtccctggccaaagaggaatcctgtgataggttattacaaccatgtaccatgcgctttcagcctggtccagaactgatgccatgtcagtgcccctactcccaaagaccatacctccagatccatttttcaaattcttgagccatcaaagcacattcctgaagatctttgggttttgtagtgcaggctgctgtaagactaggttttcagtcttactaaaggtaattattaggtcataatcattgttcatgttctctagtcgggcactgtaagaacactgacaggtttttaaaatatttacattaaaattttaaattatcatttaaaaataatgataccaggaacctagatgtatttcctgtgtagtcagaagcaagtgcattgtcatattggctttggagtttctgttaagtcctagtagctagaacaaggtaagtagaaagtagaaggtgctgagctgggcgtgggggctcatgcctgtaatcccagcactttgggatgctgaggcgggaggatcatgaggtcaggagatcgagaccagcctggccaacatggtgaaaccctgtttctatttaaaacacaaaaattagctgggcgtggtgacgcacgcctgtaatcccagctactcgggaggctgaggcaggagaactgcttgaacacaggaggcagggattgcagtgagctgagattgtgccactgcactccagcctgggtgacagagcaagaatctgtctccaaaaaaaaaaaaaaataaataaataaataaaataaaataaaataaaaatgaataaaaaagaaaagaaaagaaagtagaaggtgcttatgaaagagtgttgaatggataggaaaggggttctcaaggttgactgcacgaatctagagcaactaaaaaaatactaattgtgaagccctattctagcatggaaaaaataagcttgatggaacctttggtataaatcaaatggttctatcgtatcctattaactttatagtcttgagtaattaaaaaaattttaccactattgtgtattctgtgaatgtttattttatttttcccatgaatatttattaaatatcagcagtgtgctgatgagtcaatagtatcaatactacagaaagattaaggaagatgagaactgaaaacaggtgtctacatatctcacaattaaaatggactgcagttttgcatttaagattctgaaatagtcattgactcgttcctaataaccctgcccaggatctcaccagcattagaaagattggagatgtttcagcatccaagttctgggatgcttcttgataatgatcagatagtagttgttttgaaatgtcaagagcgtttctgtggttcttcacatgttcctaatgcaaatgtttccgaagtaatttcttgacagttacagtgctttgagatgaagtgggaagggcttgtgattttgaagttggaggatcttggtttgattcctacctctgccatttattatctgggaaatccagtaccacacatgctgggtgctctggggcagttttcttatctgtaaaatgggcatatatctacctcacggggtggttatgcagaggcaatgaatgtgaaatgtttaataaactgtgaagtctcatatagatttccattcatcattattaccctctacgagaattttactttttccaaacttgagaggaggaagatattgcagtattttggtatcttctttaccatgggtctgtgaatgatgcacctgtgcatgttgttacatccttatagtggctaccacaacttcacatgttattcagtactgttatgttggtgaatgtcacaaaactaagttaaactgcctgaggcaaaaaaggaaggttattgaaatacatagttgaggctgggtgtggtggctcatgcctataaatctcagcactttgggagtctgaggtgagcggattgcttgagcctaggagtttgagaccagcctgggcaacatagggagactccatctctgcaaaaaatacaaaaaattagccaggcatggtggtgtgcctttgtggtcccagctacttgggaggctgaggtgagatgatcgcttgagcccaggaggttgaggctgcagtgagctgtgatcgtgtcactgcactccagcctcagcgatagagtgagaccctatctcaaagaaaataaatacatagttgaaaagatacagataattaggttgatccatttgagactgatttttttcctatgcagaaatagtcaaatattggcaatttcatttggttcaacctaatctaaaatggaggttcaaactacgtcaggccaatcttgtcttttttccatctcctggctctgagatgattccattcttaaacatgttcccctttgatgtaaagcggctgtcggtggctctggagccacctcctatcagatcacgtccactgggaaagaaaaagagtttttatcttaactattcccagcaaaagtttcagttgcatctcaggggctctgcttaggtcataaactcattggagaaccaaccactgaatcccgggtcatgatgtgttcccatggcttaggcttgggctgtatactcagtctttgagatcatgtatgaaggggtggagtccagagagaaacgggggtaattattgggagaatggtgaacgaggctgggatgcaaaaataacaggtgttcagtataccttatcagataaaattgactgacgatgttactttcattttatatgtgaagacacacttgaaaaagctacagaagtttctcaagagctggcagccctggggtaacttacagaattgaaagggaaaaagtattggaaacattaagaaaaaagatacggtgatctgtgcccatgtgaccatgttgcaactttaagtttagaaggagaacaggagaaagaaggacttttagaaggtttatttggatcctaaagttttcttatttggagcagagctttgtgatagacaggaaagttctggaaaatgagctgagcgatcagactacaggatcccttgagtccagtgcagtatttcatttttctgtgaatcttaggctcctactccttttccaatttacttcactccaatgtttatgttcctaagagtttgtctgttttccaagcactagtcctttgctataaggatggggtagagagaaagaagcttaaagagtttgcagacaggttaagatgcttctgtggagacagaacacatcttggtgcacatctgagtgtccttagcacttcatctatggacttctttcataaatggtagaacatgtatccatcacaccttattggattaattcagaaatgccaaatatatgtactctttgctgatggttactttgttggtctctaatttaagtcttatctctaatcacattagctgagaaaatggagacattatcattctaaaagtaagatggttaacttttatattagggcacttctgatttaggatagcactgaaattcagtgcaaagaaatgtaagtctttcctagataatgacagattagacaatttgaagtttcacttttggtcattagccctcaggtcatgcctgacctcaaggttactggaaacagtgagaaatgaatgaaaggaggaaatgtaattaccattctgtgcattgaatagttgagccactgttaccatggatacaacagcgcatttattgtccagatcttgagatccaagtttgtaagcaatatccaaggtctcctttaaatttatgtactatcagccaataacacatgaagattcctagtaactttgaaaataagtctttcctcactgatctactgattcacattaagtaagagcatatgtacttttgaaggtgttgaggaaacctgaaaaagacgaaaaggaaagtagctacacttctgttatgctggacattcttggattcctctataaaaatattctgtcttatactgtcagtgatttgcttgtcactttgggcccagttctttggtttttatgtcattaacaaggagaaaatttcctgagtaaaggttgaaaaaatcaaaatcgcttatttttattttttgagacaaggtcttactttatcacccaggccagagagggtctcactttatcactcaggctggagtgcatggctccctgcagcctcaacttcccaggctgaagagatcctctccgcttaaccccccaagaagctgggactacagacacataccaccactcacagttaatttttatattttttgtagagatgaggtttctccatgttgttcaggctggcctcaaacccctgagctcaagtgatcctcccgcctcagcttcccaaagtgctgggattataggcgctagccaccatgcctggctgaaatcatttattttgtcaggaaattcttaaagttgaatttaagaatgaaagtattttatcagaaatatggcaatcctacccacattttaatctcactagaaggggggtgatacatgctagcatgtacttccacactggtttaattttgatgtggggaagggcgtggaggatactttttgttgcaagaaacagaaaacccaactcaaaatggcctacacaataaagggtatttcttggcttatgtgagtaaaaaatactgaggcagagaggggttcaggcgaggtgcagtcagggctccagttctctttctttgtgttttccttgaccctactcccctctaagtttcacctttgtgtgcggtctggcttcccatatgattctgatatggctgccagggcaaatggggctacgtgtttccttgatcctatctagggggaatccaactttgagaaggttttagttatgttctcaaaagtattatttcatcacaataacttacagattgttagaatttctaaggaccccagataaagtcagctagctccccaaacttggcatatcatcaaaatcacctgaggaacttaaaaaagtatagagattcttaaatcaaaactcacccttactaaagcaggggtatgaaaatctgtgtttttttaaaattttattttattttactttcagttctgggatacatatgcagaatgtgcaggtttgttacataggtatacatgtgccatggtggtttgctgtacctatcaacctttcatctaggttttaaggctcacatgcattaggtatttgtcctaatgctctgccttcccttggcccccaccccttgacaggccccggtgtgtgatgttcccctctctgtgtgtgatgttcccctccctgtgaccatgtgttctcattgttcatcttccacttatgagtgagaacatgcagtgtttggttttctgtttgtatgttagtttgctgagaatgatggcttccagcgtcattcatgtccctgcaaacgacatgaactcattcctttttatggctgcatattattccatggtgtatatgtgccacaaccaacccaaatgcccattaatgatagactagataaagaaaatgtggaaaatctgtatttttaaaagtttcaaggtgattctgagggctggaccaattttgggaacatctgatctaggtaccctctcatttttcagttttgtaaacagacttagagatgaactgacttgccactgcaaatttcttcagtggcatttaaatatactgttaaatctctttcttttggatgggaatgttacaagctagctacaacaagaaggacaggactcttttaagtctgagggtgacatgaagtactaccctcattcctggccacctccttttttggccagcgtggcaggtcctgaacctctccctaaatatgccactgtttgtgtcttaattgtatgttttgctcttaccttggtcacctttgaagttccccccagaccctcctaagaacgttggattcattgaggtaaataactgttgcaggtcttctaatcttttctcacctatgtcaggaattcatctcagaacacccctgacacaacccactggcttctagagaagctgtctgttccatgcttggaatgggagtattgaaaaacttcatagctcatttcctttgtatcccagcctcaactctttgttgacctcattgggacttacagtttgttgatcctatcgcctcttcaccgtctctcaaatccctcacctatttactgcctcagcttatattttatggccataattaatttcacttccctgcatacatatgccctcagcagcttggcccctttatctggctctgttgtgcttggcaaggccctgatcctggttaaatccagttctccacatctgcaactctgtagctaaacatggcaggagaaaaacacaactatactgactagcctcgcttgaggtttctacattcatgaagccaatctcaagcttaggatttgcttcctagcctgtctattgcctctcttgcttccttatatcttctcctctttcctcaaacctctgacatcaccttctcacatgtagagtgagctttttaaaactgtgaaaatggaagcaaccagaagagaattccataaacttctataactcaaccatcatcgtttgaacttctgcttatatcttctgtctttcctcctattactctggaagaattttccaagctcttaagtccaaccatttcattcatgttctagatctcattccctctcacctctctgcaattgtcccctctttcttttatgaaatcctctgttccacattaccttctaactatcactctattttttcggttccactttacagtaaaattcttgtacagatgtgcctatatccactgtaattacctttcaatttttcctcaaatccatgccattttgctttagccctcatccttgatagattttttttggtcaaagtcactcatgacttccatgttgttaaatccaatgatctattttcagctctggtccttatttaactggttagcagcatcacacacagtgtatcctgacttcctccttgaaacacttagttagattttcaagaaactgcattctcctggtttcttttcttccttgctggccttcccttggtatctcatgcttgttcctgtctatatccctgacctgttttcatctctagctacactgcctccttggtggcctcatcctgtctcatggccctctttgaagcagggagtggtttcccaattcagggaggcggcatggactgtggtggaaagaacatcacatgtcaagtcaggacattcatggatcttgttcctgaagaaagaaggaaaaataggtacaaccatagagggccccaggctgctgaaaaggacccagggccacttgtcctctggggatagtctctgtcatctcagtccccctttttttttttgcgatggagtctcgctctgtcacccaggctggagtgcagaggcgtgatcttggctcactgcaacctctgcctcccaggttcaagcgattctcctgcctcagcctcccaagtaagctgggattacaggcgcacaccaccatgcctggctaatttttgtatttttgtagagatggggttttgccatgctggtcaggctgctctcaaactcctgacctcaagtcatcctcgtccctcggcctctcaaattacaggcatgaaccactgtgcctggcctcagtccccatacttttgaggactccatatttacttctttaccatgtacatactgacaactttcaaatttatgaatctaatccagaccactaccctatagtctagacccacatatccaactgctcatttgacatgtccacctggctggccaatagtcatctcagacttcacatgtctaaaattgaactcctgatctccactaatgtccaaacttgctttccgtgtggaatttctcatctcagcaaatggcttcctcatccttgctcaggcctcaaactgtatcctactttgacttttcttttgcttctctaccccatatagaattccttagaaaatcccattgttttgatcttcaaaatacatctagaatccaactacttttcaccatcttcacttctgccaccctgattcaaccgactgccctctcttgcctcaacgattgcaatggcttccatactgatttccttgctgtagcaacttttttagaacatcagtcagatcacagcacccctctgctcagaagctcccatggtttctgtcatactgaagttgggttgcccaaaaacagacactgagatggagcttggagtatataatatttattaagatcaatacctgtgaagggaaagggaggaagcaggatgggcagaagaagaagttgaactctggcagccgttggtcaacccagaggaagctctggagcacgagttgcctgttagagtgtcctatgtcaggctgaaatggccttgcttaatcactggatgtggcctgtcctggaaggacacgaccttgggcaggtggctttctatagctgaggcagaccccaaaggagctgattgcaggaagaaagtccttcctcgtagctggtccttcctataaggggaagctgcatggcacatctctgggtgcttcccatctcatgaagagtcaaagtccaagtccttactatgatctacaagaccctaaccatttggccttcacgtcacctccctgacctcatttccttctcctctccccatgcacagtgcaccaggtgcagtgatatccttgttttccctgacatggtgagcacttttgggcctttgcacttgctcccctttttcctgaatgctcttgcctcagatggtgcatgacttacttcctttcctcctacaggtctttgctcataggtcaccctctcagtttggccttctctgattctttcccgatctcttctttcctgatttactgtctccattgcacttaccaccatctgacataaggtatgtaacttagttgtttgtttatttccttacttattatcttcccttccctaagatgtaaatggcacaagggcagggattttcatctcttttatccattgctttccctagtgtccagaaaagggctaaataaatgaatatacattgaataaatgaatggacagatgccaccatgggtgctaagaaggggcatcctcagctcatcaccattccctggtactaccaggccttaattcctcgaggcccctggaggcccagtcagggtcctgatggagaaaaaggaaaattgctgtctctatcaaagcaagtggcttagcaacgctgtttctctcgatctgactccccccttttctccaccccagtgcctcccactcccgccctgctggtgattcccaatgcatttgagtagttgaatctgcatccttctttttaacttccatcccagatacttggttaccctgtgagaattcccctgtacatacagaatgggtcattctgctatttttaggacagatttgatacagtagcttttacaaaaagataagccaaagtttttagacttcatgttagtggactgtcattctgtatttaaacagaacacaaaagaaagctgtctgagaccatgacacagtgaaaacagccttgatcaaacaaaaggccctctttgaagaggggagtggtttctccactcagggaggcagcatggattgtggtggaaagaacatcacatgtcaagtcaggacattcatgggtcttgttcctgatgaatgaaggaaaaatgggcacagacgaagagggcccccgactgctgaaaaggacccatggccacttgtctcctgggcatagtctcccccatctcagtccccattcttttgaggactccatacgtaacaaataggttggaggcaggagaatgatggagttccacacaaagatgagtagagaagttgggaaataagccacaataaaagtgactaaattatttgagtgctttctataccaggcattggcctaagtgttttgtaggtattagtttacctacttatgtagtaacagcaaaaattttatggataaaggaccaagacaatgacaggtgaggtaatttgcccaaagcaattcagttactaagtggcagaaccaacatttgaacccagaacccttatttgtatatgttatcactatggataatttggagcaagtggaagatagtcctctgtacgtaaccaaatgaagcctcatttaatttctcatattatgatcagataacctcatttcagaggctggtaccattgcgacccaacttttggacatttttttgctactcttggcagttcattcattcattcattcaatatatgttgcagccttatcatgctctaggcatgatgtaactaggtactgcagagtatatagacagagaccctcaacataggccacatccaaaacaacttactgtcgaacagagtatatttccacttccttctagaagactagaagactgtactttttaggtacggattgatttctctctgctgggtttctcctatattactatttcattatctaggaacaccttttttttttttcctctataattatgtgtcttttaattcaaaggacccttacctaatcagagagttcaattttaaccttccgttagggacagcagtcatctataaattttcagaggttgttgttgtttactattaatgaaaaaattattaagttctcttatttaaagtcactgaagaaaaaaatgaacaaccaagtgagagctgagtttctttacttcccggagaacactgctgttgtagagatggagaagacatttcctatgtgctggatgtgcttaaaagtctcttggtcccaaaatatctctcactacggccaaagatctctgctctgtcattgctaaagtcagttcttcagagtaagacattctttcctcctgaaactcctattacaatgtggaaatgttcactcctgtagggtaaagtagttagttgagatagtaatgcacagtaaatgtttgtcagagcaaggttcagagagaaggagacacaaagctgctatgttttaatggggatgaaagagggaaagaaggtactagaggtgtgatatagtcttgaaaataagccaacttccttttctggggaataaagggttattatgcttgtgctttttcttagaatggctttatggggaatttcagctgtgatctattaggaaggcctcaaagatagaacttaaaagcttctagtatggctgtccttcctctagttagcaattgaaactgagttgttacaacaaaaggaaaagttgtccttaaaagcaacacatttgcaagactccatcaactattccttggggattcatcagtgcctggtaagtttgagaagagacccttggattttaatgtacatggcagttataatttgtctagaccataatgattactattaatagggaatcctgtttttctatttttaaaaaaatttagagatgggggtctcactatgttgcccaggctggattcaaactcctgggctcaagtaaccctcctgcctcagcctcctgagtagctgggactaaggtgtgtgccactgtgcctagctctgtttttctttaaagttactgtataataaaaaaagaatttgcaaatgcataaaattgaatatacacatgtcccaagtcaattgtcaaatgattggtttttatgtaccaaaattctgcatttttttttcaaggtcacttctgatataagaatttacttcttccctaatatttggttcagtgaagtgttgaaagaatttgctaagtaatcattgaaagctaagattctagtgaaaaacaaaatgcatggtttaaaaattgaacgtactaactgaaagacagtggaagttagatgcttcttgctgtaaataattaaacccaacagtgcagacgagagaacatggcaccaagagggacttgggctaagaaggatcatattgtattgaacactttcgtttccctgtaagggaaatcaaaagggtctttaatagttgttgctgattgtgaatatgtgcaacaaaatcccactgtaatccagatttatttttcaagcattttgctgtgattgaaggaaggagaaagggataggaagaggatggagttttattaaagctgtagttacttcttccctttaggaggtctaagtgtgacttgtcacagtgacctgggactttgattccctccagggccttcctgttctatgggcacattggtggatcaaagacaattgacttttgttttgttttgttttgtttttggagagaagcagtggttctgctaactcagaacaagaactacaagagtcatgtaggatgtttttctgagtttctctaacagtgctcgttttttttttttttttgaccgccccctcttttccttttgaggtggtgccaagtggtcaaacctccatttttctatctgtaaaaaagagaatcggcctttatgaagtgctttaattttaaaaattaacataggctaaaattgctgtgtgtgtgtacagttctgtaaattttagtgcatgtatatatttgtgtagccacaacctcattcaggattagaacagttcaatcacccccactaattcccttgtgctactgctttgtagtcacaccctcccaataaagtgtgttttaagttccttttttggaaactgactttcccagatgaatgtctctgttgccttttatttgttcatttttatttacccagtgttccttgctcatttttgaagtaattcaaaatgacacacatggtaaggtgcaagatgtctttcgcagtatacggaaaaaactctggaagatgcagctcttcagtatagtcataagacaaatttcccaactggctgggctagatggatcgtaagaaannnnnnnnnnnnnnnnnnnnnnnnnnnnnnnnnnnnnnnnnnnnnnnnnnnnnnnnnnnnnnnnnnnnnnnnnnnnnnnnnnnnnnnnnnnnnnnnnnnnnnnnnnnnnnnnnnnnnnnnnnnnnnnnnnnnnnnnnnnnnnnnnnnnnnnnnnnnnnnnnnnnnnnnnnnnnnnnnnnnnnnnnnnnnnnnnnnnnnnnnnnnnnnnnnnnnnnnnnnnnnnnnnnnnnnnnnnnnnnnnnnnnnnnnnnnnnnnnnnnnnnnnnnnnnnnnnnnnnnnnnnnnnnnnnnnnnnnnnnnnnnnnnnnnnnnnnnnnnnnnnnnnnnnnnnnnnnnnnnnnnnnnnnnnnnnnnnnnnnnnnnnnnnnnnnnnnnnnnnnnnnnnnnnnnnnnnnnnnnnnnnnnnnnnnnnnnnnnnnnnnnnnnnnnnnnnnnnnnnnnnnnnnnnnnnnnnnnnnnnnnnnnnnnnnnnnnnnnnnnnnnnnnnnnnnnnnnnnnnnnnnnnnnnnnnngaagtaattcaaaatgacacacatggtaaggttgcaagactgcctttcctttattataacggagaaaaaactctggaaagatggcagctctttcagtatagtcatataagaacaaaatttccccaaacttggcttgtggctagattggaatccgtaaagaaaacacactcaagaaatctctcttgaagaggaggacagaggtttattttttatttaacgatttaccccttgacacctgggaaatgattagttgatgttttcaaagaagattaagtcagtgtggttaattaactgtggtaatcaggtgacttaaatcaattaactccttgttaacaatttccatcaattttgtaaataaatgactaaatcagtaaattgtactcttaagattaaaggctattttctgatttatttttttgatgacaaattagagtgtttccttctcatctcattcactccctgccactcttgctcttaatcataagccagttttagtttgagaggagcacaccagggaaacttttaatatatggttttaaggaaaagtcaggcttaaggacacctttgctccttcatctcagcacatttggaaagaatgatttagtgagagcagtggttgggggtgggtgtagaaagtaatcctgaaacacactctaggataagcttttattattaagtcacttaatgtcttgttttatttattttttctaagttaaaactcgatgagggatataataaaatgaaacagggtttggctcttagctaaaaataaactttaatggatatcttacatgctctatttagagggaatttcacaaaatattgggatatattgattgcattcatttgtaaagcttgattgcattaaaaataccatacaaatatacaactaaaatgctgttactttttagaatctttgtaatagaaaattctcttccctgcttacataactttattatgtctttgtctccaatgaaatatgagctggacaaactaacacaagaacagaaaaccaaacatcacaggttctcactcataagtgggagttgaacaatgagaacacatggacacagggaggggaacatcacacactggggcctgttgggggttggggggctaggggagggatagcattaggagaaatacctagtgtagatgacgggttgataggtgcagcaaaccaccatggcctgtgcatgcttatgtaacaaacctgcacgttctgcacatgtaccccagaacttaaagtataataataataaaaaaagaaagaaatatgagctggaaaattgtaaaaccgtatcctatgcccctgaatatgccattgcattctctgaggattttcattgtaggacagatgatataggtttatttatggtttcttcaagaagggatatttggcatcttgaataacttttgaggagttagtaaatatttatgtatttgaaaaaattctatgctatgctcacattttataaagagaaaatttctatggcttcctttaaggtattaaggatagattaaattgtgaaactgagctgaagccactgttgtaaatgtaaatcactggctgccaagcaaaattctgggctcttcctattattatagaagctttctggccataccccaactaccccttcccaacttccctggacatagttaacctgtggccaaaccctttctggtactgggacatggtctggaatcacagctcagagatttagctcgactgctttccagatgtgcacctctgaagctctctgagcttcagtttcctggactacacaatgggtgttagtaatttctaccttacaggtacctgggaatatttaaaggatattgtgaacatgcaaggtcctggcacttggtgagcattcagtaaacatttggccccacagggaacctgatattaaatcattcatggttgaccagctcttggttaggtcatgcagcaaagcagccaccatgctgtggttttttgaaataaagaaaccacttgtcaaattctctatccatagaaattgctgggggaaaatacagctttttaaagcagatgaaactactagacaaaaaaatgttagaagacaggccttgtcacctgcctttcttcccccaagaatgtttggttcttcacctcccaggtcttgaaggcacagatccaaatgtaaagttgccaagaagttcaaacgttggtggacctggtgtttccattttaggtgtcctgtgcatgctttctgtaacttggttttatgcagaacttgctgatgatgtctctgtaactctgagaacaggaatgatggaagcatgggtctgagtcgaggtcagatgtgtcctctgggcaaggagaaggatttgcccagggaagactacacttgaagaggagcacttgattttgtgagaggttttaggcagagcatgtaagaatcacagtcaatgaagagttttctctcttgcaaaagttccttattatttcatgaaaccacagaaaggtcagtgagatgttcaataggtgagaaagctgtcaagctagacttggttaataattacagttaaaataatcactgatgtatttctttcacacacgtttatcgccagcatattttatcaggaactgacatgcatagatgaataagacatgcaaataaacaattgtgctacagggtgagaggtctataatagaagtttgggagcacagaaaaggcagtgatgtagtcacctagacgtgagaggaccaagggccaaggaagaccgcacagattgccatttgaactgaatcttgaaggagttgggagagtggactatggaggattttgtatgtcaagctaagaagtttggtgcctttgaagaaatgtaagctgggaagtacaatgctcacattttcattttgtaaaaagaatacttgctgcaatgagagaaagcagatgaactagttaagttagaggattactgggattatctgggtgacagatgatgagggcagaactagacttgtgcacttggaagtgatgagaaaaggagagagtcaccatggaacaaagagaaagcttttatttgttgccatttttgataattcttgttatttgttttataagttggtatgttttatttatgggaatattagacatgtcttttcaatgtatgtgtatgttaattacattcataaatattcaacggtttttttttttaattttcctgcctgaaaaatttccagcttgctgtctgtctgggcatagcgtgtgacattttctttgttttagttcattgattcctagttggttcatctccctcagggaacctttggaaacttatagtagcattttttgattgtcacaatgcctgagtatccctgccagcatttagagggcagaggacaggaatgctaaaccgttgcaatacacaggatagttccatactacaaagaattgtctgggcttaaatgccaatagtgcctctgttgagggcccatcttggttgataggaagtgaatagagaggcaggaagggatgctattggtaataagagcagtcatacactgaaacttattatatgcctgatatatagtcaccatagctatagcatttgttcttgtgacactccagggaggtagataccattactattccctttttactaatgagtgaactgaggcagagtaggatatttggccctgggcctcacatacttaactctaatactctgtttttcacatgctttactttcttgtaactttaaattaataataagaggaaaaggagaaccacacttgctttgtgctttactgtttgttacatatcagaatatacctcctggaaacatttctgccagtttagtagaatattgacaagttatcacctccaagcattttttaaaatacggaaaatatttgaagaaatttttttaaaattaggatgcctttgtagattggaagaaactcttatttgatggaaaaacagttggtgctccataaatgcctggggaattgaattgactctggaggcacttagtgtctttagagggtgtcaaagatcttgcaaatttattttaattttaattttaatttttttacttcacataaaagagaatctgcctcacgtatgatctttgtaatttgaagacgtgccagggacattgatgaagaatgtgactttttcttggacatgccttgcacttccctgtttctgtgccagttctagtttgtttcctctgtgaggcgtcccctcccctcagatccatctatctgtagcttaaatgcacctttctctacaggacctttcttgatatccactgaatgttatctgaacctctcttacagcatgtctcctcatgccatgagatacaattatttgtgtgtgtattttatctcttcctctagaagagtaccacattttgggagaggcatagaacaggaccactgatgctaagagtatgcctagctcctctggtctcttgtgtctggcacagtgtcaggcataagcatgcactcaagaaatttttgtttaatagaaagtcaaaagaacagcatgtgttatagtaaagcaactccatcatgttggggaggtaataggcatgctctactctgggctcctgtcgcagagaggattttgtttggcttgaacaagacaaacatttaattctctcttacataaccagcagtggaaggctggtctggtggttccatgataccattagagacacaggctccacagtcctctgctggtgactcccattcctgaagtcacctcattgtccaaaatggctgctgtagccatagccatcctttctctatgccaggtagtgggattgcagaaggagaaagaaggacatgccttctctgtttaaaggagactttccagaagtcccacacaatactactgcttgcatttgatctcatcgattaagacttagtcctatgatcacatttggctgaagtttggaaaatgtagctttttagctcagcacatagttcacctgagtaacactgggttctattactgaggagaaagaggcaaatgaatgttaaagtatgccatgactgcttctggccaaagctggtcgggtgacactgcacgtcttcttttcagctttgaataccacattttgggagaggcatagaaaatttgaaccttatttgaaagagagaaacaagaatgatgagaaaactggaaacaatattacgggggaatgatggaaaaactggagatgtttcttttggacaagagaataggggaacaatggttagctctccaaatatttgaggaactattatatgaagaaggataaaacttattctaaatgactctaagagatgggaaagaaattgtagatatatcgtgtgcaccaaaagaatgctggaatttgactttagggtcacttttaacctttgaccttatatagtacagatgcataccatatagatgtatccataagtttgtgcttttgaggttaaaatattgcttattctctggttacttcatattggaattctctttactgagggttgctatggtgacaacacccttagcagtctgcattttgaaaagctttggacttttccttttgtgagatgtggtctctatgtttcccccatgcttggcgtttttcaaaatgtcatcaagtcagaaacaatctccaaatttatcagagtgaagtgaggagaattttaaaattgtagatactaataacaggggttagtaattctatattgtacaactcagtgattcaataaatattgtcactatcaacttctttggattaagatagctatgtttaggcaactggttagtgttatttagttaagcatgtatttttaaattattactaaatttcttaaacacccttgaaatataattgttgaaaatgtcttaaaaacacagctagtatcaaccagagaaataatttagcaaagagttaatttatttcactaagtagtgatatatttttgaaagcatatggaatagatgtgtgcctataaacttgactttgtgaattaagttttatttttctagttcagttttactttgaatatggatatgttgttgttttgtgaatcttagacatcagaaagatttagttgggaagagaagtaataatgtaaaataaaagtaataataaaatactcaaatttctgtattaaattagcttttgggggaattagctacataattaggttattttaatagtttttcaaactgggttgcagatgatgaatatagaagagctatatatatacataaactctcatataagcaaatatatatgaagcaaaaaaaaaccctgtagaattgagagggagacaatatttggagttgaaaggatcagaaaacactggcctaaaaatagtatcagtaatcaatttttattaaacacttactgatatgccagacccatgatcctcactctaccctcatattaatgttatgagtaagagctcttattatctccgtttttagatgaggaaactgaggcacagaaattaaaatggctgtcagatagtaagaggtggagcagtggtttgaatccctagtatatgactagaaggacttcaccctggacagttacttggcttctaagcagtcttcgcgtgctcttccccttccttgcccttctgtaatattacagtagtttcccagtagtatgcagcatctggctattcagactttgtctcttaaccttgtgtggaaaagctgttgacttttagacatgctgggcagaatggaagaaggaaaatacagactgttatacttggagaaataatgatttcatatgtaagagtagttgaatcaataggtggacaaatttattgaaacttcttgagttaatccagtgatggtaaacgaacacatggccaaatgagcactctgtaaagcatgccttctggaatgcgtattgtcttgtcttgtctttttccttccttccttccctccctcttcctccttttttcttttctttctttccttctttctttctttctctctctcttccattctttctttctctctctctttctttctctttttctttctcccttcccttccctccttccttccttctttcttttctttctctctttctttctttcctctcctcccctactccctctcttcctccttccctacttccttccatttctttttctctttcttttgctctgggttcgctctgtcagtcaggctggagtgcagtgcagtggcatgatcatagctcactgcagcttcaaactcctgggcgcaagcgatcctcccacctcagcctcctgaatagctaggactacaggtgtgcaccatcacacctggttaatttgttttgtttttgtagatactggctctcactatgttgcccagggtggtctcaaactcctgggctcaagcgatcctcctgcctcagcctcccaaagtgttgggattacaggcgtgagccaccatacctggcctcaagtctgtttcttgatcagtaagcctggtaatattgggctgtcttgtgtacatatatgtagatgtacatgcatacatacacatatattccactttgggtggaatggatgaatcttttgtttccagtggaaggagttctttgagttacaaatagtagaataagggctttcagtttaaacagaacccacatgagtgtttcattaatcatgttcacgtgttaatggattctcttgaggcctttggagtcattgcttttgcaatatttccttagggcctttttcttcagtccagattaatctaaaatatattgcactgatccagagatgtcaccaaattctcctgaaaagccctttgactgtatttgggctggcctgtgctgttatggaaaaatgctatctcactgctgatgaggtttctggcattagcaaagatggccttatacatggtaccacaacctatgtggtacgatgttaggagccctgataagatactctgttcccctacaatctgctccatcaagccggtgaggaaggtatgtaggcattaggaatgcctaaaatgccacaattagaaaattcattccttggagggcttctgttttctgctgaaagtgcaaacacccgtagaaggctttaagaatctctcaaacgttcccgtgaataagttcacctgggagcagatttttggggtcagggtcgtgagccatgaaaaccctggccatgtcatggggatctgagggagagagaaggaaaggatttttagacagcggtgggggaagtcaggcggaggtgggaccgtttaactagataaggctctaatcgtctcattcctggactatcagaacagccttttaagtttaagttgcttttccctctttgtaaccttacccaccaaactttgtgaagtgttgagtgcttatagtaaacagagtgaacataactcttcccagggaagaactggctgactttagtttcttggtttctggaaggagatgggatagttgtattggcttgcttgaggatagccaaatggttgtggacaagagggcttgtttcctgacaagtgttattctgcctgaagaatacaaagataaatggtctaccagagcttcagtacctgtttgttgcgttgcatttagtttgaagtgtttgctctgtgcagtggagaatactttggagggtggtcaggtctctctgtttcattactggaaaagaataggagtggggtcatggcaatggggtatttcattcctctgtgtgtgtgtgtgtgtgtgatggagtcttgctctgtcacccaggctagggtgtagtagtccaatctcagctcactgcagcctctgcctcctggtttcaagtgattctcctgcctcagcctcctgagtagctgggattacaggcgcatgccaccgcgcctggctaatttttttgtattttcagtacagatggggtttcaccatgttgcccaggctggtgttgaactcctgacctccagtgatccaactgcctcagcctcccaaagtgctgggattacaggcatgagccactgcgcctggcctcattccttcatttgcaggggctggatgtctaggtttatggaaatctattctcattcaaacagaaataaggtaacaacttaagataataaagtttttctttgaatgaattagaaaggcattattgtatgttattttagtcaaagaatatttttgcatttattgcattcttctgttatataagagaaagtttagagaattaggatagtgaatatttttaatgcttgttttttttttttttttttttgagatgaagtctcacttagtcacccaggctggagtgcgatggcactatcttggctcactgcaacttctgcctcctgggttcaggagattctcccagctcagcctcccaagtagctgggactacaggtgcatgccaccatgcctggctaattttttgtatttttagtagggatggggttttgccatgctggccaggctggtcttgaaatcctgacctcaagtgatccacccaccttggcctcccaaagtgctgggattacaggagtaatccaccacacctggcctttcatgcttttaggaaaaatttgaaattcttttaaacgtgggacctggagaatcgctgaacttcctttttttttcttctattgagacagaatttctctctgctgtctatgctgattacagactcctgagcttaagagatcctcctgctatggcctcccaaagtgctggggttacaggcatgagctactgtgctggccagactttttgaatggaaaactttttagcttggtttcagttgattaaccctcaatttctttatgtccttaattctatggcgtatgccaaggcatgagttgaggtcaacagaaatccttttacgatgatagaaagataacgatgtccaagtttaatgtacagtataatgacttaaggtcaattctaggaaagcctgtatatttatcatcaatttctttttggtgatggaattatatacctacagtatttcatgtaaaactccagaggatcacctgaaatatgaatgatttacaatagacaaaataataaaaatgctaatcgtaggaaaatacaaaaatatataaacaagaaaataaacataaaaatgcataaacaagaaaatagcaagttgggagcaagcttgcttttgactctagtttgacctgtgtttctcagaataaatcttgattttcactcttgcccttgaccgaagcatcctaccaagcaaggtggcttagattttgaaagttttctctcagtcagatagtaggggaacaactcttagaatgttagaattagatgagtagtgggaatgccctggaaggaaccacccttcatggagggacggctgtgcttcaggcattgtgccagaggtttacagggacctctttaatcctcaccgtaacctgattttgcaggtcagaaattttgtaggtaagaaaactgcatactgtatcagtttaaattcaagttcatcaagctaaaccagttcagtaacaaatatttattgagtgaaggttcagtggtaaatgagacacaaacagttcctgccctcatggaacttagagtttggaatgacatagggacagtcagtgctttgccagagttgaaagccatgcatctcttggctttctggtgattgctttttccattggtattcttattttagccattcttactgaatttaatttaaattttacttaattattataatgcctatggatccatgttctgcatattagctcactcatactcatccaagactgtaactataggtacccaacacccagaattgagatggccactgaaaactctattcttgaccaacactctaatataattttattttctttaattgcctttgtaaaaagtataatacaaacaaaactccagtaagcaaatggctttaattatttgtgtgtcagttagtagagattttattgtatatattttctggtatagtttattactgaagccatacttctttttagcattaaaattctaaaattttatatttataatagtgacaaaggtttttactgtaattactaatgatatttaaaacacagattaggcaaaatcttaggaaatataccctgctttttttccttccatttctggcaatcactgcagataaacttgtaattttattcatgttgctattaatatggggacattataaattcatcatgtctgtgcagaaacctgaacaccactttatcacacgtgggtatcagttggtgacaatgtaatattgttgattctgtgtcaacaagctattgaattgtttcaagtcatcacaatcacattataacgtgaagtgataacattgacagagcctgaaagtggtttggagacctcctcatgctatttgagcccaggcataacaaaccagggccaaaggactcctggtgcaaagataacctgctggtgaggcatgttctgaagttctttttgctcaatctgttaaaagcaatgcagtaggggacacacaggaaatttaatgtcattctaccatgagagtatttgcaaatataatatgtccttctttatagatttacaaggcaatgatttggcattacatttgtttctgtatagggaaattaaaatcatgattatgctatattagcaaattgcttataaaacaaattacaatttttgattgtaggataagatgtactcttgtagccccctccctccctccctccctccctccctccctcccttccttccttcgttccttccttccttccttttcttccttccctccttccttccttgtagatctctttgtcatcttttggacatcatcttagtttcacacatatattctaacacatcatatatagttcgtttattgagggtaggctgggtactaggaggtcctgtaacaggccctgggaatacagaggtcgcttagtctcatctgttctgttccttatatttcatatatccaggtcgtggcaggagaattttgaactttctgcttataaaatcatttccaaggcataacttgtcactaaaggggaaaaatacaaaaatattgtgtaaaacatcagcaaaaccagtttttaaaaaagagaatgacatattacatttttattaaaaatgttgacttcagtttactagatgattaattatcagtacttactgcccaagaaaaggcttttaaacttattgttggaaatcttttggcactcttgctgcacaatatttcttaatagtttaagaaaattcttactctgttggcagaagccatacatgcccatcactaaatggtcaaggttgaggcatgcctgtgtgtgcaactcagttattcatctaatgaatgaactgtggataaagtttagtgtttgtgtgaataacaatgcaatgagcctcaccatcaccaagcataaacatttctgataagagttgtcatcagagttgcttattgatgttgaagcattggtttcgttagagtaaactatgtatatatatgtgtatgtgcatgtacgtatgtgtgtgtatatatatatgtatatacctgatctctactttctgaaaatttacacatttagaatgggaggttatttagttcctagcatgtaacgtgtgacttataaacccacttagcaattacatactgcttcaatctgaatttgggccatagctaaataagggtgagttgccattttgtaccaaattgaggttaaggtgcaagatgccaggtgtcatttaaaccaaggttaggatgcaagatgctaggtctcatgaaatttagtgtctggacactgattgctaaccttgacatctctcctttctgccctctttttctctgtctccctttttctttttcctcctatttttgcctcttctctctcttctcgtttctttagagcttgttgttactattgcaatagtcaagaactaaataacatggagttagggagaaggaatacagcaaggtgtttataagattcagtcaagaaggtccatttagtagttataaataatttagcctatgactatggggaattaccaaatctaccaattgagagtcaatttcttctcttcttgttgctattgtcataatttgcagtatcaaactattgttcacttgataacctggtgatctcatctcattattaagatgaccaaaatgaaagtgatgcttatagctttaacatatgtcagtttgatttatggttcaacacttggacctaattaatcaggaaaaccctaatttgatgctgtctgtcaatgctagtctgaaacaccattcaaaagccttaagcaagaaagctgcctttctaaagtctctcttgtcatttatttctcatgaatgtccattttcttttttagtgtttgattccactcaaccattttccagtaatttatattgctaatcaaaaagctgtataggaattctctgggtgactaagactggaaatgtgctctgaaatgggaatgatttgtagattttgcacagggtgtgttaaatcatgaggtgctgaagggcatgttattcttgtaagtagtttgattcattgggtccttatttacctgggcaggcaggccatcttaaattttcttctgtttggatagtcttcttttcaacatcctataagtgtagctcttttaccatgaaagatgtaaataaccagttagtctctagtggggattgggggcagaggagaagaaagtcttgggcttagtttccttccatgtgtagggaaggttcctctccaggaacctcagtgacttagctgatagaggaggcactgcatgagctattcagggggagcacagaaaagactggtacaaatacactttcagtgctttgatgctggctaacaggaagttttcattgctcagcgttcttggtaaaaacttggacattcttttgaatgtttgagcgcttaagtgattgtcaatttatatttttaattttttgtgagtgtatgcagttgggatggggagaggacatttggagaaattatttttttgctctgataatgaatacggatgggaaaagtttgcaccataacgcagaggtgcttatgactgtttttcatagccacaatcctttacattaatgatgaactacttgaggatttcagatgcttgtgtttttctagtgtggtcccctccccttgaaggggtagacctgtggacgtgtgatggaatggagcattccagggtgaaacaggccttcctggaaattagattctttatcacactcccaggggagttcatttcaagttgctggtactagcagtggcagcgtgagattgcccaatcctaggtgctcttattgatgggtgggaaggagtgggattgctgttcaagaaattttattatctttagaagggaagaatgtattatatttttttttagatgatctctttcatgtgggctaagataattttgagctctgactgtccaagctgcttagaggttctgagttgttctccactgggggtggtactgccactttcaagcggcatagatgtgcctgggagtgtttttgtcaccgtgatgtgggggagcactactggtgttccacaggtgggggccagggatgatgtacatactgctttgaccaggacagttctgcaagatgagtaattgtcccaccccaaatggcgatagcgtcctctgaagaacctctgagaagtgtggctttgcttataatgttctgtagtgctgatggactgcctgattgtagaggtgagaggtgcataatgaaaaaacaggtgggatgtaagagccttgggggagaaagacaggtgactagtgtttaaatggaaacggagaagggtagctcagttataaatggctcagtttaaatctctcattgctcagaattgagaggctgctcaagtagtacatctcattctgctgccatttggttattggaaaggcactttattttaattactaagcaaatatttaagtaatctttgagatcaactatcttgagagctgactggattctgtggcctggatactcagacacgtccagcttggagaggatggtgggggctggtcactaggatgttgttggcaatgccctaaggcagcagtccccaagctttttggcaccagggactggttttatggaagacaatttttccatggacagcagggtggtggtgggggagggatggtttcgggatgacactgtttcacctcagatcatcaggcattagattttcataaggaatgcacaacctagatccctctcatgtgcacttcacaacagggtttgtgctcctatgggaatctaatgcagccactcatctgacaggaggtggagttcaggcaataatgctcactcacccgcctctcacctgctgctgtgtagcctggttcctagcaggccacggaccagtaccagtttgtagcccagggactggggacccctccctcatggaacctgttcgtagtttgccatgcaagtggacctgctttggatgcttctggggcagctggaggggctgcaaggtgagacccttctctgctagcagcctcttgcctgcacctaccagcctgcttactgggctcagtgttggggtgaggttctggggattgaagtggagctccaagctcttttcatggtcaaagtctgtatgctagttcaggctttacctactcagagtgatcttcacttttaatgcagttattgtctgagtaatcaccctcatactcatttgataggcactctttggcttggcactcaaagctcttttttctccatcttctcagccttgttgcctaccactctccaagaggtcaccactgcttgggtcatacttattagaccctcacccatgctaagcttctgtcaagtttttgttcttttttttcttagagacaggtttcaccgtgttggccaggctggtcttgaactcctggcctcaagtgatctgcctggcatggcctcccaaagtgctgggattacaggcgtgagtgatcacgcctggcctgtcaagttgttttgaccctacacacaaagcctggtctccctcttcaccttcccaaatcctgcttattcacaaagacccagtgtagtcttataattctttgtgaagacttctctgatgacaccggcctgcagtgttattttttttcgccaaagccagttagtttttattatctccattgcttatttggaaccaaattgtctgttgtcagaggcatagctttggaatcagactgcctcagtgtaaatctgtgctccactacctaatagctgtgagatttgttcaagccttgttgtcctcatctatgaaatggggccattgataccatctcacaaagctgttgtgaggataagtaaggtaatgcatgggaagcagttaaaatattgctggcaagttctgggtgaacaaatgctgtcgctttgcaggacatgaaatgatgaaataagtacaggctctggagtcacacaggtcctggggctaaatcagacttcgacattttctacctttgtggcccttgggggagttggttaatgtcactgaggctcaggttccccttctattaaataagtataaatctcacatcatacagttctgagaggatccagtggatatgtataaagctttatatattgtataacacatagtaggtactcagtaaacaatatcagctgttgttattgcatggatatttaatttataacatataaatcacttttgcccccaataaacttataggctctgtcaaaaaaggaccatatcttatttttcttttttcttccactgatcctaggacaattgcatatagtagttatgaatttatttgtggctttagtgaatctggcatcatattcttttggtccttatttatttattcatttatttttgcacttaaatgatgtgtctacatgataatgcatcaatttgcattgtgggttttgtccccaaatctttgacttcttgaaatgtccttatagtattgttttgctctaagaaaacatcagggctctgaatcaataattgggacaaagcagtctattcagcagtttgtaaactggattaaaaaaaaaaccaaaagaattcctgccacctatttggtgatctgtaaggaaaaccagacagttaaaatgttgcacagaaagagactagcaggttggtttgctgttcctgtcttgtttcagtttcattaactaaatccttgactattctatcaatttgacactagacagggtagagtgctccatacaatttgttatccttggctatcatcactatagtgtaaagttttggaaataagcaggtgaccctaaatcttcaaaaggggactggccttgtttatgtgggcaaggtatgggaattgtagtgaactgtcagccaacttatgaatatcagaaggatgtctatccatactaaaggaatcaaaattaagtacagaaaaagtgaagcaaaaattatggataagttaaggaattgcctcttaaatttgtttgtttctttgagttcagtgaaggtggaactattaaaatgtgatttactcatacaaatttttaaaaagtggactgtacctcctcaggtagaccaagtgtttggaaggaccagcatgtgttaagaggatctagcggggaaataggatttgccacagaaattaccttactctgttaactttggacaatgttccattgactaccacttgtctttgtcttataagaatagaatttacggaaggagaaagaaacttacaaggaacgggtaaaagaatgaaactgctattaacatgactcaatgtttttttctttctttttttttttcaaaaaaaaacttctagatattccccttttttcagattattccagattccatttttctttctatggatttaagatggtaaatttctatttaaagtctcattgtttgctctgatagctttctacatctctgatatataatggtctcagcaggctgagttttacaaagagaattctacacttcctgacgaacatgcattagctattccataagcacccggtgctgtgccagaggctgtaaatgacacagaggaatgttctcaatccagcgttgttccttgctgtggaaaacaaacaggcaaatgacttctcttctctgggcgctatctgttactctaatatcttatcttaacacattcttagtccaacacttacccaggaagcttgggatatggctacttatgaagaaaggattactcttttttttttttttccccctagctttgggctctttatgaggttggaaaacaagtttattcctatgtctaataaaattttactaccgatttcaaaacgcttaaattttttttgcattgctttcaattgctgcaatttttcctaagcccaataattttttaatgctatgttagtcaccaagtaaactactctttttctccaactgaagtatataagcactatggattctatgccagcccaataatgaactcaattaatgttaattgagagcagctttgggggaaaaaatcagatttttacattcattcttgagtttagtggaataaacttttttttttggtgaaagggaacatagagtagtggtcaagtagcacgaatgctggaatcagagctgtcagattcaaatccttgctttgcacatatttgctgttggatctttggcaagttaccgaattgctctgtgcttcaatttatttatttgtaaaatattcataataacagcatctatttcatagggttattatgaggattaaatgagctaatgttggcagagcacttagaatggtgtgtgccatttaagtgctatttgagtacttcttttcatctttgcaccatctattctgattgatgggacagacaggggctagtgctggagagatagggtgttcatttggttctgatggttcctttgtgatgattgcctggttcttaacaaaaggtttttatttcaatgtggattgtattttcctcctttcctccttggtttttactagagggattttttttttttttaatcaggcagcccccaaaccagagaggctcctggagaatgttttaaagttacataaatgattgtttgcaagattacttcttggctaaaactggattggttgaatgtggcagttttgagactattttctgaacaaagttttaaagctggctctatgtagattttttttttctccctgtgggtggctccaatgtatgaaatcatccccttagctttttatttttttaaatcttcaaataaataacaaaatgtagataatatctagataaaacttttggagggcttgtgagtaaaggctacttatttaaaacaaaacactcaaaataaattgcatatagactaattgaagtaaggggcacctgcaattgttattagacctaatctagaccttttcactagtggtttatttttggtttatttttaaacaacacatattccctttatgagagaatgagcttctgaggccagtgaagcattttggctgatggctgagaggtcacccagcaatgataaagtatcagtttgttttttctggagagatatttccaaacaatagtcatttgggagttataaacaggcatcaaagttactactgaaaaggtgaatttgacaaatgaattatagatctgttgataaattgagtaaattggatttgatatattagataatggagtgagatcaagtgtgaaaatcactacctataaaaattacttaattgcaacatttccccatcagtttcatttttcatatgtgtgattttaaataattgactttgaagtgttttataaaatgacttttgggtctctattttgtgttcttttcatgatgtgtttaacttggtattttagtttggcaaaaacaaacaaatgcccccaccccactcctcaaaaatgggacttgtaataaaagttgcttaagaaatagcattaattatatatattttcaaaacaggcaatatatattgttctgataatttcctcctaaatactcagtctctaaatttatatttttcttttctccatagcaatatgaaactgtctgtaagaggactgttctttatgattgttataatttttcaaccagaagatactacctttacaacctcagatactaagggagacaaatgtactgaaattacaaatgtattatgttggattactaacaatagacctaattgataaaagtgatttaatatatgttgtgttaatagctaaacctccaaagcccctaatctcccatggaaatattgctttgtagaacaaaatccaatgagaagttctgggattccagagtgaatttgtacattccttaggggcatttttgcaagggaggttgttgtgttttaaaggtagttgataagagacctgcaccaccaaccccagacctgcaccaccaaccaccatcatgcattagtctatagaaggtatttgggtgtacgtactcctgtaccactcggtaccaccatttagccaagcgaagtttctgaccatttgcagcatacattataaatcaggatgtcactaccagacaatcagatttgaacattccatgaacaaagtagcctatataccctagaaatagatcacttaactatgtttatgtcatgctgttgatatgcctgcatttacacaaatcaggatagcacattgcttatttattttaggagtaggtaattgatctgtatatttacctaattttgggtaattagccaaaaattgaaatgggtaatttagcatgattgcttaaatacatggggaagatataattattcttccaactgcaaaaatttctcctttatcccttgggtttgtgaaagaataaaataattttgagtcttctctaagtggggctggtagtggctgctttctttgaaaaatttttctatgtggcatataatgcttgggaaggtcactggccaggtatttggggaactttgtcccttggggagacctaggaaaatcacaggatatattagttcagtgaagtgagcttgtttaagttatattgtccttccagtatcactaggggctatcactgccacttggggtgtcaacttttggtgtcaagtttgtatactcttgttggctgcagagattttgttttgttttgtttttggctctttggtttaaaaaaaattgtttgcagagatgagcttatagatctggcaagttataatttaatttttaaaaattaagacaaaatattagtctgaatctaagaatgaaaggccataacttgctatatatgatttagtaataaaaaatcacttaaaaaataaggtgaggaactcaaaaaagtatagtcaagcaaatgaaaagttactcacgatgttatcaatcagagataaccactgttaacattctggtctttttacgcttttttttttttttttgcatatgtaactctgttatcagtaaaaatttacatccttgttttggttacattaaattataagtatttctctaagtacttagaatttctccataaccattttttaagttactaatatgtcaatataaagatgtaaacaaatttaatccttttattgttggacatttaggaggtttgcaacttcctttgctataaataatgttgcgatgaaaatctttatacataaatctttgtctacttctttgattagttccttaggaaaaaaatccttgaagtaaaagtactaaattaaagatcaagtatttttaaaaagcaagatacgtgttgtcaaactgctttcccagtgagttccatcaaggtacacactaatcaactgtgtatgaaaatcactttcttcccacggatgttcaaataaatatttttatattagcattgggagaatgtttacctaattttctaatttgcatttctttgattatctaattagttgaataatttttcattttatcaaaaatttatatttcttcggttaaatatctgcatggcataagtttttacaatttctgtctattattgcagaatgtgacagtgcgcattttcgctgtggaagtgggcattgcatccctgcagactggaggtgtgatgggaccaaagactgttcagatgacgcggatgaaattggctgcggtaagtgaggaggggccaggctaagttctattttgagtaacttaagtgcttcgtggtgatttcagctgtaacaaagagaagagctatgccttttagtgacagagccagggctgggcccaagtcttttgagatctgtgtggttgaatagagaactgatggcattaacaataatttcactcccttctgaggtaggggttcaattcacattgatgatagaacatcagtttctatctcacccttatcccttgaccacaactttgatatggaaacatatttgggtgcagttttctggagtctgtaagtgattatttctaatattcactctgtaaattttgtgtacccacaagaacaaacaaaaaataatgttatctgaactactgtgatttgtaagtcaaagaggagtccatttttatgtaaaggatgtagaataacttgtgtcaattaccataaagaaatcacagaattggttagtgtgatttatgttttttaaaaattctagttttaaaaaatttgaaaaatacgataatgtagtaaacttcaaatctaattaattataaaatgactttcacattcattttgtcatttagttttctcactaatcttctgaggtcggtttcagattaggaaattgagacttggagaagttaagtcatttattaaagttcttacagttggtaagtctatgcacagatcccattgctcttcccaacttcctatcggtgatcagtcatacatctgcaatttccttcatcccagcaggtgaactaatgagggttatctttcaaaaatcaggaaagcagttgaaaaatttttgttttgaattgttggccatcttatggcataccatagcagtcaaactttggtgtgtcatttagatgacaacgcatttgaaaatgggaggaagggtaaggatggggttctgtacagtgctcctcaaatgctcatgcacaaatggatcacccaggagctcattaaagtgcaaatttagattccatattttgaggtgggacctgagcttctgcgtttctataaacttcctgatgatgttgatgctgctagtttgtggactgcactttgaacaagggactaaactatatttgtagagacacaatcatgtgctaactatttgcctcctctgggcttactgagttcattttgattaaacaataaaagcaaaaaggcaagggcagtgtatctggggtaaaggaataagtgaacagctatgccagcaactcttcagagattgttacctgtattatattttattgacctgtaaaaataataacaataacaacaatatcaatgacgatagtgatagcaagtaacattacatgacactttcacatacattatttaacttatttttcacaacaaacagtgagatgagtatagtccccattttatgatgcgtacattgaggttcagagaacctgccaaagatcttaaaggaagtaaatcatggaaataataattatttgattctgggttttctttcccaaatctcatgaattttccagttcatcatgatactttactattagttattatgaaacaaatagtttaacagtaactcacagttaatgtttacttgaatgaagcttttaatctaacacctttatcataatttttgtgtgtgtatgtgtgctgtttgttttattctctgtgtttttaagttgctttggttcatgagtttgttgtgatgctgttgctgagcttatttgacagtgaactctgactggcgtccacagactctagtataagggttgtttactatttgccttcaaataaattgggcaggagttgacatgatacactcttctggaacaagcattgcttgctagtataatggggaggatgattgccataatgagtcctcttttggtttgttttagctgttgtgacgtgccagcagggctatttcaagtgccagagtgagggacaatgcatccccaactcctgggtgtgtgaccaagatcaagactgtgatgatggctcagatgaacgtcaagattgctgtaagtgtttggagaggaatcttgctttggctttgtggacacctaaaacccaacctgtcgcaaagaagttacacacaatgggatgattctttataaatgtggagcagagccttaaatcataagggaacctatgccagcaatctcattcaggggttggatgatattgaaagtacggatgtactgaagaattatgaatataccccagcaatttggaagtgagataggttcccaatctttaattttgattatgttatgctcaagaaaggaaccaaatatttattggagtgtatagctgggtgtcttcatgtgtgtggttgacagctgaatgagtcctttggctctgtggcatacttggtattcaaaccttccactccttctgccccaatattaaattctcttctttttgactgagtggaagtaggtaggtttgttggagggcttcttggtggttacttcagtgactgctgccacagccaccatagagagagcttgaacaagaaagaaaatagtagcgatgaagcggatcttggcaactgcggcatccctggacattgagggggtttggttcagtaacctggaaaaaacctttaaattctaatttctttggaatcaaactggaaaagactgttttaataggtctaacaataattttattttatatatttttattttattattatttttagagtcagggtctcactctctcgcccagactggagtgcagtggtgcgatcacagctcactgcagcctcaaacacctgggctcaggtaatcctcctgcttaagcctcctgagtagctgggactatgggactataggtgtgcaccaccatgcccagctaatttttaaattttttgtagagacatgatcttgttacgttgcccaggctggtctggaatcctgggctaaagtgatcctcctgccttggcctcccaaaatgttgggattataggcatgacccccccatgactggcctgaaaataattttagatgagagtaatgttgggtaaatataagatggcgacctatgagcaatttgtctatcacatgtatcattccattcctttctctattaaggatatttgtataatttaaaatcattcttgtatcattgtggatgtttttggctgcaaggaaagaaaacacaactcaaaaaagttaaacaaaaaggggatttattatctcacataataagaagcctaactatagggttgttccagggttgattaattcccagctcagaaatattatccagttttttctcacttttttgctctgccatatttatcctattggcctttcttgattgcataatagctgctcaagtctcaaaatttgcatcctgaaggcctgacattctctcaggcagagaggaggttcttaatagatagatactaaatgcataaatgatgggttgttcatctttaggctatatagttttgagtgtattttctcttactcctctcacagagtgggaagaaagctgagctttattttgcgattcaatgtgtggtggatgaccctttgctaataataatactttacagaggggattggaactactaagggcaactgcttgggaaaagagactggagataagtttatagcagtcatttaaaaacaatattgcatatcattttaaatgactatacatttcatgaggcaattctcccatttttaatgatataaaaattctccattagatatcttttaaccacaaacaaaatatgccacctctgtattcactaaagttaccagataactcctgattgccaatgggcacttttccttccttctcacactggaagggcgtttagattgcacttgactctggagaccattcctccttcttgacaccactcccttggctgccatgactcccagcagtcctggctctcttttgagctgctttggtcattccattttattttcctcttctactcagcccttgagtattggtgttgctcagagccctgccctgagcagcttttctcattctggacactctcaggatagtctcaccattctcatgattttagtgaccctctgtggcctgatgagacttaaatctatgtttacaacccagatttttgcccacacttgaatcttgtatactcaactacctttggacctctgcaagttgccttgaactcaaggtgtcccaactgaaaataatcatcttccctcctgaactggattttccttctatatttgctagtctacatattttatctttattaatagaaatagcatttaacccactatgaggcactggcagaaaatacaaaatcagtcttaaactattggaaataggcagatggaggctctcttacttgttggatttgtgaaacgtatttcataatgaaagtattttattagatgaagaagaaagattgctgtaagtgacatgaaagatataatcaattaacatgaaaaggctatcacaatcccctaggcacccatgctagaaacttggaaattattcttgattccttcctctttttcactgcccacattgaatcaccaactcctgcctaatttgcctcataaatatttctaaagttaatctcttcatttctctctcttttatttttattttttggcaaggacagattttttttttttttttttttgagacagggtcttgctctgttgcccaagctggaatgcagtggtgcaatcatggctcactgtagccttaacctcctgggctcaaattgtcctcccacttctcagcctcctgagtagctgggactacgggcgcatggcaccatacctggctaatttttttttttttttttttgtagagatggggttttcccatgttgcccaggctggtctccaactcctggcctgaagtgatccacccaccttggcctcccaagtgctgggatgataggtgtgagccaccatgtctgacccatctctttatttctgctcccactgccaacatctctcatttgggtgtcggcagtagtctctgggttggcctccctgcctccagtcctgtggatccttagattctctctgacactgatgttggtctaactaagattctttggtagctctccattaattccaggagaaagttccaattccctaacacggtttacagtggcttccaagatgtgactagtgcttattttcctatgtctatcatttgctattcttgccttgaagtggccacttgggcacagcagtgcttttagttcctgtgggtgtgccatgctgtgtcctagccttttgtctccgtgcaagctgcctgaatgctgaatgctcggttctagacagtccttctttgcttttggcctacctgactgctgcttctttaagacccagggaggtgtcactttttcaaggaaactgtccccacccatgctcccatcccagagtgaattaagttcctggattgatggttctatcattcctgtgtgcctataatccactttcataattgttttctaattactccttagtgtcccctagaagtctatgagcttcttgaggttagggattgtgccttattcatttgcagatccccatattgctatactgtgtggtacattataggccctcaacagatgtttgtgtaattaatgaatagatgaatctcagcattagattggttgatggaattatataattttaatttgttttctctctacatttgaatgagcttttaattgcttcttcgtaagccctttgaaaacctaagcacaaaatttagaattatttgggcttgacgtaaagaagaaagccaagttaattgaaatagtactgattcctgacctaggttcttttcatattttgtttgagacaactcatgacttgccttctcgggaataaaagaaagttctttaattttatgtgaaaattggcaatatatacttaaataaattatttggaaatttaatgaggaagtattaatctctttaacctttttcagataaaattgtgtctctgccatgggcagaattcagacacttaagtgccttctggaaaaatctatctattctgcctttattaatagaagtaaaattggacccacaggtataaggtacttagagaaaatatgaaattatttagtgttagaagtaggctgacttgaaaaattttgtttgctgttccagaattataagacaccattttactaattaaacagaaagaaggaacaaaatgacaaggaagatataatcaattaagcatagagaagggtgttaattatggttttataattattatatcttatcacatgataatttctataagtttgaattttcaagtaccaccttgaaaactgtcactgtctacttatcttttacgtatttttttttttttttagagacggggtcttgctttgctgcccaggctggagtgcagtggcatgattacagctcactctaactacataaaaagagaagttttttttggctcaagtgatcctcctacctcagccttccaaatagctaggactacagatacttggaagtgagccactgtgcccagctaaatttagttttattttttttaagatataaggatctcactatgttgcccaggctagtcttgaattcttggcctcaagtgatcttcttgcctcaatctcccatagctgggattaaaggcacgagccactgtgccaggtttacttgtcgtttgaaaaggtttttcatgttaagttttggtggtacattccttaacagatctaattttatcacaaaaccaagttttgctgaacctaaatatctatactacatataagtaaaagaagctctgtaggctgggagcctcggatccctgacagttttgcagaacgctgatatctatggactctaaaatagacttcatttatagatacccacggaccactaatggacaaaaacatgaatcggtatgtattgtggcattcaaatcctagcgctttgggagaggagggaggttccaagatggccaaacaggaacagctccagtctacagctcccagcgtgagcaacatagaagacgggtgatttctgcatttccaactgagctttgaagagagtagtggatctcccagcacagagtttgagatctgagaatggacagactacctcaagtgggtccctgacccccgagtagcctaactgggagacacctcccagtaggggccgactgacaccggatacggccgggtgcccctctgagacaaagcttccagaggaacgatcaggcagcaacatttgctgttctgcaatatttgcagttctgcacactccactgatgatacccaggcaaacagggtctggagtggacctccagcaaactccaacagacctgcagctgagggtccttacggttagaaggaaaactaacaaacagaaagggcatctacaccaaaaccccatctgtacatcaccatcatcaaagaccaaaggtagataaaatcacaaagatggggagaaaccagagcagaaaagctgaaaattctaaaaatcagagcacctcttctcctccaaaggaacgcagctcctcaccagcaacagaacaaagctggatggagagtgactttgagagttgagagaagaagtcttcagacgatcggtaataacaaacttccccaagctaaaggaggatgttcaaacccatcgcaaagaagctaaaaatcttgaaaaaagattagatgaatggctaactagaataaccagcatagagaagaccttaaatgacctgatggagctgaaaaccatggcacgagaagtacgtgacacatgcacaagcttcaatagccgattcgatcaactggaaaaaagggtatcagtgattgaagatcaaatgaatgaaatgaagtgagaagagcagtttagagaaaaaagagtaaaaagaaatcaacaaagcctccaagaaatatggggctatgtgaaaagaacaaatctacgtctgattggtgtacctgaaagtgacggggagaatggaaccaagttggaaaacactctgcaggatattatccaggagaacttccccaacctagcaaggcaggccaacactcaaattcaggaaatacagagaacgccacaaagatatacctcgagaagagcaactccaagacacataattgtcagattcaccaaagttgaaatgaaggaaaaaatgttaagggcagccagagagaaaggtcgggttacccacaaagggaagcctatcagactaacagctgatctctcggcagaaaccctacaagccagaagagagggggggccaatattcaacattcttaaagaaaagaattttcaacccataatttcatatccagccaaactaagcttcataagtgaaggacaaataaaatcctttacagacaagcaaatgctgagagattttgtcaccaccaggcctaccttacaagaactcctgaaggaagcactaaacatggaaaggaacaaccggtaccagccactgcagaaacatgccaaattgtaaagaccatcgaggctaggaagaaactgcatcaactaacgagcaaaataaccagctaacatcataatcacaggatcaaattcacacataacaatattaaccttaaatgtaaatgggctaaatgctcaaattaaaagacacagactggcaaattggataaagagtcaagacccatcagtgtgctgtattcaggaaacccatctcacgtgcagagacacacataggctcaaaataaagggatggaggaagatctaccaagcaaatggaaaacacaaaaaaaggcaggggttgcaatcctactctctgataaaacagactttaaaccaacaaagatcagaagagacaaagaaggccattacataatggtaaagggatcaattgaacaagaagagctaactatcctaaatatatatgcacccaatacaggagcacccagattcataaagcaagtccttagagacctacaaagagacttagactcccacacaataataatgggagactttaacaccccactgtcaacattagacagatccacaagacagaaagttaacaaagatatccaggaattgaactgagctctgcaccaagcggacctaatagacatctacagaactctccaccccaaatcaatagaatatacattcctctcagcaccacattgcacttagttcaatattgaccacatagttggaagtaaagcactccccatcaaatgtaaaaggacagaaattataacaaactgtctctcagaccacagtgcaatcaaactagaactcaggattaagaaactcactcaaaaccgctcaactgcatggaaactgaacaatctgctcctgaatgactactgggtacataaagaaatgaagacagaaataaagatattctttgaaaccaatgagaacaaagacacaacataccagaatctctgggacacacttaaagcagtgtgtagagggaaatttatagcactaaatgcccacaagagaaagcaggaaagatctaaaattgacaccctaacatcacaattaaaagaactagagaagccagagcaaacacattcaaaagctagcagaaggcaagaaataactaagatcagagcagaactgaaggagatagagacacaaaaaacccttcaaaaaaatcaatgaatccaggagctggttttttgaaaagatcaacaaaattgatagaccaataggaagactaataaagaaaaaagagagaagaatcaaatagacacaataaaaaatgataaaggggatatcaccaccgatccctcagaaatacaaactaccatcagagaatactatacacacctctatgcaaataaactagaaaatctagacgaaatggataaattcctggacacatacaccctcccaagactaaaccaggaagaagttgaatccctgaatagtccaataacaggctctgaaattgaggcaataattaagaggctagctaccaaaagaagtccaggaccagactgattcacagctgaattctaccagaggtacaaggaggagctggtaccattccttctgaaactattccaatcaaaagaaaaagagggaatcctccctaattcattttatgaggccagcatcatcctgataccaaagcctggcagagacacaaccaaaaagagaattttagaccaatatccctgatgaacatcgatgcaaaaatcttcaatgaaatactggcaaaccgaatccagcagcacatcaaaaagtttatccaccatgatcaagtgggcttcatcccttggatgcaaggctggttcaacatacacaaatcaataagcgtaatccatcatataaacagaaccaaagacaaaaaccacatgattatctcaatagacgcagaaaaggcctttgacaaaattcaacagcccttcatgctaaaaactctcaataaattaggtatcaatgggacgtatctcaaaataataagagctatttatgaccaacccacagccaatatcatcctgaatgggcaaaaactggaagcattccctttgaaaactgtcaccactcttattcaacatagtgttggaagttctggccagggcaatcaggcaggagaaagaaataaagggtatccaattaggaaaagaggaagtcaaattgtccccgtttgcagatgacatgattgtatatttagaaaaccccatcgtctcagcccaaaatctccttaagctgataagcaacttcagcaaagtctcaggatacaaaatcaatgtgcaaaaatcacaagcattcctatacaccaataacagacaaacagagagccaaatcatgagtgaactcccattcacaattgcttcaaagagaataaaatacctaggaatccaacttacaagggatgtgaaggacctcttcaaggagaactacaaaccattctcagtgaaataaaagnnnnnnnnnntccaatagaaagagagtcaaatgtcccgttgcagatgacatgatgtatattagaaacccatcgtctcagcccaaattctttagttgtaagcactttagcaaattctggtacaaatcaagtggaaatatcaagcacttcttatccacaataacaacaacgagcgcaaatgggggtactctcttcacattcttcgagggaataaatccttagattcaattacgagggagggaggaccttttcaaggagaactacaaccattctcagtgattaaggacacaaacaaatgaaggaacatttttgcttatggataggaagaatcaatattttggaaatggccatactgcccaaggtaatttatagattcaatgccatccccatcaagctaccaatgactttcttcacagaattggaaaaaactactttaaagttcatatggaaccaaaaaagagcccgcattgccaagacaatcctaagccaaaagaacaaagctggaggcatcatgctacctgacttcaaactatactacaaggctacagtaaccaaaacagcatggtactggtaccaaaacagagatatagaccaatggaacagaatagagccctcagaaataataccacacatctacaaccatctgatctttgacaaacctgacaaaaacaagaaatgggaaaaggattccctatttaataaatggtgttgggaaaactggctagccatatgtagaaagctgaaactggatcccttccttacaccttatacaaaaattaattcaagatggattaaagacttacacgtcagacctaaaaccataaaaaccctagaagaaaacctaggcaataccattcaggacataggcatgggcaaggacttcatgtctaaaacaccaaaagcagtggcaacaaaagccaaaattgataaatgggatctaattaaactaaagagtttctgcacagcaaaagaaactaccatcagagtgaacaggcaacctatagaatgggagaaaatttttgcaatctacccatctgacaaagggctgatatccagaatctacaaagaacttaaacaaatgtacaagaaaaaaacaaacaaccccatcaaaaagtgggcaaaggacatgaacagacacttctcaaaagaagacatttatgcagccaacagacacagaaaaaatgctgatcatcactgagcatcagagaaatgcaaatcaaaaccacaatgagatatcatctcacactagttagaatggtgatcattaaaaagtcaggaaaccacaggtgctggagaggatgtggagaaataggaacacttttacactgttggtgggactataaactagttcaaccattgtggaagacagtgtggcgattcctcaaggatctagaactagaaataccatttgacccagccatgccattactgagtatatacccaaaggattataaatcatgctgctataaagacacatgcacacatatgttttttgtggcactattcacaatagcaaagacttgggaccaacccaaaagtccatcaatgatagactggattaagaaaatgtggcacatatacaccatggaatactatgcagccataaaaaaggatgagttcctgtcctttttagggacatgaatgaagctggaaacgatcattctgagcaaactatcgcaaggacagaaaaccaaacaccgcatgttctcactcataggtgggaattgaacaatgagagcacttggacacaggatggggaacatcacaaactgggacctgtcgtggggtggggggagggggaaggataatattaggagatacacctaatgtaaatgactagttaatgggggcagcacaccagcatggcagatgtatacatatgtaacaaacctgcacgctgtgcacatgtaccccagaacttaaagtaaaataataataataaaaaaggaattataaaaaaaagcagctttgtaaaaattgagagcaaatcttttttcttccattaggggattatattatattttttagatgatcacgttttcccccaaagctctttgtatgtagacaatttaaaatcccaggataagataatgttaccatgttatggtaattcctgcctcagatttacaggatagctttcacgtcatgcttgcgggcatcagttcactggattttatctgttttatccggaggcaaatttcatgaactgctgatgccctgctttcacctgtactaatcaacatgggatgaaatcaagctagcttaaatttttttctctttataaaattgatacatggtcaatgtagacagtttataggatagaggaaactatatagaaaaaaataaaatcactcatattcatattcacaccacgctggaataactgctattaaagctttggtatatttccttcttgtttatacaaggatttcaatgggtgtgttgggggtccttggttaatacctatacttgcaaaatttttatttcattaaactttttaccatataggtttaaaatctatattgtattctttacacatgttgataacgtaattgtgtacatagcatgcttgagtgtggacactattctctgggcattttgataatattatacttctgtttttgctttgtaagctcagcttggtggtagccgggtactttaccttgtgtccctatgaactttatgctttccaatatccttgttaatgccaatagattagtctgtgtctagcaataattataaattaagtaataattttttctcttcgcagcacaaagtacatgctcaagtcatcagataacatgctccaatggtcagtgtatcccaagtgaatacaggtgcgaccacgtcagagactgcccagatggagctgacgagaatgactgccgtgagtctgttttagtccttgcactgtatttggtttcacccttgtccctttggcattttaatcaatttgttagatttgttgatggacataaatgcctacaatacgcctcttgttattgcaatctcttggcagattcttttgtggattaggggtgatgttctgataagagtctatttttaacaagacattctaagagtgtcctgccttagtgcatcaagtttctgtattttttatagtaagagacttttaacatgaacatagattctgaaaggaaggataattaaatacattgagtacagaatcaagtttggtaaattttaactgttattacacagctatagtaagtttctaggtcaaatttctcactagttttcctgcttttatgaactcaacatttttcagattacctttggaaaagtgttacattttgaaaatgtcttttcctataacagcagcatactatatctctttgtaactgatcaccacaaaataagacatataaatcatagtattcgatgtataatgtataactattaccacaccaaaataagaaagtgcaatcatggttcattatgtagtaacaggtaagtaaagaacaatcttcctctttcgaggcttatatagaagtgttaggatatgagaagataggaattagtctgctgtgtcagtcctatagtccatataattgtctttaatctcaggcataccacagtttctctctctttctgttttttattttttatttttgagaaggagtttcactcttgttgcccaggctgagtgtgatggcatgctctcggctcaccgcaacctccacctcccaggttcaagcgattctcctgcctcagcctcccgagtagctgggattacaggcatgcgccaccacgcccgactaatttttgtatttttagtagagatggcatttcaccatgttggtcaggctggtgttgaacttctgacctcaggtgatccacccgcctcggcctcccaaagtgctgggattacaggcatgagccactgtgtctggcccctagtttctctgaaaagttcttacaagtctagcgtttatgaatttttccagaagttccttgtgtttttaatatatatatatattttaatatatacatataatatatatttctgacaggccttttcgtgcagtcctgcatttcataaatttactatgtgctgtataaagatatagtcatgtgtcatttaatgagggggacacattctgagaaatgtattattaggcaattttgttgttgtgtgaacgtgatagagtgttgttaaacaaacctggatggtatagcctactgcacacctagggtaaacagtatataccctaggcatatactcttgctcctaggctacaaacctgaacaccatgtttccgtgctaaatactacaggcaattggaacacaatgttaagtatttatgtagctaaacatatgtaaacatagaaaaggtacagcaaaaatatggtattataatcttaggggaccattgtagtacatgtagtccatgcggtctgtcattgaccgaaagagccacatgcggttcctgactatacttccttttgtttgctcttaaatttatatttcaaacttcaagaaattatcccagtattccattaattggtgagcaggtttttgtgtaccttagaaatcttgatcataaacttttcagttattatgtctccaacggaagattcaagttttagcctattctcacgggatatctcctctattgttttataattttgatttaattttagttctctggattgtctctaaattccttcctttgatacaaatggtttattttatgctttctgataaaagaactatcttgtgtaaattttgctaaacttcccaatatggtgccgtgactagggtaggagctaacatacattgattatggcaagcaaattgtttctagtcacgtacatttcaaactatactgttcatggaagaaatacttgtatatgtgcaaaagcaagacctatgcttccatccataccatgaccacatggtgcatttttaaaaacgacccttctccagtgctttctcccttgcatgttatttttctttgagagaagcgtctgtgctatttgtcattgtctctccatttcctagcagagttcctagtacagttctgttctaattttcatctgaaatattcttatttatctatttatttttaattttactttaagttctgggatacatgtgtgacgttcccctctctgtatccatgtgttctcatcgttcaactcccacttatgagtgagaacatgtggcgtttggttttctattcctgtgttagtttgctgagaatgatggcttccagcttcatccatgtccttgtaaaagacatgaacttgttcctttttagggctgcgtagtattccatggtgtatatatgctacattttctttatccagtctatcattgatgggcatttgggttgattccaagtctttgctattataaatagtgctacaataaacatacatgtgcatatgtctttattttttgaaagacattacagtgtttccactttggatttaccttcactctggaaattatgaaaagaatttagactaaactctggcaagtttagagatggtagcgtgtgtctggatgccacagaatagcaagttcaggggtcaaagattctcctttcagtgctttgtaaagcacacagtagattcttcattgaggcaaatgaagaagacatttttgattaataataatgataaaccatatattatattttgtagcattttataaatttcagagcattatataaattctagttgttactattaggttcctttatgaggacaatagggcaggcactattataatcttttatgaataaacaaaaacttcaaagagaagagtgacttgtttgaggttgtatagtagagatagggcttaatttgtcttctagttccaagtctggtgattgcttttcatggagggctttatttacagaaggagaaagtcctatcttgtacaagttaagagaccaccagaggcctgtaccaccagccaaaagtctgtgtctttatcccttatttacaagtagatgaaaatgagtgctttactgcaaatgcagtgggactaaaggaactgctactttggggaaaataaaagtcagctgaaacagaatgtttgcagccaagactaaagtcactaatacaaccggctcacaactttgccaatgaaccttctggcaaaaacctggcaggatacgaatatgtaagtagccgctgtaaaagggaacgaagcagaggaaatgaactttgtaagttattatatctgggcaggaatttttaatcaagttttttttatttaaaaaaatttaagtacaaatagttggtgaaataatgattcactaaggaaagaaaaccaaatttggcttactgtttctggaatcatacaagtcatgaacccttcagggcacactgtgacctaaaatgaatcacatgcatgtaagggattttgcaatgaggcattctttcctatttccctctaccttgtttatttattgctaagtttcatttatggaggagtgtaaaaaaaaaaacctcagaaatcagaggaaatgtagaaaagaatcttcttattcttttgttagtgctttgatctggtcacagtcagatatatacaagaaggaaatgaatggcctcaatcaaagtccttagaaaatgctagtataggggatgggttgcaggagtgatcccattttgttttccttctttgtttaaagctcttgtggaaagtgggaaagggaactgccagtcaccgagcaccagccaccaccttacccacttttcatgtcaatgctgcaaggtgggtatgaggaccagctctgttttacagagattgtagagatgatcaagatgtaagaggaggggagccaggattttaacctaggtctaaaccatatgcctgtgctcttaaaagattttgctttaggaatagaaacgtgtaacttatttttgtttaaaggttacttagctattttattatttttacatattattgtctaaaccttttttagtatggaaggttttttttaacatatacaaaaggagcatgaattgtatagtgaacctctttgtatgcatcactcaattacatcaccgatgaactcataactaatattgttttatttattctctttattctccccattattctgaagtatttcttagacattgtataattccacctgtaaatatttcagtatttatctctaaaatataaggactaaaacataaccataatatcattatcacacctaaaaattaaacaactcttctttaaaataatcagatattgagtcagtttctaaaattccccaatcatcttgttattttttacagtttgattatttaaatcaaagtccaaataaaatctttatgttcaaattagttgatatgtctcataagcctttcaatttgtggggtttccttctatttctgttctttaccccttgcaatttacttgttaaaaaaaaaaagaacccaggtcacttgtcctggagtttcccacagtctggcttgtgttcattgtgtcccctgatgtcctttaacacattctctgtcctctgtatttcttggcaattagtagctagacctggagcagggtttctcgaccttcactctaatgacatttgggaccggacagttctttcttgtgcattgtagaatgtctaacagtatctctggcctctatccactagatgtctgtagcattgcccagtcgtgacaatccaaaatgtctctggacgttgtcaaatgtcctccaggagcaaaatcatccagttagaaccactgatttaggggactgaacaggtgcaaggattttcttggcggggaaacaagggaaggcaagagtactttttatataaatctgtgtattttcattaggagacacaggatagctagctgtctgtgatgtgagtagccattgatgatcattgctgaaatccatttagtcatagcagtacttagttattttaaatgttgcattagatatataacagctgttattagttgctttaaattagaatgttttcatgtgatcaaagattaaatgaggcttagccagaaatcatcttcatgagacatgacactttattatttctgcagtgacgatgcatggaaattgttacttgtggacaaacttagaattagcctgtgaatggggcttttgtttttctatttctcagaaatagaatggcctatagggaggaatatattaggtacctggaaaccacctaaaaatagtaaaggatgttggaaaagctccaaagaaggactcaattcttccctctaatattcaaaaggattagggagcttgatgttgtagtttgtagccctgccattcattccaggcccctaggttgtagttcataccctttcaagcttctaaaatcaagacactgagctccaagacagagtaccttgtgtccattccgagcattcctttatagaaaaaagagtggtgtgtaagagtcctctcagggaggcaggcagggagagaggaggtgagagaatggtcgagatggtaaggaaggggaggatattagggtctcaacaaaaagattatttttgagataaatgtggtatagtatgagagattcttattgcatttggtctttttatctgcttcgtctttatatgcataagatattggtggttattttacccttttagaaaaatttctgaatatatatatattaaaagctgtgtaacaggtaaaagctcattttcccccttagttcttttattattcaatctggtcatctgtaaaatggcatctcatattaaacagcttgtcaattaactttttttttttttttaaggaacagagagattcaaaactgcggtccattttacttctaatgggattagcatcaaggaaaaaccactcatgcagggtctaagataaacatcagaacaatgcagcaattataggtcattcaattaatatattgatgtgactttcagttgctcaaaaatagtacagtttttttctgttaagtgaaaagattattttgctttttcaagcaccatattagaatgattttggtgtgaataaaactattgctaattatcgttggtttgcagcacttctcttttgttacttaggaatgccaaagaaagggtaaaatccctgttacaatgaaggctttcttgctggtaatcagcagtatttggtctgcctgcaactggggctgctttgtcccagaagttttatttctattgactttctgctctttagaatttaaacatttttctttatatctttaactgctgaaactccagctgagggaacagtgggaggggaataaagaagaaggttaaagtcattttgtggactgtgagggtgcatgaagaacatgttcttcaaactcagttccacatttaagctgcccagcgagccttgcccttgctattctctctctccctgaagccagaaagaagaagcaggcgactctccaaaggaccccatcttacctgtcacatcacagatgtacctttttagcattctcacaattgagataggattcagagccctgaaacctggaggaaggaaagaaaactctcttttatttagtttccatcatacaaggatgttataaatatcccccatctttaaaaagatcctaagatccctcttagctgttgccaattactctgctcccttttacaacagagtttcctagcattaatgttaatggctgtttccatttaccctcgtcctgtttctttctttaaaaaattttttttaacacatgtaatatatccaactgattgtcctttttttagaacccactgaaaatagtccttcatcttcaccaatctcctgaaaatattctttcaatgctaccagtgactgccattatgctaagcctaacggttcttgttcaaatatcacttctcagagagctactccccacagttactctttaccttttacccagctctatttttgcaactttttttcccattgtgacatttactttaatagctgtaatttcactctcccaaatagaatgtctgttccatgagaaatgggattttatttcattctttagtaccttgcacactatagctgtgcaataattttttttgtatggattgattaataaaatgctgtgggaattgctacttcacttgtaattttgtttaccttttaatttaattcttagcacagtatctatgaagtcagatttcaataaatacatgttgagcacaagagaattctaattaagaagaaggcagcactctgtagaataactggtttctaggatattgacattcatccagcaatgatttgctgatgagtattcaaattatttggggctacatttccagcagggaggctgagccacaccatttctagtgattggaaagtggctactcttataatgctggggtgcagctagttttcctgtctctttgattagattttgtcttttgttctgcccaggtgggtccctgggaataactactaaagtatgaaaccatggtgttgtctggctttcaatgaaaacatgtagccccgtgccactaaacatgatgtacattataaacatttgtttaccccttagaaggcatcttacttctttgtactattccttggagcatttgatgcacatttttccatcttgttgctcggtcacttttgtaatagagcttgtgtgagtttttttttttaaggaatttagaactatgtcagtttttatctcctttgcagtttttggtgatagctctgttatgggaagaaggcagtgctgtggatctggactccttggagcaaccctctcaggcacatttctagttgaggtctaagattaggtcactgtggatagagaccagcaaggaatctcaggcttaagacccagctagtacaaagggagtgagctaaggaaaactaggtaacttagtttatttctctttttgctttggcttcctgaaagccacccagactaaacttgatgttagttcaattctacaagtcctcgggatgaccatattttctttctctttccaaggtgctgaatttctttctttctttctttctttctttctttccttctttctttctttctttctttccttctttctttctttctttccttctttctttctttctttctttccttctttctttctttccttctttctttctttcttctttctgaatttcttttttaataaatctggttttatataactttttattgaaagcttcttcaaattacttttggactgggggaggatatgcttctctttttttttccttgtgtattactgcattccctagcagctagtccatgatggcagtcactttagggacttgaaattcaccaggaatgggggtttggggagtcgtggtggtaccttcatgagactaactttatggcctgttttttggtattgactctcctgtttgtcctggtactccttctggaaagttatttttcctgcgtaggtttcctagaattcctagattatatcatattgaagtactttgttaactatgccataagttgtgggaaactagagttggcctcacttctcccttcttcctaatgtggatgggaaactgactggcagaaagaaaatcttccccccttcctcttgggtttcttctttttcttttcataatctcttttaagaattttctattaccatttcattcaatttctttcttctttaattttttgcttcttcctgttacttactctgcagtctataagtggtagatgtatctgtagtagtggttagtaacctgggttatggagccaggttgattggatttgaattctggctctccaactttaccagttatgtgacctttttcaaattccttaacctcttaatgctcaggttcttactctataaaatgggagtcatcatagtatttacttcatgaggttgttatgaagatgaaatgagtttatacatattgagtactttgacacatgtctggcacatagtttttaatacatgttattgatgatgatgatgatgatgattgcttgtttaactttgtgggtagcgtttgcaagtaagtgctggtggccaaactggtagattctttctggcaaatcattacattgactggattaatctgtcttggagccagaggaaataacataaagtaacttataaaggatgactctaggaccttgaaaagtcccaggtgtctgggctggacttgtatcggtaatttctcgtgtgtgtgtgtgtgtttcccaatcttggcttaagtttcctaacctacttttaagatcccttcttcataataatggttttttctatgttgtcctcagccatgttgtcaaattgtgagaataaaacatgtctgcagtcttcctgtcaagataataatgaacagtgccttatatttgtatcttactctgcttaaaatgatttccattctaagaggtctacaaggtcttcaaactacatttctacaccctcctccctgattatgtaaacagaactatagcatggaaatttcttgcttcaaaccaaatcattaacagtgaaaaaacataaaaactcttgtctgcataattttggggcagctcccaattatgggggaacaaatctgaacatgtatcatttgggattgggagaaagtaaagaaagggcaagcaaggagtggtatgaggaaggatattcttacctttttgtgttagaaaaaaccttaaaggtctgagccttaatttatagctacttgttgatctttccattaaaaccaaattcagaaggaagagtttccttggtgttcttatatatgatctcctctcatattgcactttaccctatacttaaattcttgcaggacattatagccacatgatggatttgctctgtgggaagaaggttagacttaggcttgccaagcaaatgaaccaaaaaataagactttagatatctcccagttggaagctcaaaggattgtgaattattgttttctggagtagattgaaactcattaacatctttagcaatggtagtagaatccattcatttctttctttgctcagtgttaacagtttggacctgttgtctctgtgtgggtctccaaagagggaaaaccattcagaaacagattttcaggtattttcagtatttagtggagttagggagctctgtgcaatctttcctatgagtatacatcccaggttaactatgcaccgaagagatcaaggtgtgcaggggttgagaggggtcctctgctgattgagagtgattctttatcagtgtggatggagacaagaaagctgtgtgttcctcattccaaaagtcaaactgctgacctctggccatcacaataccctccctgatgatatcaagctgggcttcttgtttgttgggtggggaatgggccttgtcagtaaacttgtagtcatgtcagtggttacagttttaatttttcccctttcaattttctggcactggctctcaaaaagcaggatgaggaaaacgagagatccatccaacacacttattccagattctttatatttataattatcaccttaaatgaagtagccaccgttcaagcccagattaattttcctccagacagatagcttatctattgcaaagagctgggttttctacgagtttttcttctgcttgctgctgctcttaaaaggctagataacacattgactctaggagctatctggctcacaggggcaaaggaattgcttgctgagctcacctggtcttttgcatctcttgaagggagaattaataaacatcacttgaagggagagttgtgtgactcatttgaaggcacatttgtaaggcatatcatctcagcgaggaaagacgcaataactctaggcactggctcacttttggactattaaaaaacaaaataaaattcagaaaaaattttaaattttaaccagctatttaaaaatgccttccattttaacatatgattgactatatgtaactctggcaattgagatatttaaggacacttaataaactagctttgaacctctggagatgagaagagttaggcttattcctttactataccaaaaaaaagatcattggagagtccatttttttaaaaagtgcaagttgttaacatggcacaagtttagtacagtttcagcacagaattttgtgcatggcttctgcttgaaaagacttgggactatccaaagaattatcttcaatatatttatatctctataaaatctcaaattgggttcttaagtgcaaaattgagactcaaagtcaactaagacataccttttccttggttaaaaagaaatcagaagatgacctgataatcattacaaaaataatctttcatgaagaagatggtcagaccaaggaagatatcacatttgtgaaaaggagggtattcaaaggccataaaaggcagaacttcaaaatattttaaaaagccgaatgaactaaaatgttcacctgtgataaataatagcaacattgaacatttctcgagcacagagagtaatgtcccactcctgtactaagtgtgcacagtgagaaatgtcccacccccgtactaattgttggggattctaaaatgagtaagacaggatccttgatctcagggagtttcattatgtcatggcggaaagagatcaacaatccacagaataaagcctccagtaagaagtcatgagagacaggtggtccaagtctggcaactagagaggagggacagatagcacgttattcctgtaagggacttcctgattttcaactgtgacctagaaaaccaggtccagtgagtagcagtgaggtggtcatatgtacataatgtggcaacaacaatttgtgctttgaaagcacattatgcttttcaacatgctttaccagacatggtcttttcaggccgctctaccctgtgcagtaggttatccaaatgtgcagatagggaagtagcaacatagagaggacatgaagcttgagtcacagtaaatagctgcttagtggtacctctgggccgccagggctcctgaactctaggcctgctttctttctccaacccgccagtggaagaaatggcctttcttttttccaagcttgtgctgtggtactttagtttcctgggatgttatctgtatcatgtaaaagaatgtttgattttgaactaaagttaaattctttctcattcttcatcttttggctcaaaagtcatttctttaggggatacttttctgggcccccaaatctctctgctatgcagtctcacagtcctctgtactttccacattagcacttatcccagtttgtagtttaccatttgtgtcttatttgattaatgtctgtctcacctgtcaagccttactctccatgaagccagggagcatatttcttttgtgtatcaatatatgcatttagtgacttgcatatagtaatcactcaataaatgtttgctgaaggaaatttaaggtttgtttactgtttccttttttttttttttttttttttacaatagagtacccaacatgtgagcagcttacttgtgacaatggggcctgctataacaccagtcagaagtgtgattggaaagttgattgcagggactcctcagatgaaatcaactgcagtaagtattgtgcacaagatgtgcagttgtgtgctgaagctggtttatactggtttgagagagccaatatgtacatctcttcccaagtttaggttcagtgaattcatgttggtagtttgaagtcagccgttggtaggagtatttacacactggaaatcggcaaacactacaaaccagggcctttttgttcctggataactggttcttaaacatttaccagcacaccactgcttaataagaatccctttttaaactggagatgctcttcctttgagattaagtggctacaatggagttaacttctctcttttctttcccttcttaaccttctgttgcagctgagatatgcttgcacaatgagttttcatgtggcagtggagagtgtatccctcgtgcttatgtctgtgaccatgacaatgattgccaagacggcagtgatgaacatgcttgcagtacggtgatttctttatgctgggtcatgttgttgggagtgttttgttttgtttcggttttgttttgttttatccccccgctcccccaccaatgtacctctttttttcaaggagaagagtcactacgtttgatggcagatggaatcagacggtcactaggggtcttggcacaagcctttgtggtgttgctcgacctgggctcctttattttccaaggatctgtgtagacgtaaagggctggtgatggacagtttgccttctttccttaggctccaggggtacaggatatattgtatcactggattctcaaatgacccatacctctgacaaccttgatagtagaatgagagaagtgtttttaagggaaaggaagttcctaggagtggctctaactctcctctttactttgaaatttctgctgcattaaagttggagggtcaggaaagtttctttttcttcgttttctttttttggagatggagttttgctttgttgcccgggctggagtacagtggcgcgatcttggcttactgcaacttccgcctcctgggttcaagcagttctcctgcttcagcctcccgaatagctgggatcacaggcatgcaccaccatgtctggctaattttgtgtttttagtagagatggggtttcaccgtgttggccaggctggtctcgaactcctgatctcaagtgatccgcccgcctcggcctcccaaactgctggtattatgggtatgagccaccacgcccagcctgaaagtttcagtgtggtataggtggctttcttgcctccacttcttcactctgaccttgcttttatgtccatgctgttgcctgcaatgcaaatgacctctcttattgttgccacctctccacttatgttttttggaaagagtaaagttagaagactctgtgaaagagttttactatgttcagtaagttggcagctttgagtggtgatttatttactagaatgtatgatttccctccacacctcttttgattggttggtacccatgccttagggtgttgttaaatattttcgatatcaccctaattttcaatgagccatgcctgacttcctttctggaacctgggcttatttcagtgacagagaattaaagagaatgtgacatcgtggaatggttgactcagaatcatttggtcatagattagcaattacggagcttgtagtaaagtatgagaacgttggatgttgtcatgtctgcagcatctttgtctgcattttctgttctgtgccaacgcattgcaaaccatcttgtttttaattttttttttttttttttttttgagacagggtctcactctgtcacccaggctggagtgcagtggtgcgatcttggctcactgcaactccacacacccccaccaggctcatgccatcctcccacctcagcctcccgagtagctgagactacagacatgtaccaccatgcttggctatttatttttatttttcgtatttttggtagagatgaggtctcaccatgttgcccaggctgatctaatttttaatcttgaaaaacagaaaccggcacctgagttcatttcctggacccaaagctgctgttatcttcttctttctctctcttttttttcctgctttttaaaaatttttgtcaagatatctaagggattaaattgatatagaaatttcaatttctaggagtactgcttaggcagtgaggtgagagcactttcagtttttcccggtgatttgtgtctttggagtgcagctgttgctttattccagactatccgacctgcggtggttaccagttcacttgccccagtggccgatgcatttatcaaaactgggtttgtgatggagaagatgactgtaaagataatggagatgaagatggatgtggtaaggaggggaagagattcctactgaaaagcattttcttcaagtgttttccagcgcttgttttttctcctttcctttttagaaattttgtgtgacaagcaagcctcaggattggctggagttgaaggggttgtttaggaactcagtgggtggggaagaaggaggtgactgcgctaacttctcctaagaagattcagaacacaaatacagattaaatgataatcctctcctttctatctttaaggcaaaataggtaggacagtctctgcctcttctataccccagtctgactttctccctgtaagactgcctgttttaaatagatttaaaactatataaaactaataggctggggaaggaaagaaaatagggaaaatgtcatttgtcttagaccttacaatctttaaaaatgactttgaaccttggtaacagttcagcttatttttttgttttggttttgtaaattctgattcccaaatgagtcactgacactcagtggtgaaagagaggccaccttaggaacacgtgggttggagctggggattggtaagtgtaggagaagctactatccagggaagtgcttaaagattccgtgagaaggaaattgccagtgatattcacccttttatgttgctgatattcacccttttatgttgctgatatcatcagcagtacctccaacaatttagcagttactaatacccataccctacagcaagttacctgcaccattccaatcccaggtatgataagggaaatgcttgttaaaactatgttttatgtttttatgttccagaaagtggtttttctacatttgggttatggtttttcttatactgttgacatttcactaaataaacgaagcaaatcaaacagcccaaccacaaattcaagtaattctggacctaacttgatggacctaattctataattcatgatttaaataactacatcttttcttaggggatcatgaatttagtttgttgataattgaggcccgtatctgcttcttcctcttataacccgactgggggctgcctcttccaggaaaagtggagtaattccattatgcctctccttagaatctcagtaaaagactagtggtagagttagaaatcactaacttattgtaaaatgtagatcatttatagatttctcttgttcaacttgctgtacatcctctgtaaaccactgattaacaaagagctggctgtacctcccctatggcctgtaactctctctttttccccccacagaaagcagtcttcatgatgttcataaatgttccccaagagaatggtcttgcccagagtcgggacgatgcatctccatttataaagtttgtgatgggattttagattgcccaggaagagaagatgaaaacaacactagtaccggaaaatactgtagtgagtatagatatttacctggctagctttcagataaagatatttctgttttctagaacagacgttcaaatacagtgtatctgttggcgtttgcataacaaagcaccccaagacttagtggcataaactgagaaacgtgtcttatttctcacagttctgtgggttggctaggtagttcctttggcctgtatcagctcactcacacgtcaggatgttgcagtaaaagcttgggctagcctagccttgttgacccagaggctgaaagagcaaatcctagggctcaagtactttcaaggttctacttatgccaagtttgctcaagtcttattgtccaaagcaagacacttggccaaacccagagtggatggaagaaatagactccatctattgatgggaggagcctaacaattttttagcaactccccgttcctaatccctaacacacacacagggaggattgtttcaatggcagttttgatgaccttaaagatgttctggagattttattacctggcttatactcatggaaaaagtctggcttttccagactttttttgtctggctgtactaaaaaaaaaaaaaaaaaaaaaaaaaagcttctggttcctgggttatgtaccttgagttactctccaatggcaaaactgagttggccatgcacagtgttgttcgattatgtgttgtgtgaccacactcatttatgaggaaaccgactggaactagggattttttttctccttttttgggactgtagaatattcaccccaccaacaacccatcaactctgtggacagctgatggtcctgtaaggaaataccatttaaaaccttgatttcatcaataatatactctaactaaatttgtgattgcctagaagtgcccatgtaactgcaaccccaaggttattttttgtttcctgacaaaaattgtacataatatttaaacaggcagagacctctatggcatttttttctctatttcatttgggagcccatttaaaaaagcttaaaaattaataagagatatgtagtcacagtatgaaagttggaaaataaaaattaaccaaaagaaaaaaatataatcacctgaaatcccatctcttgaagccagccacagttaatatttttagggcttattcttgctccagtcacttgggagttcttagccctttttactatgtagacacaaagatagacccatgcatgacctgatttttttttcataaatgagacttttaatgacttatacttgcacatagttataactttaaaaaggagctttttttttcttttgtttccactcgaggcagcctcttgttctgtcactcaggctagagtgcagtggtgcagtcatagctcactgcagcgtccatcttctgggctcaagtgatcctcctgccttggcctcccaaagtgctgagattacagttgtgagcctctgtgcctggctaatgcttttatttttaactttttgtgaatatgaggtgtagctacattacccaggctggtcttgatctcctggcttcaagcaatcttcctgtctcagttgaacttttattgcaaagttttgcagtaagctttgaagggtgacagatttttctgtacatctacttcatgcttacttagctgctactcatggaaaaagaagctattagattaatcagtcttgtccagaggtcaccattcatttaacaaagttcttttcttcgtttaggtatgactctgtgctctgccttgaactgccagtaccagtgccatgagacgccgtatggaggagcgtgtttttgtcccccaggttatatcatcaaccacaatgacagccgtacctgtgttggtaagtgatggggggcggcggctacttgtctttcattacagtacactgatgagtcccctgatctctgacatcaaggaggttgcacttgtggagagtcgtcatggtctgtcataacaaagaacaacccagacctcacagaaaacctggcaattagggaattttaactctgagaaggtttggtgtggtgtacaaggcaaaagaatgcttctgtcatgagcgagttgactagctacctggaacctatccattacttgatgagggcggtagtccttttctgttttcttttcaagtatttggcatcaggattggtgcagccatactggttattgaatactgaactacttccatgaggttggtagatagctgctgcttgagcccagcaagcacccctaccttgctcccctggcctcttctccaggatgcacaagcatccccaggatcccacaactaaagagttgttacctgacacagcagaggatcaccaggtcattgctcaggtgactacactggtgggccagtgcctttgctgggctggctactcattccactgattgtgacatccacttggaactatcattcaagatgagcagattctttatcatggtgcttccagatggtggctggcattaaactagacaccagtacaccaactatttcctcatatctctcctctctgacttcagaaatgatttctcccaatgagatttttgattttgatgccagctttatatctcactgtgattaggacggggccttatgatgggagaattagacatgaccaactatcatcagtttttgttttctcagtgagtttttggtgctctgatcttttttccttctatctgatttttgatacatgaacaacgaacatactagcaggaagtgatcacagagggagtttaaagaaaactatttttactgctgttgggaaaaggcatctgtaaggcaattgaaactattcattaaaatttggtagtcatctatgggtctccaaaatgattcagaattttcccaggatatttatattcttttgatattccttagaaatgtgaggtattctttagggcttttgggatagcaacaaacatgaaatgtgtaagaaatgcttctagaaaagtatttcttctgaaattattattttaatattattaaaatattaaaattttaatattttagaactctttggtaaaatttggtaaaaattattgaatatagataaacctaatgcagttattcaatctttagtctcagctcattgcttccaacataattatactttgtcaaatacagctaatcttaacaactactcatagccagaaaagcctttctttttttctttattcttcttcttcttcttcagcggaagtgctagcaaacagaaaaatgtattgataccagaaataaactctggtttgcaaattaaacttgaaattcttgagaaagtctgctcctcagcgttactgaaaactataatcgttgggctcacttacctatcatatgctaaaaaaaaattggatttttatatccagtaaagcaatccatttgagcttttccttgtgttcacagtgggtaactgtaggttcttaatatcaggaccacatcccaaagttgcccatctaattgctcctcttaagtaactatattcaacaaggtactttaagatcaagtgacttaagtgaactctggaataatttaagaaggcccccaaatttctaatcattttaaaacattctataaataaaagttatgatctgcaactggacttaaataagattgcaggacacattttgtgttttattgttatcattaccattatattgggaatgcattcaagtaatttacagatacttttcacacgaatgcccttattagttaggtggtgacctgactctgggagccctgcctggatttcaggcagccctgcgcaaaggggcagcctcacttctgctcagagtggggctcgtctgtgggtgtgaggccactcctgtgtctttagcaaatgtcaggctcctttgcccccctcactgctacccagctgccaatcccattcccagccttttagttctttaggcattttccttttctcttaatagaaaagaagttccaatagaaataccagaagccacattctcagtattacatcagcttttctctctttttcctttaccaactcccaaagaggagttggggctgagctgtcttacagttgaaacttgataggccatgaagtcctttcaggaaaagtgatttgttctttcagaatccctaattcagtcttgtgatgccccacaagctgttctcagttttttgttccaccctagagcccagataacacattttccatattttccaacatataagtctgtggtgagccttgggttgtatttccaaatgtctagggttttctaaatgtcagagattgaggccacttcaattttcaatagcctctcacaaagcgaaaggctgtcataacaatgttcttgttttataaaattttgcatttaacctactagtgaatgtaaggcagaatattgcagtattatgtgtgcacaggataatttcaggattagagaagataccacaattaatagcacattggaagtagtgtgttctaatactggggcactaatttgaagttccacaacagacaacttctttcattcctgccagcgcgtttctgggactttagtacagacaacctcatttggagataatctcaaaagtctacatttgagggcctttgtgaatatgaggcctcctgccacctgcagagaccttttctgtgacctttgctgtccttcaacaatgtgtcatttgcctctgagttttgaggctgggttaacatttatttcacatttgtttcaaagaagactgtatttttctctctttatagagaactctttaaatacatgacgttaggaaaccagttacacttgtttcagctgagctgaatttttaggggaattgttgctttggtttgctctctcaagcatttcatttcaacaaatactctctgtatggctataaccctctgcatggctgacgcattacacaggcttcaggtgttggaaacctatgcaacatttattatcttagacatggctccccagtgaatacctcggtggtaatcaagaataacattgaataatcctgacacgaaatcttgtgtctttctaccattcatctgcctctggtagtcttgacctggcagtggaagctctgaggcatgctgaagcagtttactgggctcattgtttctgattgacaggacatgctgtttgttgacagaatgacatcgtggtgcagagtgagggcagggaggtcattcagcatggtggggtttcacacagccagatggatcagagggtggccaagggggtctcagttaaaaaggggtttttgaattattttcacagcagtatttgttggtgggaggagacaaagaataaaaaggaaagaaaaatagataaaggtattggagtgagagggggattgtaaagtagtgttttagtgttttgtgtggtttccactatcttttctactctcacgaaaaccctcaattctacttttatttttcttgtcttcactctggctgctgatggatgttaattaaccttcatatttctctatagtgatccaaggatacaatcttattgtcacaaaagtgacagcaattttatacactcattcaaatcctgttttttgtgatagggtctcactgtcgcccaggctggagtgcagtggcattatcacgctcactgcagcctcccacttcagcctcccgaatagctgggactacaggcacgtgcctccatgactggctaatttttttttttttttttttaattcttagtacacataaactcttgccatattgcccaggctagtctcaaacccttggactcgagcaatcctcccaccttaccctcccaaagtgctgggattataggcgtgagccactgtgcctggcctactcattcaaatctttaaaccacttgtagtgcaggtgataggaagggcatttgtgctagagaattcctagttatgacttctccgcctttggtttccttctgtttgacatcagaacttctgcttagagtgactccagatccttagacgtagtctcatggatcttgcattcaaaatgaagttatgacattctgggggtttgagggagaatgtcctgtacttttttttcctgctgaggcaaagccttaggtggagctttctcagggctgagttaaggggacagaagggattcatcagtgagggcatttctcaccctcatgtggcatttcacttggtagtgtccagatcggattgggttttttttcctctggttagtcacggtccttggaaagaaagatatgctggctcatgttgttatgtttaatctgcagggaaaatgggatcattagaagaaccttcttggggctggatgcggtggcttacgcctgcagtcccatcactttgggaggccaaggcaagctgcttacttgagatcaggagtttgagaccagcctggccaacatggggaaatgccgtctctactaaaaatacaaaaatattagccaggtgtggtggcgcacacctgtagttccagctactcggtaggctgaggtggaaggattgcttgaacccgggaggtggaggttgcagtgagccgagactgtgccactgcactccagcctgggcaacagactgcgactccatctcaaaaaaaaaaaaaaaaaagaaagaaagaaaaaaaaagaaaaagaaaagaaaagagaagaaacttggccttttggtgggttgtggaatggtgggccacccagcaggaatggttgaacccaattcacaactctgacagttgctgcaaatgcaatcagatcatagaaatctggagaattctagacttgggagtgcagtggtttcagaaattataatctacttgagaacttcctgaaaccagagggtgtgggaactctattgttatagtttgtataggtcatcgtcccagggaagcgagcagggtgaaggatgatggagagtggacgtggacttggaaagtcagatgtaccaatttctgcacccctgaagccttatagtctttaagaaagactcttctagtattttgttctgttctcccctccatattctattgtttatgtcaattatattggagctatttttacacagtagaactgggacttctctggtaatgaacagagctctgtcatgtaagggacttcaatgaacacttactaaatgagtgaataataagttaaccaataagtagaggagaagaaatttttgatgtcttgaaaagaagttcaatttaattttggttataattttttgacatcagaggaaagacagctgggtaaatagacctttccaagtactttattgcagtcatagatttgtttcttcctgaggggctgtctataggcaggtcttattttattcagaaatagtgctgtccaatagaactttctgcagtgatgtaaatgtgtatcttcactctctcatattgtaaccactagtcatatgtggctattgagtacttgaaatgtggcaagtgactaggaaagcaaattattaattttattttattttaattaatctaaagatacatttagatagccacagggggttagtggctaccatgttggaaagcatagtattaaagggaaacatttacaccaaaatttatatatttgtagactaacattaataaatgaaatgcaataccatagggctatgaattcaggaagtgttgtgcattttctgtaaagttatccttcatgtaggtttaaaaaatgatgtaaatgttcttcttccttacatgaagatggttgttataaattcttagaacctgtgcctaactccagagggtgtttatttagacatgggcaacaccacattcttggccatcttatctaggatttttgtcagagagtgcttaataaatgctgataaccttgactacaaatgtgtattttccatatggcagagtttgatgattgccagatatggggaatttgtgaccagaagtgtgaaagccgacctggccgtcacctgtgccactgtgaagaagggtatatcttggagcgtggacagtattgcaaagctaatgattcctgtgagtaaattatggacacctgtgtctctgaacagtaaacagattctaatagcttctttccttccttctgatgacaacagaattatcagcatttttgctgttggcagggctttatcattacaaatcagggatggctcctactgcctagaaaaattggtcaacattaatttcatactttgattattaaggaccaatttgtcgattaatggtgaccattattaatattttttaattggctgcttgtttactttgcctaggctatcatgtcacccacctttaattgtgaaataaatgctatgcctacatttgattggcttggacatttaacttttaattaattacctaccacaaaagtaggtgataactatctacagaaataattttcacagtgttcttgcaaaatttaggggcatttccaaatggacatgctaaatttggattaaaaatttttgatgccaactctggtatttgaggacatgaagattgaaataaagatacaatataaaaaatctgaaatctcaaatttagccaactttagctttattccggcagcccaatctcattcaatatcatattaattctgttctcaactatcccaacgaagcctttttttttaaactttcgggattagccattaatatttattcatgatatccattaaaaaattatcccagtccnnnnnnnnnnnnnnnnnnnnnnnnnnnnnnnnnnnnnnnnnnnnnnnnnnnnnnnnnnnnnnnnnnnnnnnnnnnnnnnnnnnnnnnnnnnnnnnnnnnnnnnnnnnnnnnnnnnnnnnnnnnnnnnnnnnnnnnnnnnnnnnnnnnnnnnnnnnnnnnnnnnnnnnnnnnnnnnnnnnnnnnnnnnnnnnnnnnnnnnnaaaatagatgagggctccaaagcattttgtcgctgttgatttctccggacgaaggtctcaatataaactcctattttccaatagttatttcacacttgattttgaagtgtctttggtgtcttctgaaacttaactgctcccatgactgaagaatggcccattttctacttgtttttgtgtagaaatacctgatttgctgtgtagtaacttttaggttcagcggatttttaacaattcaatgtgtttatttttgcataggtaacatatttatatgttcacaaattttaaattataagaagatatgtagtgaaatgccttcctccataactattcccctctgcatggttttcacctcctctttcctatgagtaattgccatttctttattttagttctagagattttttaatgaataaacaagaacatacaaatatagatatttaactgtatttacatatctatatatggtagtaaactatatgcacagttctgcatcttgtgaatgtactgaagatattttccagagctttccatatcagcacatgaagttatttcttaattattttatttatttatttttatttatttatttttgagaatgagtctcgctctgttgcccaggctggagtgcagtggcgccatcttggctcactgcaacctccgcctcccgggttcagacaattctctgcctcagcctcccgagtagctgggactacaggcttctgccaccacacccagctaatttttgtatttttagtagagacggggtttcatcatgttagccaggatggtcttgatctcctgacctcataatttacccgccttggcctcccaaagtgctgggattacaggcatgaaccaccgcatccgtccttatttatttatttttgagatggagtcttgctcttgttgcccaggctggagtgcaatggcaagatcttgcctcactgcaatctccgcctctcgggttcaagcgattctcctgcctcagcctcctgagtagctgagattacaggcccccgccaccatgcccagctaatttttgtatttttggtagaaacggggtttccccatgttggccaggctgatctcgaactcctgacttcaggtgatccgcctacctcagtccctcaaagtgctgggattacaggtgtgagccactgcgcccggccttaattattttttttataatggcataatattcctttttttatgttcataatttgtttaactagtcctctactgatcaatttttatatcattccttatcttttgctattgccaataagactgcaattaataccttgttcatatatcattttgcatacctgtgagtaaacagacagaacagatttggaaccaccattaccatctttttcagagtgattccctggtaatccttaaaatgtcttctgtgtttaacaaaatctaaagttgcacatggggctaaggtgcccatatcatcaaggagtctcgaaaatatctgagaaatactctcctcagtgtcattgaaagtgcattggactagcatccagaatgcttgaattcttaccaaattcttcctaacttactgagattttggacgcttcattaagcctttttgtgcctcaatttgcccttctgtaaaatggatagaatgatagctatctgtctgcctcagaggtttatgttaaaatcaggtaagacaacctagaagatagcatttgaaaaagcagaaagcatatcatttgtaagctacttcaccatccttgctcatctgaaggagtggtgatgccttccttcttcgcatttagttggcgaggcctccattatcttctccaatggtcgggatttgttaattggtgatattcatggaaggagcttccggatcctagtggagtctcagaatcgtggagtggccgtgggtgtggctttccactatcacctgcaaagagttttttggacagataccgtgcaaaataaggtaaatagaattttcagtagctgaatggaaccctgagcacaaagtgttgatagcttttcacttttagagggagtagaggggaaagttcctttgttttctaacaaaaaaggcccttgagatattttatgttaatcagcaccttttccatgctatactattacatgtgacctattaaacaaagcagtctattatatggattagccttgagcaacttttaattttattcgaagtggagtccaggagcctaattaaaagaaatagtagacattctttcaaaactggatagatatttggtagtaatttttgaaatttgatcatttaaaatgtaaaaagcacactgcttttctggatgataaaaatcagatttttacctgcatcttctaaatggaactgtaattcgggatcgagtaacaaatattgacggtattttgtttaatggccaaaatttttttccactgtcttatttggaaagtgtgataggtttaatttcatcttggagtaatgcaatggagatttttgaaacataaatttcagaaactcttaaagagttatggaattttatttatttcttcttacattttattataccattaatacaattctcatttatttaaatgataacttgcatgacatttctgaaaattgagaatttagatttttagcacttctgatttgattatagctaaaaaaaatcaaaacaaaccacgtagttagtgatgctgaagaaatataataactttggtttttctttcaggttttttcagttgacattaatggtttaaatatccaagaggttctcaatgtttctgttgaaaccccagagaacctggctgtggactgggttaataataaaatctatctggtggaaaccaaggtcaaccgcatagatatggtaaatttggatggaagctaccgggttacccttataactgaaaacttggggcatcctagaggaattgccgtggacccaactgttgggtaagtgatgtgaaaacatattgattcctgtatttttagaattttctctctccctctatacactgaacatccactggattaatcaaaggctcattctgatttcttttagactgtatactctagaacccatgtctattttgtgcccttatttatagaagctttaagagagtttattaaatataatcctatttgaggacatgtcacccaaacacacctagtggtgtactaaaaatatttgttgttttggggctatgaattttattcttagtgtttgccacgttttcctagctaagagattggattctgtgttctaactcaatctaataatattattacaactaaacattacttatgcttcattattattaagatgattactctaacatgaattagctgtaaagatttttaaagatggaggttggaactattcctttcagaactttcttgatacaggctgggattgagatatcaatgctaatatctcattacaagttgttcagtctgaatcaatccaacaacaccgataatgcttttcctcaggtttaaatttaaatttcccaatcttcacatttgagaagtgttataggagacttagctttctcctagaatttcacaattgggtcttaggacccttggataagctttaggctattttagtctttgtgaatgatgattattcagttctacttcattatatcagctatccttccttgaaaatgatggaaatgttctctgtgcctcagaatggaaaactgaggagcaaaatggcttgatagcttcttttaaaaggtatttgtaagttttcctgggtataaaaaagagaagcaaaggacaaataaaggaaagagaggagaaagttcagaaggtgaatatgaatttttttttttttttttttgagacaggttcttgctctgttgcccaggctggagtgcagctgcacaatcacggcatgctgcagacttgaacttctgggctcaagcaatcctcccacctcagcttcctgagtagctgagactacgggcaagtgccatcatgcccagctaatcttttaatttttgtagagatggggtcttgccatgttgcccaggctggtcttgaaacatgggcctcaagcaatccttctgtgttggcctcccaaagtgctaggaccacaggcatgaaccactgtgcctggctggctgaatatgaacttttagactgccatattagtgcatcataatagttgctatttggaactgttgacactcctgattgacccccacagtctctttaaaaaaaaaaaaaaacttaatttccctgttgttttatactgtggttctctaatcagctggataaaatttccattgatccaaacacactattaaaaaaaattcccaggttaacttgtaaaataccagattctttcatcttctgtttttcttttgtagttatttatttttctcagattgggagagcctttctggggaacctaagctggaaagggcattcatggatggcagcaaccgtaaagacttggtgaaaacaaagctgggatggcctgctggggtaactctggatatgatatcgaagcgtgtttactgggttgactctcggtttgattacattgaaactgtaacttatgatggaattcaaaggtaagaagtattttttatggcttatggctttattgcagggaaagtgcataaaatggctggagagaaatctcaaaggaccagaattaaaatattgctttgttggtggacatgatagctttaatgacctttgtactgacatttgcatgaagtgacctgctctgttttgttaacttttcttatgtcccataacacaagaggtaaacgctcgttaaatataacctccatcatttgttctttgatttctcctctccaactcctcccctagtcccacatgatgcacattattttcattcactcctgagttcatttgtgctttgtttctcaagatcactttcccttttaattttctaaccttcccccaataaatacatgttttattaggtatttgatgttgcctgctgggaattaattggattttactctgctcttatatatttcaaatttcaaggagaaattctttgtattgtatttttacctggtatacaaagatacttaaacggcaatatttgaatgtagaatatggctttttttttttttgagctggagtctcactctgtcacccaggctgaagtgcagtgatgcgatctcagttcactgcaacctccacctcccaagttcaagtgattctcctgcttcagcctccccagtagctaggattacaagcatataccaccatgcctggcaatttttgtatttttagtagagataaaatttcaccatgtttcccaggctggtcccaaactcctaacttcaagtgattcgtctgcctcggcctcccaaagtattgggattacagatgtgagccactacacctggccgaatatggcacatttttttttttcatctttttactctgattagagataactataacttaatgtaaaaaaaattattttagatcctctcctttcggtattttcaaaaattgggtaaaacatgttcttcaaattttgacccaaaatattattctttgtggattcagcaaataggctggttaacttaatttttcccaatgacttgattttattgttttctcaatgaaagcaatattatagttttgtttcctcttgtatttccattttgtaaggataatatcacagtttgccattggattatatatccttgggacaatctctgcttggttaaatgaagtattgggtattaatatggtgacttcctatcactgaaactggcttccataaggagaatatgaataaattttatgaaaaaattaactaacccaataagtcacataaaataattgtgaaattgcttaaattttttctctttgggatgttttagcattatattatatagtctaacttttgctgaagtaaaaaaaagtaaagcataaaagataaaaatcaatggaatttcaaaaagatttgagtggtttgctggctgtgaagaaacatcaaagaaatattaaagctcacaagtacagctgtaatcataaagtcattgcctctcgctttgccagcaggtggcattcagggttttggaatttgctaactgagaaagaaactattctctaatcttaatgtaccatgtcattatagaatgtttcaaagtgtgcactaacctgccaccttaggtttctttgtttactcccctttagtgtgtttcccagctttaatatcttcaagtcttttcttagagctctattgtcctttttagttttcaggggatgctaagatttttctttgaggtctttgtattacgccaaaataaagaaaataagagttttcccgtatcaaccgtcctctgcctcactctgttcatgagtctaactgaatcattgtttatggagacatagtcatggggggcgttgttgatttcctctctttgcttagtgcctaattttacttctgttttcttcccagttaagtggctttgggcctccattaaaagtatgatcagttgatagttccatcaagcagatgcataagagtggtagtggcattgcttcttgctttccttacagtgacatcaggaacagatgtgggcgtttgctggggcgtgaaccctaccactcgctgtcctgctccctaattgctaggaaatggtcaatggtgcagtggaaaatagttggcaaaggcatcttttcccagacttccaaagtcttggtatactctttcacttatggtattcaaaatgctatttcacatcttagccttttagatgtggggcaacctaaaaggaatgaagaacaaaagggaaaacagtaaattccaagaaagtctaggacaagctaaaggattgactgggactggaatgtaagtctcaagggtcttttccaagagacaacatgaaaatccttctatcatatatagatggaaatatgtatacatctaaaatgtatcttttctatctattccgtatttgtgacaagacattatttagcttttcaggcatttaattgaactaactacagctttaattataataaagcaaaactaacacattgtatgatacatatgtgtcttttataacaggaagactgtagttcatggaggctccctcattcctcatccctttggaataagcttatttgaaggtcaggtgttctttactgattggacaaagatggccgtgctgaaggcaaacaagttcacagagaccaacccacaagtgtactaccaggcttccctgaggccctatggagtgactgtttaccattccctcagacagccctatggtaagcctcagaacagtggtaaccatgcttggtaccggacttggtggaaaggttttctcaaagctttgaaagttaataatgaggggtcttatgtgatttgggtggcattctcaagtatatgaagggttacccagagtgttaaactctctgaaactggttctgcaggttaggagcattctgaagaaactgatgtatttcacagttaaatgccaaatctagagggaatttagagatttatttaacagatgtttattagcacctgcaaagatgcttgggggtatagcagctcacaaaccaaaccaaaatacctatcctcattctactgggaaagacatctatttcaaacttctaatattacagttaaggaaacaggtcccataggagaaaatgacatgtctaagtgtccattttcggtagcgtcagagccatttttttcttcttctctgttgcatatgtatggcacctgttctttggttctgattaatctgtcataggccaactgggtttggtgtctctctggctggtcacatattttaaaaaaagaaatattttgattcagacactgcttagtcttctcctgttattttaccatgtgactttttctttttattttttctgagatgggatttctactatgttggccagacttttctggaactccgggcttcaagcgatcctcctgccttggcttcccaaagtgttgggattacaggtgtaagccactgcacctggcctatcataagctttgtttatgtttccaggttatagcttgagctttgatacgtctatcaggactgtatatagctcttttctgtatttgcttgtagatcaaagaaaaagaaacataaactacactacgttggtagaaagcttaatatcggtgagcaataatttagaggaaaacagatttgctctaaaactcatgttaagtgatggatctatttaggatgaagaaagactgcaaagtaatgtggttaacttaacaaaagcccaaccactagaactgatacattcagatgaatctccttcaatgtcatcatcctgggaaagtataaacttgtctaaaaatagatattttatctgaaaacatttttggaaatatctattttgaatagtttttacactcaattcagaactaaactcacacctgccctcacattagatccattagatcaatgatcaatgtgatcactcaaattactattttcattatttggttcagaatgacatctgcctattgtttccccaaatcaatccacctgagaagataaagagaatattttaaagaataagtcaaaggctaagaagacaattttaaaagcagatataaaatttctagctgtggcagtgctcttcctaaggtcactactttgagagtggcttttggaagtataaactggtttgtgttgcagacatttaaggttttggaatcagatctggctttgaatcctagtcaagctgtttagctgctgaataatgttgggcaagttatttaactgtttagattcttggtttctcctctgtaaaattggaggactaatacttacctcttagagctattggttaagttggtttacttacaaagtaagcatccagtgagtaatatttattatatcctacaaatggcaaaaaagcagtgaagtgtgggttttcttttgacaattatttctaatcatggaggatagcagacatactctgacataattattggggagaaagttgtaggagttctttcttttttttgccaccgtctgttggagagtggatgggagagcagcagtgaaattgggagggttagtgtagccagatgtggatgtatccagtagtaaccagtagtaatgttttcaacacgttgctaatccattactctgtttcacctataggtgaaaagggctagaagtggcttcgtgtcttggataattacacatttctaattgcaatttaaccctgtgcatttttccttccagctaccaatccgtgtaaagataacaatgggggctgtgagcaggtctgtgtcctcagccacagaacagataatgatggtttgggtttccgttgcaagtgcacattcggcttccaactggatacggatgagcgccactgcattggtaagaagtctgttttggacgttgttggcaggtgacacaggtgtatgtgtgtccaaacctctaactagactaactgctactcttgaactggaccagctccctgtctaacttcttgactgcaaataagctttctgtagcccacagggcatcttccttggtaggcaccacttctactatacacagaactatgtttgaaaatgtaaatttctgtcttttgggattttgctttaatcccacatctaaggttttcttgggttcccttccccctttgtttcctgaaacctttttctcctattaactatgatcttgaaattccatatggttgaactttgagctcttctctatgctatgtataccttttccactttagatgttagccttaactttgatgggaagtactctacttctccccactttgacttctcctagaccaccacgtatgcccctttcaaccaggtaatcacatctgaatcttatctggcttttttttttctctctgtattccaaagtaaactcctgagcattgggtggctcagttactcacacagtttttcacctttcagttcaaactttcttgtatctgcctccatattcctgatttcattcttaccttgaaggtttcctttcttcctctttggtttcctacacatctattcacacttaagccattgcctgggccccagctaatgatgaaatgcactcctacaatatttgtttttcttattttcacttctacaattctcctttctgtgcctgtgacaaattcttgctctccagatgttgcggtttctagcgtagtatataaattatcttattctaacccacacaaatttgttaacttcttaggtagttttagattcagaaaaatcaccctcattaaaaacaacatgtatttctaactattatatcaatagtgcgttgtctaataattttgcttttaaattccgttactgcgatttttatctttgtcttgggcatacctccttcatcttcttgattccctggcatcctgtcacaatctcctctttgcttttaaacatcacttcttcttacctatttcctttatccctccccttccttccctgctttcactcctttatatctttatatttctgattgctgttaattatcttggtatctactgtaaggttcttggtgtagatctctatgcagaagttaaaccaacttgaggattgttacggaattgctatagagttcagctctgtatgatttttaaacaaaagattgatggcacaggtgagaaaggtttctgtgtgtgtgtgtgtgtgtgtggtgtgtgtgcatgttttgcctgtttattgtaatgatacttataacttgataattaaaactcagtatctaatttttaagcagtcctttttattttatttatttatactattttactttaagttctagggtacatgtgcacaatgtgcaggtttgttacatatgtatacatgtgccatgttggtgtgctgcacccgttaactcgtcattacattaggtatatctcctattttataaattaagcatatggatatcatttttcatataaatacattttaaggatacatttcttaggaagaaggaagattctaatacttgtatctccctcatagttgcttatctttttttcttccctgcattatttctaactatgctttccaaaaatttatttttacatttatttcagaattatattttataatttaaagtttgctctgtggatgcatttatctagaatttgggaggagagaaaggaaccatgctgtgactgactgtgctgtgttcttcttcctacagctgttcagaatttcctcattttttcatcccaagttgctattcgtgggatcccgttcaccttgtctacccaggaagatgtcatggttccagtttcggggaatccttctttctttgtcgggattgattttgacgcccaggacagcactatctttttttcagatatgtcaaaacacatgatttttaagcaaaagattgatggcacaggtgagaaaggtttgtgtgtgtgtgtgtgtgtgtatgcatgttttgcctgtttattgtaatgatacttataacttgataattaaaactcagtatctaatttttaagcagtcttatttatttatttatttatttatactattttactttaagttctagggtacatgtgcacaacgtgcaggtttgttacatatgtatacatgtgccatgttggtgtgctgcacccgttaactcgtcatttatgtcaggtatatctcctaatgctatccctccccctctccccccaccccacgacaggccctggtgtgtgatgttccccatcctgtgtccatgtgtgctcattgttcaattcccacctgtgagtgagaacatgtggtgtttggttttctgtccttgcaatagtttgctgagaatgttggtttacagcttcatccatgtccctgtaaagaacatgaactcatccttttttatggctgatagtattccatcgtgcatatataacacattttcttaatccagtctatcattgatgaacatttgggttggttccaagtttttgctattgtgaatagtgccgcaataaacatacgtgagcatgtgtctttatagcagcatgatttataatcctttgggtatatgcccagtaatgggatggcttggtcaaatgttatttctagttctagatccctgaggaatctccacactgtcttccacaatggttgaactagtttacagtcccaccaacagtgtaaaagtgttcctatttctccacatcctctccagcacctgttgtttcctgactttttaatgattgccattctaactggtatgagttggtatctcattgtgattttgatttgcatttctctgatggctagtgatgatgagcattttttcttgtgtctgttgcctccataaatgtcttcttttgagaagtgtctgttcatatcctttacccactttttgatggggttgtttgattttttctttttattttattttattttatttttttattatactttaagttttagggtacatgtgcacattgtgcaggttagttacatatgtatacatgtgccatgctggtgcgctgcacccactaactcgtcatctagcattaggtatatctcccaatgctatccctccccactcccccctccccaccacagtgcccatagtgtgatattccccttcctgtgtccatgtgatctcattggtcaattcccacctatnnnnnnnnnnnnnnnnnnnnnnnnnnnnnnnnnnnnnnnnnnnnnnnnnnnnnnnnnnnnnnnnnnnnnnnnnnnnnnnnnnnnnnnnnnnnnnnnnnnnnnnnnnnnnnnnnnnnnnnnnnnnnnnnnnnnnnnnnnnnnnnnnnnnnnnnnnnnnnnnnnnnnnnnnnnnnnnnnnnnnnnnnnnnnnnnnnnnnnnnnnnnnnnnnnnnnnnnnnnnnnnnnnnnnnnnnnnnnnnnnnnnnnnnnnnnnnnnnnnnnnnnnnnnnnnnnnnnnnnnnnnnnnnnnnnnnnnnnnnnnnnnnnnnnnnnnnnnnnnnnnnnnnnnnnnnnnnnnnnnnnnnnnnnnnnnnnnnnnnnnnnnnnnnnnnnnnnnnnnnnnnnnnnnnnnnnnnnnnnnnnnnnnnnnnnnnnnnnnnnnnnnnnnnnnnnnnnnnnnnnnnnnnnnnnnnnnnnnnnnnnnnnnnnnnnnnnnnnnnnnnnnnnnnnnnnnnnnnnnnnnnnnnnnnnnnnnnnnnnnnnnnnnnnnnnnnnnnnnnnnnnnnnnnnnnnnnnnnnnnnnnnnnnnnnnnnnnnnnnnnnnnnnnnnnnnnnnnnnnnnnnnnnnnnnnnnnnnnnnnnnnnnnnnnnnnnnnnnnnnnnnnnnnnnnnnnnnnnnnnnnnnnnnnnnnnnnnnnnnnnnnnnnnnnnnnnnnnnnnnnnnnnnnnnnnnnnnnnnnnnnnnnnnnnnnnnnnnnnnnnnnnnnnnnnnnnnnnnnnnnnnnnnnnnnnnnnnnnnnnnnnnnnnnnnnnnnnnnnnnnnnnnnnnnnnnnnnnnnnnnnnnnnnnnnnnnnnnnnnnnnnnnnnnnnnnnnnnnnnnnnnnnnnnnnnnnnnnnnnnnnnnnnnnnnnnnnnnnnnnnnnnnnnnnnnnnnnnnnnnnnnnnngactaagtagtttccattcgtaagaagtcatgtagctgatgggatgcatgatctataataccttggcagatgccatttcacgatatgatcttctaccatgagcatgaatgttctccattngttgtatcctctttattccttgagcagtgtttgtagtctccttgaagaggtccttcacatccctgntaagtggattcctaggtattttattctctttgaagcaattgtgaatgggagttcactcatgatttggctctctgtttgtctgttgttggtgtataggaatgcttgtgatttttgtacattgattttgtatcctgagactttgctgaagttgcttatcagcttaaggagattttgggctgagacgatggggttttctagataaacaatcatgtcgtctgcaaacagggacaatttgacttcctcttttccaaattgaataccctttatttccttctcctgcctgattgccctggccagaacttccaacactatgttgaataggagcggtgagagagggcatccctgtcttgtgccagttttcaaagggaatgcttccagtttttgcccattcagtatggtattggctgtgggtttgtcatagatagctcttattattttgaaatacgtcccatcaatacctaattgattgagagtttttagcatgaagggttgttgaattttctcaaaggctttttctgcatctattgagataatcatgtggtttttgtctttggctctgtttatatgctggattacatttattgatttgcgtatattgaaccagccttgcatccaagggatgaagcccacttggtcatggtggataagctttttgatgtgatcctggattcggtttgccagtattttattgaggatttttgcatcaatgttcatcaaggatattggtctaaaattctcttttttggttgtgtctctgcccggctttggtatcaagatgatgctgacctcataaaatgagttagggaggattccctctttttctcttgattggaatagtttcagaaggaatggtaccagttcctccttgtacctctggtagaattcggctgtgaatccatctggtcctggactctttttggttggtaaactattgattattgccacaatttcagctcctgttattggtctattcagagattcaacttcttcctggtttagtcttgggagagtgtatgtgtcgaggaatgtatccatttcttctagattttctagtttatttgcgtagaggtgtttgtagtattctctgatggtagtttgtatttctgtgggattggtggtgatatcccctttatcattttttattgtgtctatttgattcttctctctttttttctttattagtcttgctagcggtctatcaattttgttgatcctttcaaaaaaccagctcctggattcattgattttttgaagggttttttgtgtctttatttccttcagttctgctctgattttagttatttcttgccttctgctagcttttgaatgtgtttgctcttgcttttctagttcttttaattgtgatgttagggtgtcaattttggatctttcctgctttctcttgtgggcatttagtgctataaatttccctctacacactgctttgaatgcgtcccagagattctggtatgttgtgtctttgttctcgttggtttcaaagaacatctttatttctgccttcatttcgttatgtacccagtagtcattcaggagcaggttgttcagtttccatgtagttgagcggctttgagtgagattcttaatcctgagttctagtttgattgcactgtggtctgagagatagtttgttataatttctgttcttttacatttgctgaggagagctttacttccaactatgtggtcaattttggaataggtgtggtgtggtgctgaaaaaaatgtatattctgttgatttggggtggagagttctgtagatgtctattaggtccgcttggcgcagagctgagttcaattcctgggtatccttgttgactttctgtctcgttgatctgtctaatgttgacagtggggcgttaaagtctcccattattaatgtgtgggagtctaagtctctttgtaggtcactcaggacttgctttatgcatctgggagctcctgtattgggtgcatatatatttaggatagttagctcctcttgttgaattgatccctttaccattatgtaatggccttctttgtctcttttgatctttgttggtttaaagtctgttttatcagagagtaggattgcaacccctgcctttttttgttttccatttgcttggtagatcttcctccatccttttattttgagcctatgtgtgtctctgcacgtgagatgggtttcctgaatacagcacactgatgggtcttgactctttatccaacttgccagtctgtgtcttttaattggagaatttagtccatttacatttaaagttaatattgttatgtgtgaatttgatcctgtgattatgatgttagctggtgattttgctcgttagttgatgcagtttcttcctagtctcgatggtctttacattttcgcatgattttgcagcggctggtaccggttgttcctttccatgtttagcgcttccttcaggatctcttttagggcaggcctggtggtgacaaaatctctcagcatttgcttgtctgtaaagtattttatttgtccttcacttatgaagcttagtttggctggatatgaaattctgggttgaaaattcttttctttaagaatgttgaatattggcccccactctcttctggcttgtagggtttctgccgagagatccgctgttagtctgatgggcttccctttgagggtaacccgacctttctctctggctgcccttaacattttttccttcatttcaactttggtgaatctgacaattatgtgtcttggagttgctcttctcgaggagtatctttgtggcgttctctgtatttcctgaatctgaacgttggcctgccttgctagattggggaagttctcctggataatatcctgcagagtgttttccaacttggttccattctccgcatcactttcaggtacaccaatcagacgtagatttggtcttttcacatagtcccgtatttcttggaggctttgctcatttctttttattcttttttctctaaacttcccttctcacttcatttcattcgtttcatcttccatcgctgataccctttcttccagttgattgcatcggctcctgaggcttctgcattcttcacgtagttctcgagccttggttttcagttccatcagctcctttaagcacttctctgtattggttattctagttatacattcttctaaatttttttcaaagttttcaacttctttgcctttggtttgaatgtcctcccgtagctcagagtaatttgatcgtctgaagccttcctctctcagttcgtcaaaatcattctccatccagctttgttccgttgctggtgaggaactgcgttcctttggaggaggagaggcgctctgcgttttagagtttccagtttttctgttctgttttttccccatctttgtggttttatctgcttttggtctttgatgatggtgatgtacagatgggttttcggtgtggatgtcctttctgtttgttagttttccttctaacagacaggaccctcagctgcaggtctgttggaataccctgcagtgtgaggtgtcagtgtgccccctgctggggggtggctcccagttaggctgctcgggggtcagggacccacttgaggaggcagtctgcccgttctcagatctccagctgcgtgctgggagaaccactgctctcttcaaagctgtcagacagggacatttaagtctgcagaggttactgctgtctttttgtttgtctgtgccctgcccccagaggtggagcatacagaggcaggcaggcctccttgagctgtggtgggctccacccagttccagcttctcggctgctttgtttacctaatcaagcctgggcaatggcgggcgcccctcccccagccttgaaggggccttgcagtttgatctcagactgctgtgctagcatacagggagattccgtgggcgtaggaccctccnnnnnnnnnnnnnnnnnnnnnnnnnnnnnnnnnnnnnnnnnnnnnnnnnnnnnnnnnnnnnnnnnnnnnnnnnnnnnnnnnnnnnnnnnnnnnnnnnnnnnnnnnnnnnnnnnnnnnnnnnnnnnnnnnnnnnnnnnnnnnnnnnnnnnnnnnnnnnnnnnnnnnnnnnnnnnnnnnnnnnnnnnnnnnnnnnnnnnnnnnnnnnnnnnnnnnnnnnnnnnnnnnnnnnnnnnnnnnnnnnnnnnnnnnnnnnnnnnnnnnnnnnnnnnnnnnnnnnnnnnnnnnnnnnnnnnnnnnnnnnnnnnnnnnnnnnnnnnnnnnnnnnnnnnnnnnnnnnnnnnnnnnnnnnnnnnnnnnnnnnnnnnnnnnnnnnnnnnnnnnnnnnnnnnnnnnnnnnnnnnnnnnnnnnnnnnnnnnnnnnnnnnnnnnnnnnnnnnnnnnnnnnnnnnnnnnnnnnnnnnnnnnnnnnnnnnnnnnnnnnnnnnnnnnnnnnnnnnnnnnnnnnnnnnnnnnnnnnnnnnnnnnnnnnnnnnnnnnnnnnnnnnnnnnnnnnnnnnnnnnnnnnnnnnnnnnnnnnnnnnnnnnnnnnnnnnnnnnnnnnnnnnnnnnnnnnnnnnnnnnnnnnnnnnnnnnnnnnnnnnnnnnnnnnnnnnnnnnnnnnnnnnnnnnnnnnnnnnnnnnnnnnnnnnnntcttgaattgatttttgtataaggtgtaaggaagggatccagtttcagctttctacatatggctagccagttttcccagcaccatttattaaatagggaatcctttccccatttcttgtttttgtcaggtttgtcaaagatcagatggttgtagatgtgtgataacatttctgaggactctattctgttccattgatctacatctctgttttggtaccagtaccatgctgttttggttactgtagccttgtagtatagcttgaaatcaggtagcatgatgcctccagctttgttctttttgcttaggattgtcttggcaatgtgggctcttttttggttccatatgaactttaaagtagttttttccaattctgtgaagaaagtcattggtagcttgatggggatggcattgaatctataaatcaccttggacagtatggccattttcacaatattgattcttcctatccatgagcatggattgttcttccatttgtttgtgtcctcttttattttgctgagcagtggtttgtagttctccttgaagaggttcttcacatcctttgtaagttggattcctagatattttattctctttgaagcaattgtgaatgggagttcactcatgatttggctctctgtttgtctgttattggtgtataggaatgcttgtgatttttgcacattgattttgtatcctgagactttgctgaagttgcttatcagcttaaggagatattgggctgagacgatggggttttctaaatatacagtcatgtcatctgcaaacagggacaatttgacttcctcttttcctaattaaataccctttatttctttctcttgcctgattgccctggccagaacttccaacactatgctgagtaggagtggtgagagagggcattcctgtcttgtgccagttttcaaagggaatgcttccagtttttgcccattcagtatgatattggctgtgggtttgtcataaatagctgttattattttgagatacatcccatcaatacctagtttattgatttagcatgaagggctgttgaattttgtcaaaggccttttctgcatctattgagataatcatgtggtttttgtctttggttctgtttatatgctggattacgcttattgatttgtgtatgctgaaccagccttgcatcacagggatgaagcccacttgatcatggtggataagctttttgatgtgatcctggattcggtttgccagtattttattgaggatttttgcatcaatgttcatcagggatattggtctaaaattctctttttttgttgtgtctctgccaggctttggtgtcagaatgatgttggcctcataaaatgaattagggatgattccctctttttgctttgattggaatagtttcagaaggaatggaaccagctcctctttgtacctctggtagaattcggctgtgaatccgtctggtcctggacgttttttgggttggtaggctattaattattgcctcaatttcagaacctgttattggactattcagggattcagcttcttcctggtttagtcttgggagggtgtatgtgtccaggaatttatctatttcttctagattttctagtttatttgcatagaggtatttacagtattctctgatggtagtttgtatttctgtgggatgggtggtgatatcccctttatcattttttattgtgtctatttgattcttctctcttttcttctttattagtcttgctagcggtctatcaattttgttgattttttcaaaaaaccagctcctggattcattgattttttgaagggttttttgtgtctctatctccttcagttctgctatgatcttagttatttcttgccttccattagcttttgaatgtgtttgctctggcttctctagttcttttaattgtgatgttagggtgtcaattttagatctctcctgctttctcttgtgggcatttagtgctataaatttccttctacacactacttcaaatgtgtcccagagattctggtgtgttgtgtctttgctctcattggtttcacagaacgtctttatttctgccttcatttcgttgtttacccagtagtcattcaggagcaggttgttcagtttccgtgtagttgagtggttttgagtgagtttctggatcctgagttctagtttgattgccttgtggtctgagagacagtttgttataatttctgttcttttacatttgctgaggagtgctttacttccaactatgtggtcaattttggaataagtgcgatgtggtgctgagaggaatgtatattctgttgatttggggtggagagttatgtaagcagagattttactaagcttcctaaatagttttagattgagaaaataaatttattgcttttttatggattcaggtaaaacaaacacctttcctttattttagaaacaagttatttttgggaaccgagatgggaggattgcttgaggccgggagtttgagaccagcctgagcaacatagtgagattccacttgtaccaaaaaaagaaaaaaattagccagatgtggtggcatgtacctgtagtccccactacttgggaggctgcaatggaaggattgtttgagcccaggagatccaggttgcagtgagctatgaccataccactgcactccagcttgggcaacagagtgcaaccctatctcggaaaaaaaaaaaaaaaaagaaggttacaaacgtgtgtgtattttaacaatgaccaatgttaacataaaagaaatgtcacgtgtatgagagccattaacagattaattgactagacgctgtttttcatactcaagcagccagattgattaaaggggaagacatctcttcagggatgctggactatgtaaatgccaagggtttggtttgtaatagtaataaaatttgtaagcaatataacataccaactaagagagccagcttaggagctacactgcctggttccgaattccagcttcccacatttcctagctttgtaactttggggaagttactcaatttccttttgcctcaattttctagtctgaaaaatatgcagttcatatattgctcataaggttgttgagagaatttttggctaatgcatgtaaacacctcgagtaatggctagaaaatagtaaatattcagtaaatgttggatatcattatatctgttatcaatataaaaccatattgcccaccctcccctgcccctaatccagacctgctctggggagggaacagctcttttgactgtttcttcttttgtttgtctccatgtttctaaatgctttgtttatacttctatttcttgatttatcatttttgatatttacttccttgttctaggtgagcgttttgctttcttacatcattcttctctcccagcttctgacttccctccccctattctccttaaaaagctagattataatttttggttaaattaatcatatgtgtttatattattaacataatataaatataaatattgttcactgctcagccaattagtattctaggatgacatttcttgacaatttttgacaattgcctcattttcatttgcttagttttttaatataacaatcatgtattttccccaaatgctctaatagctctatcaaatgcctgtacaaagacagaaaacaatctataattttttttttctttctggagacccctatcctgtgttccagttgggacttgtttttctctggcctggtgcacagacttctctttgccactcccctgtgctggaacttctgtttgtggcaggacatttatttctttttctagatttatttcctcattttgctgaaacacgttacatgatagcttcctgagaaacataagtaggtggcatatattttgagtctttgaatgtctgtgagtgttttattttgctctccatcttgactgtttggctgggtacaggttgcaagttaatttaaacctggaatttgaagacattgctctagtgacgtctaatatctagtgttgagtccagtgccattctgagtaccatttctatggatatgaccttgatatggatatggatatgacattaaaaattaatcttcctctgtttccattttctcgggattccttttccttttgatttcttttcaactttcttctttttgatggaagctttttccaagtgtctgagttgctagtttggtattaagggtgaggttataaaacctgacccaaaagtctgtacatgtggataggccttgtcagctggtgagcttcaggcaggaaggtggcttggttgccagattgctccccaaggcaacattagtgagtcttttctggagatgatcaatttctccttcatagatgcctccattttccttcgtgaggtaaggggaagatgtggggagatggtggtctgttctgggggtgattaatttctcctccatagatgccttcattctccttcttggagtaaggggaagatgtggggagatggtggtctgttctgggggtgattaatttctcctccatagatgccttcattctccttcttggggtaaggggaagatgtggggagatggtggtctgttctgggagtgggcagaggaaagggagctgagagcgccctttcagtattcctataatcctcctgtactcagttccacatccatctcagttctctgttgaggactgtgccttgaacccatagccattctgcttcagctcctccagagaaaatcttggtcccttagaggagatagaggagtggcgtgacactcaggatctgggagggacctaggcattggattgttccttatcttgctttatctgagccccttagttcctcgcccctgcctttgttaggacctggtgcctctgagtgtgagtgcactgaggcttctgcatatgtgggtgtgtctctcttctgttgacacttagtttgtagcattttccccttcttgactgagttatcactcctccaatagcttacttttcaaacatttgttggaattactcatctgctgttattttactgtcttttaagtagaatttgggaggaagaggagataaacatgtttggtttgtcaatctgctattttgaatgagaaattatcttttttgaggacttagaatcaggcccactgagcttggagaactgcagtcgagcttagttctcggcaaaaggtagtattgggtttctagctgcatgcaggccaagtctcccacaggcacctccacagatcagcttccttctgttttgttgatctggaattctcatagtatttttggtaaacttcaagttcgtatgctaagcaacctaccttttttctattttttatttttatttatttatttattattacactttaagttttagggtacacgtgcacaatgtgcaggttagttacatatgtatacatgtgccatgctggtgcgctgcacccactaactcgtcatctagcattaggtatatctcccaatgctatccctcctcccctgccaccccacaacagtccccagagtgtgatattccccttcctgtgtccatgtgttctcattgttcaattcccacctatgagtgagaatatgcggtgtttggttttttgttcttgtgatagtttactgagaatgatgatttccaatttcatccatgtccctacaaaggacatgaactcatcattttttatggctgcatagtattccatggtgtatatgtgccacattttcttaatccagtctatcattgttggacatttgggttggttccaagtctttgctattgtgaatagtgccgcaataaacatacgtgtgcatgtgtctttatagcagcatgatttatagtcctttgggtatatacccagtaatgggatggctgggtcaaatggtatgtctagttctagatccctgaggaatcgccacactgacttctacaatggttgaactagtttacagtcccaccaacagtgtaaaagtgttcctatttctccgcattctctccagcacctattgtttcctgactttttaatgattgccattctaactggtgtgagatggtatctcactgtggttttgatttgcatttctctgatggtcagtgatggtgagcattttttcatgtgctttttggctgcataaatgtcttcttttgagaagtgtctgttcatatccttcacccactttttgatggggttgtttgtttttttcttgtaaatttgtttgagttcattgtagattctggatattagccctttgtcagatgagtaggttgcgaatattttctcccattttgtgggttgcctgttcactctgatggtagtttcttttgctgtgcagaagctctttagtttaattagatcccatttgtcaattttggctttggttgccattgcttttggtgttttggacatgaagtccttgcccacacctatgtcctgaatggtaatgcctaggttttcttctagggtttttatggttttaggtctaacgtttaaatctttaatccatcttgaattgatttttgtataaggtgtaaggaagggatccagtttcagctttctacatatggctagccagttttcccagcaccatttattaaatagggaatcctttccccattgcttgtttttctcaggtttgtcaaagatcagatagttgtaggtatgcggcgttatttctgagggctctgttctgttccattgatctatatctctgttttggtaccactaccatgttgttttgcttactgtagccttgtaggatagtttgaagtcaggtagtgtgatgcctccagctttgttcttttggcttaggattgccttggcgatgcgggctcttttttggtttcatatgaactttaaagtagttttttccaattctgtgaagaaagtcattggtagcttgatgggggtggcattgaatctataaattaccttgggcagtatggccattttcacgatattgattcttcctacccatgagcatggaatgttcttccatttgtttgtatcctcttttatttcattgagcagtggtttgtagttctccttgaagaggtccttcacatcccttgtaagttggattcctaggtattttattctctttgaagcaattgtgaatgggagttcactcatgatttggctctctgtttgtctgttattggtgtataagaatgcttgtgatttttgtacattgattttgtatcctgagactttgctgaagttgcttatcagcttaaggagattttgggctgagacaatggggttttctagatatacaatcatgtcgtctgcaaacagggacaatttgacttcctcttttcctaattgaataccttttatttccctctcctgcctaattgccctggccagaacttccaacactatgttgaataggagtggtgagtgagggcatccctgtcttgtgccagttttcaaaaggaatgcttccagtttttgcccattcagtatgatattggctgtgggtttgtcatagataactcttattattttgagatacgtcccatcaatacctaattgattgagagtttttagcatgaagggttgttgaattttgtcaaaggccttttctgcatctattgagataatcatgtggtttttgtctttggttctgtttatatgctggattacatttattgatttgcatatattgaaccagccttgcatcccaggggtgaagcccacttgatcatggtggataagctttttgatgtgctgctggattcagtttgccagtatttttttgaggatctttacatcaatgttcatcaaggatattggtctaaaattctcttttttggttgtgtctctgcccggctttggtatcaagatgatgctgacctcataaaatgagttagggaggattccctctttttctcttgattggaatagtttcagaaggaatggtaccagttcctccttgtacctctggtagaattcggctgtgaatccatctggtcctggactctttttggcaacctaccttttaaaatattcttcatagtcagtggttcaactctgtatgctttggtgagggaggcattacattgttctttttttttttttttgaatgagtacacagtatatgcaggaaatgagttgtcagaaatcaaatcagctaatgtggtggtgtggtgtagtgccagatacttgggaggatcacttgaggtcaggtgtttgaggctgcagtgagctatgattgtgccactgcactccagcctaggtaagacctgtctctaaagagaaagaaaaagaaatcatattaaaagtcaggattagctgaatgaacccctcagtagaactccctccatcaatgataccttctcttttccaaattctctttttctactgacttttccctatcatcagatatgctcaagtttctcccatcctaaaaaatatgcaatttacccttcactccatgttcctctttagtgataaccccttctctgcatttcatggtcaagtttcttgaaagattgatttgcactttcctatcccttcttccacatttctcactgattactcacctcttgcaatctgcccaccaggtggctgacactcctctcattctggtcacctctaatctctttcttgctaaattaaataatgcctatcagtcctgtatttggtacttcagccatcttctctcaaatattctttcttccatgacagcatactcctggatttccttctatttcttgatcttttttttttctagtgtacgctggagatcttttcttttttgcctgttctataaaaaactgtaaatctgttgttcaacactggttctcctctctctaaataatttcacacctttcatgcctttgattactatctacgtagcaactataaataattatggggagacttttataatagtgcatttactgagtgtttttcctcctaacctagggaatgagggaaagaccaagcaagcgttctgtgggtcatgataaaaatctctatgcaagttctctctctgaggttcagacccatagtgccagctgccttttggttatgtcacctggatatcctacaatcacctctaaaccaacatgtctaagtggatgcttcatccaacttctcacaggccttagaggaagggcatgaccactcaccccttcctttgtgccccatccccacctggtggtcatcatgaacatctccctctcttttagcctctatcattaactcattaacctccagccacactcctagaacatgtggaattttcagtctctgtgtctgtcaaccaccccagacctccgccttgccatgtggtccattaggaatctgtgctctcagaccatcctatgcatctctccatctcagcactcattactcttttatttttgtctcttggcctagttgcctcctcctctttcaccacctcactatgaattaccttgagggtggtgtccacacttctttccagatgcttaacttctctttgacttggttccctcatctgtagaataggaacgatactaatgcctacttgattgagtggctgtgaggatggatgaatccatgcagaatacttggtccagtttctgccacctagtaagtgctcatttaatctaagctgtaattattaacactattagcaatattgtgttttctaaatatatagttggctttctatcacatagagaactttcttttcaaaatttgctgaataaatgaagagaaaaagtagtaggatttttttcttcctactgcaaaagaaagaggtatggctgtttattctgattcagattttctttagtgaaaaaaagaaaaaagagggtaaaagaaggcataacaactccataaagaggaaagcgtttttttttttgtcttgttttttttaatcagttctgatttcctttctggtatctctgctggtcttttcaaaacttggcaactttgtggctgtggaagactgttgatgagagggttgggcgatgatacctcagggttaccctcaggtcgtacctggtggtgtcagcttatcagagccgtctccgggtggtagtaggtgaactcaggtatctcttcttcagatattctacagtgagaaatttttttctggaaggttggacatgggagtaaatccaggccataccattcctggttctgtttgtcagtatcatatctactctttgagatccaaagtttgaggaatggatagattctaggtttatctcacgttattgctcagcagcttacagagttttttttttttaaaaaagaattccacatgtgttcctgaaatatgctctaactctgacacaaaatttcagtgtgcattagtaggaaaattgatgccttacaaaatatacttagcttaaaatatgtccatattttaacttataggaagagaaattctcgcagctaacagggtggaaaatgttgaaagtttggcttttgattggatttcaaagaatctctattggacagactctcattacaagagtatcagtgtcatgaggctagctgataaaacgagacgcacagtagttcagtatttaaataacccacggtcggtggtagttcatccttttgccgggtaagtgtgttcatgttttcctaagagcttgaaactgtatgtcttttacagtcattgaaaagtgatgccctagggatttaggtaagttcagcaaatataagattgaactgtataagttgaaatcaccttaaattttatttcttttttccttcaaaaaactttattctgggggagtaaaaaaaattgtttttaaacccaaaacatttcttctaacttttggctttctcagtcttcactgaagagtagtttttttcacagttgcagaggaccaaacaatgtgatatagattcagtagaaaaggagtgaataggcaacagaattaacaagaaagacccaaattctttccctgctttaatatatttatataaagcttagcaaaacttgcttaatcattcagtagttttcagaataaaaagtttttcagaccacaaagtttcatgttttaccattctataattggtggtgccagacaaggaaagacagaagagttcacagtattcctttttggttcctacttgtcttatttaaatatgtttaacagctactgtgtttatttagaacaaatctgagctatgtgttgtatatgagtggaatgataaaaaagatggctgctaacccaccaatgcctgattacccagggaacatccatacctgttcttccgttagatatataatctcatcagcttccaaagctagtttgtgaaggaggtatgtgtaaatacccattttagagagaatgaatctaaggcgcagtgagataaagtgacttgtgaaagggcccgcagctattaggcaacagtcagtattcaaattccagacctgtctgactggaatgcctgtgtgcctaaaaaagtctgtttgctgcgtctagagtgtctgctttaatttcctctctgtaagataataaaagaaacacattttaaaactgatattattattgataagaaatttcattgccctatagagagttaaacagtttatttttttaatgaatttgtcttaactcaaacttttggcctttggttttgaaaaactgttgaattcctttcctgttgactcttttgtttaaaatgatatgaagtagttacatttcagaaagttacattttggaaaagaataattttgattcctctggatcccataaaagagaaaaagttgtttttttattttcttttgttttttttttttgtgtgtgtgttttttttttttttttttttgcctctagacttatctttttcccactctttagagtattaaaaaaatgcttgggtcagatactgtttgcattgcattgatttggatgctttcttcatctgagatgaatggtttcctgcaaatttatcaattccttatggaagaatgactagaggatcctgaatgtttaatctagagagaaagagattgaaatgttttcttgctgtgttcattgtttattattttattttaataacgcggaatatttaataggtaacctgaattgtgtcttgttagagaatatgttaggcgacaatagttttagttcctaaactctgagacagtggttctcttctctcaatgcccatttaaatgccatttgtatttgtgactttggttacatgttaactaaattttaactgagaattacatgagttatacactaagtatgttaagttcaatagcatataaagaaaacaaaattaattgcagtatctggagaatctctgtttgttctaaatctctggaagtcatgtagtttgtcccagtgttgacagccttaatttactactgctttttctaggtatctattcttcactgattggttccgtcctgctaaaattatgagagcatggagtgacggatctcacctcttgcctgtaataaacactactcttggatggcccaatggcttggccatcgattgggcgtaagtaggaatcatcatccccgatacttagttctcttttactgcagaacacataatgaggcaggttgggtgatatgatggagtaaggaaactggtactgctttccctcgcagaattttaaataattaattggtgatgggagaaggatattgaacaagaacacaaaggacataaacatagttggccagctactgctggggtgaaaactaataaattcatgagtattctgagaaaattactagagaaagctgaatgacaagatttagtggaaactcaagatgggggaggtgggtcccaagcaacatttaaagtagggtacagatttgttgaactgtaggcagtgtgtaatttcttacagggagcatcttgagtttaggaaatctttggagtcaattaatcaacaaatgcacctttgcttacatgcactttgggagaactttaaaagtataagctatggttctcaagaaattgatgatctatctaggaatataggaaaaggaatagagtaaataagcttataaagatgaaatgccaaagtaacttatgggagaaaaaaagggaagaaatatatttaaccttttaaacatagattactaccaatgtttttcttagcttgttgatttcacaaggagaaaataaaatttctggctcaaagatagcaacattttaagttttctaagacgattgattgaaagccacttcatgaaaagtagccgtctctttctgggggacataaaactgttaaatttttaatgaatgtaatttaaattttaaaaactttgtttaataaatgtgtcaactgaccctactgtttttggatgccctttgtgtaaagggtgctctgatagtttttggataagagataactaaatattttattattttagtgcttcacgattgtactgggtagatgcctattttgataaaattgagcacagcacctttgatggtttagacagaagaagactgggccatatagagcagatgacacatccgtttggacttgccatctttggaggtatgttttaaagcaataaaagtatgtattgtttttatacattgcaagttacaatagtaaactcatcctcatgtggcattttcacaatcccagaaaagctggccactttaaaatgaaaaaatttaaaatggtgctattatatatagacaaaacatttggtttgttgatggtgtatttcatttttagagtgtggtttttgttttgtatatattcgtataatgttgacagtgtatatgggtacagcactttgtagattacatgtattatacaattcaacatcccaagtacttagttatacaagtatcatgtgatgaaacagtaaattactgccttcattttcaagaataaaacagcaagagctgtttatagtaatcattgtagcatttcattattctccagtgtttgtaagaatctcattagaaatccttgtggaaaaaacgattacacatattcatcaactatatgctgactgaatgactttgaaacttttttattcaaaatgttggagaactgacatcatctttgttttatggaagtgttaggttatgctttatgaagaacagcaagacataatttttttttcgtcaacctttccaaataatttcatgctactagtgaagattgctgagaagcatgaattctggggaactacagtcacaatgagcacagccaatgcttgcctgtcttctcagctccccatttgagtgcaggcatgctgttgtgagttgagttgctgggaataagaatgtagcctggtaccatgaaacaggtggtttgcttagtcttgaaaacaggagctctgtgaatggttgtatagcttgtgcactgcataaaaatgccaggccaagagggtgaggagacactgaaatctatcctgggtctgtttgacaaaccatgattactccagttagaggggtcatgttttgtttaagtctaccaaaagccctgtgtatatgctagttgtgtccctggttgaaacttcctactttgaataattaacacagtgcttgaaaagactagacactcactataaatcaaagactttctcacatgcatagaatgtatgtgtggaatgaatagttagtaagtatattgcatatcttgtcctgctgtctgtttatctgtggaggagtgtgtggtatttaaaaaatgctcatgagatttttgatgagttaattataaatactcctcccgtcccccttccgccgccgccatccatttactcccttttcactaatgatgtcagacacatgctatttgctgtcgcatagaaacattataaaaagttgaattttgtctgctctgggctgggatgttttgggattcaagaaaatgtagttttaatatcttttggtttcatcagtatgaaaaaaatttgaatgcatacccatgaggacaacacaacattcccaaaatagcaataattatttatttctttcaacattgctgtttattgtgaatttcttttggaaagttcttttgttgtgcaacaccatagaaattgtgtacctttttactaaagggctagatcttcttgattgtgcaccacacagaactaaaagatttattgaactacttacttatttaagtatatgaggatgcctttgttagtagtgggactgggattgccagtctctagaaagatttagggagtccagtgactgattggtcattgattagaccacagataaggaaattggtcaaataaaatttatgacatcttaaacattttctgattaattagggttttctagttaaactatcattaaagagaaaatccacattgatgcaattctttcttttaaaaatatatgtttattttcctgctgcaatagttagtgtaaagtgaacatgattaaatttttgttgtttagaatcttatgtcgcctctctcttaccattctgagcatcatggaacattagtagtgtggttgtagctgaatccacacttgtgttgagatttttattgatcctcaaacatacactgaaagttccttttttgggctagacctgtacttttccttctcaacagcttcttatttaagtcaagggaaaaaattacaatttaagtgctgtcattaaaacatagaatatgaactgtttgacctgggaaggatctcaggaatgattcagactgtctccttcacacagcgtagtatttgcctaagagcactcagcaggtgagcgctttagcgggcgcagacctatgaggcctcatttaatgctctgtagaagaattccccaattcttattttcactattacctatgcagaactaaatccaattgctactaaatgccatcataaaactccatatgtgcttgcctgaacctgaaccctgatattattaacatacagacttccacagagcattactagggagtaacaagtcgtggaaaatggttagagaaacatattacagatatttatgggggagatgatcgtacttgcaagaagcatttcaagcctattgcattttctcaagtgatttatttataagttagctgtgattgaaaatactaatctacccatgtttcttttcagagcatttattttttactgactggagactgggtgccattattcgagtcaggaaagcagatggcggagaaatgacagttatccgaagtggcattgcttacatactgcatttgaaatcgtatgatgtcaacatccagactggtgagtgagattgcccagttttttttaatttttttgtatgggtttatttatttgttacagtggctcctgttctctttaagtacttattacttaaaggtgtagctcctggtagttttatattcttgtcgttcacataatctaagagtgtaagacgtgaaatctctgttcaatgctgctagccttaaacatgttgtcaggaaaaacacattttgggacttttccatacctaaatggagtgttgtatttggcgggttgatttccaagaggaagctactttttagtattgggtctgaaaaatgttttgtcccgtttgttttccttcacaaatcaaacccgtgacccacctagtgaaaatgtacatgactgactccctcggggctttgcttttgcaggttccaacgcctgtaatcaacccacgcatcctaacggtgactgcagccacttctgcttcccggtgccaaatttccagcgagtgtgtgggtgcccttatggaatgaggctggcttccaatcacttgacatgcgagggggacccaaccaatgaaccacccacggagcagtgtggcttattttccttcccctgtaaaaatggcagatgtgtgcccaattactatcgctgtgatggagtcgatgattgtcatgataacagtgatgagcaactatgtggcacacttagtaagtagctatgcactggcgatatttcctgggatgaatagagtagaggtgggctttaaagaaaataaataaaagcttgggctacttatatgggaaaaatatcttttagaatttcagattcttaacatgcactttgaaggcttttaggaagctaagcaagaaatttcattcataatgttatggatggtttctggccttgatttagactatcttcaacaatttttttctttgacattggctgtttggaccaatgcagtcattatgtcttggcaaactcctcaaaaagtcaaatcgaaataaactagatctgaccaggcaaggtggctcatgcctgtaatcggaggccgagacaggaggattgcttaagtccagaagttcgagaccagcctgggaaacatgacgaaatccggtctctacaaaaaatataaaatggcacatgtatacatatgtaactaacctgcacattgtgcacatgtacccctaaaacttaaagtataataataataaataaaaaaaagaaatagatgagctcagaaaaaaatatatatataaaattacaaatagctgggactattacaaaatacaaaattacaaaatacaaaaaaaaaaacaaaattacaagtagctaggactacaggcacatgccaccacacccagctaatttgtattttgtattttcacaaaatttgtaaaatacaaaaatttgtacttgggaggctgaggtgggagagttgtttgagctgcggaggttgaggctgcagttagccaagactgtgccatgtacttcagcctgtgcaacaggagtgaagccctgcctcaaaaaaataagcaaacaaacaaacaacaacaacaacaaaaaccaaaaataaagtagacctaacctttagcaaccgagagaataatatcacagaataactacttgcaatcatagcctttggaaaatctcatgtgttgtattccttttctcccatgttagagtaaaataaattaacaatgaaatggtggtcttaacctttatattcttcttttgatggtaatctagtctatatagtttggggcctaataaacactattgcagaaggcaaaagtattacattcaaattaaaaaaaagacagaggacagttgaaatctcagaaatctctatcaaggtgaagttaatactaatagtaacctttcttttggagagaaagaggagtgacagatttgcaagagtaaagtgctcacttgtacatttttctgaaatttcttaaattttcatctttttgtgtattatcttcttgtttctaagagcacaaaattttaccttaatattttatctatttgcacttttcatatgacatattttcaagctttctatagtctgaatttgaaattgtggttggaggaagtaacagcttgaaagttaaggatgagctttagagtgaatccaaccagagcgtgaatcataggcaggttcctaaatctctcaaagcctcaatttccttatctgtaaaatgcagacaattatatgtactttatagtattcttgtgaggatttaaagagaacttatatgatgtgtgtgggtgcataacttagaaaaatgccttttctatgataaataccaaataaatgccagccaataatgatgttagtgatgatgacatcacttgatgaacatttctccttattatatacaatgcctccattaaaaaaggtgaactgagcctttataaggcaagaactcatttaaaaggctgtaaaaacaaatgtcttcatgaccagtttgttactattgtagataatacctgttcatcttcggcgttcacctgtggccatggggagtgcattcctgcacactggcgctgtgacaaacgcaacgactgtgtggatggcagtgatgagcacaactgccccacccacgcacctgcttcctgccttgacacccaatacacctgtgataatcaccagtgtatctcaaagaactgggtctgtgacacagacaatgattgtggggatggatctgatgaaaagaactgcagtaagttttgagctggtttcccttgattggtcagcctcataaatagacttcaacaaccaaacggccttgcattctttcctctaaggctcatgcaattttcattgtctctttagtacttctattccacttgtcaatctctgtatcaataggttacaaaaacaaaggcatgtgcctgcacatgggattcttagagtccacctacaaatattgagttctatggaagcaaagcaaggactgcctctgatgtcaaacatttcaattcagataggaattgaaaaagtgaaaatccctcggctatctatttatatatttaaaacaatattaaaagtcatatagatatatccagacctttggctattgatgtttctttttcatttggtacaaggaaaaagacatcaaaataaagaggcacagaaaatttaaatttcctttgatcttatccacctgttttccatcttgccagttctgctttcctttagcttgttgttttattttatgtcttcaataatagtttaagatggagcaaagttccctgggctaagttctagtcctggttgcctgactaggcaagtcactatcatttggaatagatgagctttaagatcccttctagctttcataccctataagtctgtatttaatataatttcatgttgtgggtggggccagccactgcatccgactccaaggctatggtcttaacagcaaggtaggaccctggtttttagaattgttctgttcagacttttaaatccagttttgggggtctgtctacacactgttgctacgaggcatgtgggtcatactggttttgttgcctaactgggttccattgcttggctttggtctagagtcacggacttcatagtattcatgaaatgtagtccaagtccaagcacatgatgctcactttctaaatgtggtctattttccaaggtgtaatcacagtttctgactctgccctgtaatctttttattctcaattctaaaacctatcctagttttgagttcttttgcttagctgactttgatagtgtggctgattcgaaagaattttgaacccatgtacaattgagataacttctgtagctatttagccatttttagtttggctctggtacttgttgcacaggaaataaacttggttttgttttcggatgacattagattcaacagagacatgccaacctactcagtttaattgccccaatcatcgatgtattgacctatcgtttgtctgtgatggggacaaggattgtgttgatggatctgatgaggttggttgtggtaagtgcattgctttcgtttttgttcacaatgtttatttagaaaaatctcagtgttaacacatggaaacagggaggggaacatcacacaccgggacctgttggggggtggggagctagagaagggatggcattaggagaaatacctaatgtagatgatgggttgatgggtgcagcaaaccaccatggcacgtgtatacctatgtaacaaacctgcacgttctgcatatgtactccagaacttaaagtataacaacaaaaaagaaaaatctcagtgtttagtcattttagccctgagctaatttctaatgcttttctctttcattcttagtattaaactgtactgcttctcaattcaagtgtgccagtggggataaatgtattggcgtcacaaatcgttgtgatggtgtttttgattgcagtgacaactcggatgaagcgggctgtcgtaagtaacacatgcccagcatgtttcagacaaaggggtcatttcacttttgccagtattgatattgatattgccacaaattttccctaactcagacaaactgggggaaagtatcctcaaaggaatgcggtattgaacatacagtaaaattgagtagacattgccatataatgtgtaattaacaaatcaagtggtagtataaatggacacttcaaatagtctcttagatgggctaaatatttcttagatatttttgttttcacttttagtttttcttaggacttcccactttagtaggtttaaacttttgaggctctactccatataaagatattttacttttaagtaaaaaaaagatatttcttttaagtttcagtagagaagtcatatcatggtgtagaaatggtatggagctgtgtttagtattgactctgatgaattcattctttgtgctattatgtgttgaatatctgctaagatgttatctatggagattatagaaggcaagagacaattaagcaagagagacagttacaagggtcttagaaatggcacagataaaattctatggaggttcagagaaaagaaatttcttctagttggaggattcaagtaggacttcatacagtataattctgatggatctataatcttcacagactggaaacctatactcacatggtttgttatttgcccactttttgttttaaatggattttagacttgcaaaaactcatcagtgagttgatcatttgtttgaacaatggtgttttagaccaaaaaaagtaagttttcatgaattctcctcctgcgtcagaaaggtagtgtgtaaagccatggattaaaaagaaaagttaaataaaatgcttatatactttatagtttgcacaacatctagaaattcctaatcactaattttcctgtttcacattaaaaacataaaattctgtgatgagctgaggttaaactgtcaattgccgctggcttgctgttgccttgtgagatccctggtagagagttttggtttacccttgtcaaatagggaagcagttcttacgtatctctccaggattgctcgatgaacagtggaaagtttgcaaagaactgagtatttaccatcgtctttagttagtgtgtgatggtttcattaggtatagttcatctgagagaaaataataacactcaaacatgatatgaaacacatgaagttcaaagtaatcatagctatttaagctctattgtaatgttctggtgattctttcatagaaagatagataaactttattattgaatctgcaattggaagaacattaaaaacacaggaaaaggaaacaggatgttcttttgacacaggtactcatctgctagtcagcagttgtgcgttctgtacttcgtttgttgtcagagccactagttgccacaaagaaatatttctatgtaccagagtgtgggagaagactctatatcatttagccttaaatattaatttggtcatagttgttactataaacctactattggatccaaaatcatttcctctgagtctagactataaaagggatcacaaattacattcacaagccaatttaccccatgttttccttctagcaaccaggcctcctggtatgtgccactcagatgaatttcagtgccaagaagatggtatctgcatcccgaacttctgggaatgtgatgggcatccagactgcctctatggatctgatgagcacaatgcctgtgtccccaagacttgcccttcatcatatttccactgtgacaacggaaactgcatccacagggcatggctctgtgatcgggacaatgactgcggggatatgagtgatgagaaggactgccctactcagccctttcgctgtcctagttggcaatggcagtgtcttggccataacatctgtgtgaatctgagtgtagtgtgtgatggcatctttgactgccccaatgggacagatgagtccccactttgcagtaagtttcctgaccacagtttactggccataaactcattctgaacagtagcctggtgtgcatcaccattgtcacagtcactgtgtagctttgtaggaaggatttcagttcctctatgagttcacatctgtgtagggggtaaccataattgaattcaaatacatcaccattggataattttctgattaaatcctttgtacttggttatgtgtttttacttctttttatgtctttgtttcaaaaaatgagactaaattgaggccattagattgtcaaattaaatttggttctgttggtaatgtgctcattaatttttctaactttaatattttctaatttcaatcagaacttatcacaaaaaaatgaagtccagggatttgtgttgctgtgattaaagtgctgtgattggcatgtaatcctaattactgtcatttctttctttcctctttaatcaatgctcactctcagatgaaccccagccaggtatgatcgtgaagtatttcagattcttatgatttcatatgtgttgtgtttgttctgaaaatgtcctgattatattaacttacttccctttctaatgcatgttctgtgttatgactcttacaaatatgttagagtacacatggaaatagaaggcatttgcatccccaggcatgtgaactgtcttagggtggctttaggcattttcattttggccctgaaagtaaggcatgatgatatgttaccagatctgtgtactctaatgtttcaatgacctttcccctttgatttgttcacttcatagattttctggtcttttctcttaaatgtttgtctatcttccatttctgtatagatagtagaatttcagaggaagaaaacgagaaacaattttaagtgtctttgcatgctctatcaatgacacttttcttccttgatgtcaacaatattttcccaagggttctcattgcattaaatggagttatactattgggttgtagtgaaggtgatcgtactccaatggatatgaaggatggtaaatcctcaggcaaattagagcaaaccctgaacagcctgtggaactcacccaagagcatgctgcacttagctcttgtctgggcatcatattgaaggtggcatgagactgcataataaatattgcataagagtgaatcaaagaagcaaagattgttgattttcttttttcattattctctttcttttttctagatgggaacagctgctcagatttcaatggtggttgtactcacgagtgtgttcaagagccttttggggctaaatgcctatgtccattgggattcttacttgccaatgattctaagacctgtgaagacatagatgaatgtgatattctaggctcttgtagccagcactgttacaatatgagaggttctttccggtgctcgtgtgatacaggctacatgttagaaagtgatgggaggacatgcaaagttacaggtaattgctgaactaaccctagccagtttatcagcacatcccagagcttaaaatcaaatggcacatgtaggcatttgacaatgttgattaggagttagatcgacttgaatcctggaaagattatgcaatctctttaaacctcaattttttgtgaggattaaatggggtaatacacattaaaatcctggtgtattttggaaaatagaggttaaaacatatacaagtcaatgacttttaaagtatttaaaataataccaaatggcttttatataatttaaaatgagttctatactatatttaagcatctttatataatgcttaattgaattcaaccagtattaattcaatttctgctataagaaagtgctttttactatgtattaggatattgatttgaccactttcaaagtgaccaaatagaggaagctaaaagaaaaacagaaagtttctttcttttacatgtagtaggagtctggatgtcagagagtccagggcatggggtctgctctgttatcctcatcatgtggcttacatcaagggttccaatgctccaggttttagcttctcttagaaagtaggaaggggaaagagaaagtggaaggcaagcagcttcctttttagaatgtgacctgaaatttgattcgtaatttctactcacatcctattggtcagaacttagtcatgtggtcactccaaacttcagtggagggagagaaatgtctctggctggagagtctgtgccaagctaaaacttggcatgctttattactaaaaagaaaaagaagagagggggtgttgggagaattagaactctctaccatagctgagggccttagaaaacagaaatatttaagacatgattcctgctgtccagaagcctacaacctattaaatagtaaggaagataaccaaagtacaaaaataaatacagtaaaaggaagaatgtaagcatagtttactctagactagtatttagaaacacagttaaatataacccaagaaagagtctattttaagtactcatgaaaaccagctaactattaaggttaagaatgacgtgattaaaatcattcttatggggcttcctcccctccccaccaacttactatagtttggaattacaccttctttctgttaccaaaagtattgaatcaaaagttttaaagagttgttttgtgttttctcccagtgtcattgacatttttgcatttttttttttgaacagcatctgagagtctgctgttacttgtggcaagtcagaacaaaattattgccgacagtgtcacctcccaggtccacaatatctattcattggtcgagaatggttcttacattgtagctgttgattttgattcaattagtggtcgtatcttttggtctgatgcaactcagggtaaaacctggagtgcgtttcaaaatggaacggacagaagagtggtaagtacatttctgttgacctttggcctggctagttcctctgtcttgggtctgtttgctgttattcaccagtgagagaaggccctacctcatctgggtagctctcatggtaccttctgggccacatcatacccaagagacttgcgtgttcataactacgaatttatggctgttttagataggagggtggtctctgaatgcagatgtatgattctgaattccaggtcaggtgatgcagagacctcacaatgtctttacggttccttttgcagtcttttcttgtggatgagagcagaggaaagtgcaggaaagttaaggggttgcttttcttagctttaatttagtgatatttctcaatccatctcccagaatttcagtttcttggctcctgatagttacatttcctctgcatcttacaactttattttgtaattcttggtgcttaattaatagagatattattcgttgcatgcaaacactataacgttttgtaatgttgccaactaagcaaatggatgagctttttcttaattgcaaaaacttttgaaaccaaaacgaaactatgcactaaccgaacaatgaagttatcttagaatgttcagtgtgacaaaatcttgtatacttttctcagaaaaccctactgttgatttggtggttagctatatgaggagacaaaattttctaatccccacaagtaattataggacaagttagatggtttaatctagatttttatataatatccatgtttgcattcatttatttgctctagaattcactctttattcacttttgtctataggtatttgacagtagcatcatcttgactgaaactattgcaatagattgggtaggtcgtaatctttactggacagactatgctctggaaacaattgaagtctccaaaattgatgggagccacaggactgtgctgattagtaaaaacctaacaaatccaagaggactagcattagatcccagaatgaagtaagactttttttaaaaattatgttgccttgacatggttatgatgagggaaaaacaacagtaacatgatgtagctgatatgcatgttgctgatatgcaaaatttaaaatgatccattgtttaaacatggtaggtgtccaactgggtgttgctatctctccttcatctgaatcatcctcttcataaagtacataagagcaattgattgtttactttattttaagagcacattgatttattagcttggcaatacaatttttgaaatgtcatataattaaaaattaagtttctaattactgcatgcagtaatagtccatagaggggccagtttgatgtaactttgataactcatgattatacaacaaaaaagctggatttttctgcttcagttttatgttgtttattagagctcccttttaagtcatataaggaaggcagtttttgcctgctgatcctgaagggaagatagagaaattctcccctgtgtttggaaatctttgaggatttctttccctgaatttacttatattttataacttagattcttttctgcaggatggtaaattaggcaagttatgttcaatgtgatgttgaattcctagatattgtaaagtattacacaccacggaaatttatgatgaatccctgatgaagaataaattgatttccttatctaaaaacatgacagggtagacaaacaaggacagatggatttttctagatcaactatttgtggattataaacaaacatgaattggcattgagacatttcaatgtcataatgtactacattatgacattatgtattacatgttttatgaacattataaaaatacccagatgcattgtgatttgttatgacagttttactttgtgacacttagaggaaacaataaactctgtgaatatattctgaaccagagatgatttattttaagcagggcataaacaggatgttgtattatttaaaatgacagttatttttaatatttaaatacgtcccttccaattggtaactcatttcctttcccagtgagcatctactgttctggtctgactggggccaccaccctcgcatcgagcgagccagcatggacggcagcatgcgcactgtcattgtccaggacaagatcttctggccctgcggcttaactattgactaccccaacagactgctctacttcatggactcctatcttgattacatggacttttgtgattataatggacaccatcggagacaggtgatagccagtgatttggtaagttggtggtgaggaaaaccaaattaaaactacagtcgtggataggtagaaatcagacgagtatcagaaaagctaagaaattaatttttgtgtcatagacattgtcagatcaatccaggaaataccagcaacagtgagaggcagtctatcccatatgactaactggaaaatgaatattttcattccagttcatggtcagcttgtgccatatccaggaaggatttttatagctcgtgtgatttagttgagctgcagatgtgaatctgttgcttctatacctttaaaaattgtgtcaagtggccgggtgcggtggctcacgcctgtaatcccagcactttgggaggccgaggtgggtggatcatctgaggtcaggagtttgagaccagcttggccaacatggtgaaacctcatctctactaaaaatacaaaaattagccagtgtggtagcacacacctatagtctcagctattcgggaagctgagacaggaaaattgcttgaacccgggaagcagaggttgcagtgagctgagattgcatcactgcactccagcctaggtgacagagcgagactccatctcaaaaaaaaaatttttttttcaagcaaaaatttataacttaacttggccaggcacattgtctcacatctgtaatcctagcactttgggaggctgaggttggtggatcgcttgagcccaggagttcaagaccaacctgggtaacatggcaaaaccccatttctacaaaaaaatacaaaaattagctgggtatggtggtgtgtgcctatagtcccaactacttgggaggctgaggtgggaggattgcctgaacccagggaggtcaaggctgtagtgagctgtgattgtgccactgcactccagcctgggtgacagagtgagaccctgttttcaaaaaaaaaaaaaaaaaattaactagatttatatttctcagtcctgttcttcacgtaacattttttattctataaattctgttgaatttattttcacaagttaaatgggaaaataaagaaaatagatattttatcaaagagctgttattgacccccattaaaaataggaatgcttttacactgttggtgggagtgtaaattagttcaaccattgtggaagatagtgtggcaattcctcagggatctagaaccagaaataccatttgactcagcaatcccattactgggtatatgcccaaaggaatataaatcattctactataaagacacatgcactcatatgttattgcagcactatttacaatagcaaagacttggaactaacacaaatgcctgttaatgatagacatatacatcatggaatactatgcagccataaaaaagaatgagttcatgtcctttgcagggatatggatgaagctggaaaccatcattttcagcaaactaacacaagaacagaaaaccaaacactgcatgttgtcactcataagtgagagttgaacaatgagaacacatggacacagggaggggaacatcacacaccagggcctgtcagtgggtgggggcaaggggagggagagcattaggacaaatatctaatgcatgtgagggttaaaacctagatgatgggttgatgggtgcagcaaaccaccatggcacatgtatacctatgtaacaaacctgcacattctgcacatgtatcccagaacttaaagtaaaataaaaaataaaaaataaaaaacaatttaaaaaagagaaaaaattgccattgtgtagttgctgtgacttgaaggaaagatgcatctaaactataacagattgatgtgaatcagtgagtggcagcacaagaccgtggaaatagcaggcacaagggtgctgatggtggagtgaaggctggggcgtgggagtgggagatgaggagtctctaagctctctagttccatctaacttttaactagtaggtgatcctgatacatcaccttgctttttgtgcttcagttttgtcttcatttgtaaaatagatgcccagtgtaattaccaagacaaacataaagagtaaatggcacgtgtatgtgaaaggctcttgaatggtttagtgggatataggacgaattgtgtattttttgccgctcttttgcacaatgacttccttgtgtttttattaaataatgacatgttaaaggaaaccgtcttcttgagcagatatcctctttgactcagtgcaccttggctttgatttttggatgaggtctcactgttctcttctgcctcacagattatacggcacccctatgccctaactctctttgaagactctgtgtactggactgaccgtgctactcgtcgggttatgcgagccaacaagtggcatggagggaaccagtcagttgtaatgtataatattcaatggccccttgggattgttgcggttcatccttcgaaacaaccaaattgtgagtgatacagagaaacatcctgcctgggagtagcttgaaaaacactgaccctgggaatgctaaatgcacactgttacagacccatttgtttgggcaatacattttccttttctctttacaaaccaccccactatatactttccctagtcctgacattgccattacttttatttaccatggaaatttcaaacctaggatataataacagcacatctgaattatatcatttcagcatttggctgctacctctgtgaccctcacatgagtctccgtttcctcagctgacaaatggagtacagaccagatagtgccttcgatcctcttaccgctaccactctgattgaaagcagcttacttttaggactagtttattatggcaccactgccttctaggtgctctgctgtagccagcacgagttgtcctaaagtgcatggtatgggtgtctaggtgaaagacttggcatccgtactgttctttctggtgggagagggagataagtcacttaatcttcacttaatcctctctcctcaaaactctccaattgtttctcatacccttcagcatgtggccgctgctatttccctgctctcttctcccactcgctgttgccacattggatttcattatggtccaaaagcacagcaggcaactcctgcctctcagcttctgcgctagctcttccctctgcctggaacatctctcttccagatctctgcatgagttgcttcgcgtgccatttaggattctacccaaatgtcactttctcagagaggccctcattgaccactttacctaaaatagccaccccctcataattcttttgctctttaccctcatgttctgaaatctctctctctctctgagtttagctgttactttttgctcgaatatacactccacttttatagcgtctccagtgcttagaatggtgtttggtttacagtgaatacctaccatttttctggtgaatgaatggattaataatctattaataacatggtatgtgtaataaaaatgtataggatctaggaaacatcctgtgtggggggaccacacagaatcctgattttcaaggtgcagagacacacagagatatcatcagtagaaaaataaaagattattatctaaccaaaatctggaaaactctaggtaaactacaaggtcacacatcaaacacacaactttttttttaatgcaaaaagatctcttttaggtcaggtaaggagaaagattatttggcatcatatttctattacaagttccagattactcagtggctgtttgttcataatccagttatagacttgattgatctataaccttgagtcattctcctctctcgtgtctcttatgaattctaagttgaaagcctgatgctagggaagttgaaagtgtgagtagttcagtgaaaacaaaacaaaagaaaacaacaggggtaacaatgtacttaagctcccctgtactggggcctctggaaggacactaagagcatgactctgttttgattttaatgtggaggttttccacttactggtgctttcttctctttctcatgcagccgtgaatccatgtgccttttcccgctgcagccatctctgcctgctttcctcacaggggcctcatttttactcctgtgtttgtccttcaggctggagtctgtctcctgatctcctgaattgcttgagaggtatagtatgctccttatgtgagctctgaagatggagctggtcatagtttgtgccaagcagtggaaactctaaacccaattgcgactgaacatgtgctgtgtcctttgattcctcaggtgtctgcagaatgatgtgtgttgtatggggtgatgtcactgtgtgccttggttgtaatatagtttctgtatatggaactaatgttatctgtgcatgtaattgaacaatctgtaacctcatattttctctcacctgggtacagttagacttctctgacaagccatgataatgggaagttccaaattcttcacctaagaagtaaacattctcaacgtttgtgtacagcttcattttttatgtccattgtctctttctccctctttttttttcttttttctttcttttttttttttttctgagacagggtcttgctctgatgcccagactgtagtgcaatggcgtaatcatagctcactgtagcctccactttccgggcccctgtgattctcccacctcagcctcctgagtagatgagactataggtgcacgccaccacacccggctaatttttgtattttttgtagagaccgggttttgccatgttgcccaggctggtctccaagttctgccctcaggccatccacttgtcttagcctcccaaagtgctgggattacagacgtgaaccactgcacctggctccattgtctcatttttattcttataaccaatagttaataagtgttctagcctgggtcttctgactccaatttcagtactgttactattaccatctgatactttaagaaagagaattgtgtcggtatgagatattacaagtgactgagcaatttaatatttatctcatcctagagatattttattgggtcgattgaagagtgtgtggaggattattccaagtacttaagggagtaagaaaagaaggaaaagttgcatccagttcacaaaagagatttcttctggagtgtgtacttgtatataatacacttaaaaatataattccttattgcttaaaaatctaagaagttactctaaacccaagttccctttcatttctcagtgaagagaactgaatgaatatattttgatactgatgaaaattgctgtagacaagttcaacttaaatgtttaatgatcacatattcctaaattaagagataatagagtcctaatctagaaggacatttagtcctaatctagaatggaaaatatatactgaattcaggaaacttttagtgtttagatattatgcagatgtaggcttactgaaaatcaaattccatcagcatgtaatattgtgcaatgatactttcatgatgaaagattttaattattggtaattctcacagagggactggcacttgccatttttcctcagagacttattatgtacctaatcctcgttgacattgtttaatttagtgtgtccctagagtctttcaggagaagattaaactgggctgtagacatttcggatacaaagcattctttcagcacacaaagattgttgaattgcacattgggggttggtgtaatcaatattactctctgatgatgattgataagtgttaattttaaatagtgccttttgttgtttcacaaataattccactagtggttttctcatgggttgactttactgaagtggaactttttaagtatttcccagtaggtttcagagcaccagctgagtaactgattgccaatatatgttaaatgaaaaaaggtttccacattttttttttcccaacaagaagtttagaaaacttgttaacatttataggtggaaacattttacttgatttgattgttgaatagcttttaaactagtgtttactaagaggctggaatatatgtagaagtgcttctgtgatgctgttaagtaaaagaagcagatattgcacaatattggccttgtaaaaacatgcattaaaaaacacacaagtttctggaagcaaaaacacacaagtgccaatagtggttacagttggataggggaattatgagatggttctacttatttctaattttatgttataatgagtgctttctctgtatgagactttttaaattctttagaaaatatattccccacaatgccaaaaccaaatgaacaaacaaacctcaagccaaacatcacctcagcacccctaaaattactccaaatacaaatagacttctgactcggtctcaggggcacaaggcacttgcttcagtgattttgtgcaagataagagaacactccttgtccttgctccagggaaggctgcagtgctgatcagcttgtgcagggtatgacttaaggaggacctaggtttgggggtcatatatattgttgttcaattacaacactgagttctcattcctgactatagtgtcttcatgactctgctgacactaacattaatgggattatgacatggaaaatagaaatgaagagatgatctttaacttcaaaagacagagacacactgacctacttaaccgtcaccacctcctgaattcctttccatccaaccctagatgattctgtgcctaccccttcatgccattgtcataattaattgtaagggctcatatacttggtcttgccctctagatgctgcgttccttgaggataaagcctctacctggtctgtagatatatgcttattgcctgtggcacttcgtggtacatggtggcactcagtaaatgttgagtgaatgacaagctctccaatatccatttttgttacttccccagtcctctgatttttacccgtttgctccgtagaaatgtgtgcagtgttgtgaagtcacttctttttgctttcccatatagcacttttcaggcatctccctgcgccacctgttgtcttactggccagttcctttctattactcccctggcatcatcccccaccatgacactcacagtttcagccagcgcagcattgcaggagatcctgttctctggtccattgcttgcaaatgttcattggtggtaaacgttctcagtacatcagcagttatcagataaagggcttgagacatgatccccaggaagcagtagaagcgggtggtgcttaagggaagagtaccatggaagagtcaagaaggcccatgcataatggatgagatatgcaaagtttttaggccctaaacaatgctttggttgagaattattccaattaagcaaagggagatgacccatccaaaagggcaggatcagatcttaagtaagtgagtaaaaatttaaagtcctctgtaaaactgggacagagatagtttctactgagccagtgaacattaataacagataatcaataaataattaatttatatatataatttatataatttcttggtacagctgaaactcataatctagcattttttttttttactgttgcaattaaaccaaatgaaatgagtggtaatttgatactcaagaaatagtacctggcctgcagtatttgcagtgtagtgatgaaaaatgtagattttggagtccaggagtcctggttgtgtgaccttgtttaaattgcttgatttctttgtgtcttatttgcagattgagggaggacctatctaacaaacaagattaggaaacttgagggagataaattaagggaaatacttacctgatgcatggagtatggcgcatattctcaatcaatgagaggcaatttttattgcaattgcagttgttcagaagagaggcaatgtggagcagctgagagaagaagggcttggaagtgaatgagccagggtccatctcctattactgtttcctgtagaagtcacagagctcctgcaaatctcatttgctccagctgaaaacaactttgcaggcttgttgtggaagactctacattgtagtacttgaaaaatgtaaagcattaatagttgcgaaatttacattagactaaatttaaatttgtcctaggttaataaagactgggttatttctcagtaatagaaatgataggaacaagaaaaagctaatgagatgtgaaaataagtaaagaaaaaatgaccaagtcatcctgctgaagatggaaagcttcctggattataaaaataatgaaaacatcatttttagcttatgaaagttgtgtaatgattgatcatttcatactttgtcttaatatgtgatatatcttatacatatatcttaacccaaaacttagatttaaaagttttccttttctcagagaggaattttaaaaccctactcttgatggggatcaggataaatattaaattatttttgaaaaaggaacttttattatctattaaggagataagtgaactgatagtttaagatattgtgggaatgtttaaattacaatgtgtagacagttttgagaactttggaagatactgtttacttattcacttatacattcatccattaatgcagtcatatggtcatccatttagttagcaaacatttattgggcaactattttatgccaggctctgagtaccaggccctgggacacaataatgagcaaatcagacacagtcattgacctttgggagttaaaatcttatagggaagagagacactagtcaagtaacaactgataggattatacattggatttatttattaaagtctcaataaatactaggcaacactttgtagtgttgttttatttttggaacattcttaaaactagtaagctgcctttcacaagaatagtctaaatgatttttttcacttttttttttttcaaaactcaactctcctttccctgagatcagtgtgagtgaggtttgtctgtgtgtagaagtggaggaacttcttgtctgtgaggtttagcaaacatgggtggtttattagtgtaagtaaggacttaatgaagagtaagataaataccaacctgccttgaaaaagtccagacagcgttgtatgtggggttggaggtcttgtggtccagcagcccactgaaaccctgggaaaggcccatgcttgtctgatgaagtacattatatttattgctgcaatgctgcaatgtcattttagcccatatgatggtaacaggctattgccttccattactctaaatgtctaggaatagtgggatatgattttgactgatattcttcttttttcacagatgatcaacctttcttaataactgtaaggcaacatataatttttggaatctcccttaatcctgaggtgaagagcaatgatgctatggtccccatagcagggatacagaatggtttagatgttgaatttgatgacgctgagcaatacatctattgggttgaaaatccagtaagttttgaataacattcaaagtatataatttattcttgaagagcctgcctgcactgatgttttcttataagcaaacttttgtcatgtgagtaaaagggaaacaatgtggaaataaatttatccctaagttttttgattcaatgaggggtataaatgtgagcttggcctggagcaaaaatcataacactctttagctttagaataagaaacaaatttaagctattgtgtattatttactcattcagcaagtattttccagaagtgcctatgatttgccctgcactgaattacctgcttctaaccacagaatacatgccaagaagcagcagtcacaatgcttgcccctagaggagtcttaagctagtagaaaatattcgacgaatataaaaatgatcaaaactcaagacaaaagtagtagttccctaagggaatttagtgaaagcatttgatatggtgctggggccttcctttagaatcctttagaatgtttgcctctagggtaagaatgaacacttctccagttctcttcctcagaggtcattttcttcagccttcagggaaaaaacctgtaagaatagggaaagggcaagaagactataaaggaggaagagaagaaaaatctttgtgtttcatgtttgtcacctatatacaaaatatactcctggccttctgatccacatctgtgacttgggtttttctcatgactcgtatgcttgtggtagttaagaactatctctgtagccagtactggagatagcctgaatgataagccttgtgtattcctgtgacacactgaaaaatcgtttgaagcctacccagtggtgctgaacctttgtttgcctttcctctgagtgtaaggagtgttcaagaaatacagcagctggcagtagccacagtgaagaaagggttcttttgcaggagccatggccttggaaccactcacctccccttgtctttctttccagggtgaaattcacagagtgaagacagatggcaccaacaggacagtatttgcttctatatctatggtggggccttctatgaacctggccttagattggatttcaagaaacctttattctaccaatcctagaactcagtcaatcgaggtaatgattccataatactacttacacaaacattggatttagattgatgtaaactctagtctcaggaatagatctcatgtggattttggaatcatttttaagcaaaaagaaaaagggaaaagatattagtgttaactatcaaagtctctgaagtgaaagaggaaaaccaccttaaaatttttttttcttatttatttatttatttatttatttatttatttatttatttattttagacaaagtctcactctgtcgcccaggctggagtgcagtggcaagaccttggctcactgcaacctctggctcctgggttcaagcaattctcctgtctcagccacccgagtagctgggattacaggcgtgcaccaccaagcctagttaattttttgtatttttagtagagacagggtttcaccatgttggccaggctggtcttgaacacctgacctcaagtgatccacccgccttgacctcccaaagtgttgggattataggcatgagccgccacgcctggctggcaaaaataaattatttgagctttctattgctctattttgtttcctcctaattatcaatactaccttgttgctataaaagtattttaggtaatttacaaaataatatataagaagataaataaaagttgcataaggaattcaacataaagggaagattatggtaagcagggaattttactatgtttcctcatctaatcttcaatgctatttcagttctcaaccaaatttatagtttgcctctgttcttagatggaaatctttctatggctccagtacagtttttctaacagcaaaacagaaagtagaaacttgattctaattcctttgatactctcttcttcaagataagtgttctttttactctaattcccagaagaaattctagatgaggcataggtatgaaatcacatgaagtaagtcagaggtaacttgactagtgttggtttgctccactctgagagaagggtaaaacatggaagggattattaattcacaataattttgaaagtgaaacttcccaaagcaaggagaagtttttggagggggatagttagcagagccctgacaatccactgctttaggtgggcaccagctggcaagacggtttttctctggagcattcagaaagatactgaagatgagcaaggcgcacagcagcctggtggctaatttagagcacctatctatactaaaaagcactctctgtagactaagaacacagcctatgtagagttcggtactatctgaggtttcatgcatccattggtgatcttggaatgtatcccccatggatgagtgcagacgactgtttttatttctgccaaatgaagaaatagggaaaaggtgtcccaggcagagaaaagagctctcactggaacagcgcttgagtttacaaagatctttcactagcatctaatttaatcctcgcaacattcctgagggcaggcaggtctggtagccatttgtgatgagagggaaatttgcagtgtgcacaagtatctcaagccaggtagaatcatcaggtattaacatgaaggaccccttggaggctcctctggttcaagctctttctttaattttttttttacatcagaaaccaaggcccacagaagctaagaagttgtcttaaatggtcagcttcgctgctctaattcctgagcagtattctctctttgcacttttataaactacaactccggcaatccagactggtttaaccctctttgacagtggcagaaaatacttttcatgatttcaactaagactatcatcctcccattaaacaggcaacatctactgcctaagacccttactaccaaactcacatctctctagagtccacccagtgcaaagctgtcttaattccaaatggcaattaatatgctcttattttatctcttggtctcttgattagtaaatggggttcttttcttttaaactgatagttttccaaaagcagggaacgtgtctttcccattagtgttaggtacaatgcagtagcggccagttggagaataactgagcatgcatgtgtgtatggaatggtaagaccactttaaccacatgaaccaaaagtttctaattatgccctgatgcagtgtggtacagaagaaagatattttgatttggagtccagagacctggctttgagtctgggttgcttgctcattttattcattcatttaatgagcactaggaaatgctttctatggatcagttgatcctggatatcctaagatgaataaacattttttttctgtctttaagtagctcacatatctgtgagatggatacataaacaaatacctgtgctccagtgtcgtaagtgtgataaggccagtgaatataaagtgctagtgattggaggcagaggtataagtgaggggagagagcatgcagacttcccattcatggttacttgtgagctgagtcttgaaagataactaatacatccttccttatcggagggtttcactttccgaggtttcagttacctgcagtggcctgagaatatgtgagtacagcacaataagatatttaaaagggaggagagagagagagaccacattcacgtaattgttattacagtatatttttataattgttctattttcagattatggttaatctcttaccatgtctaatttataaattaaactttatcataggtgtgtatgtgtaggaaaaaatatagtatatatagcgttcagtactatctgaggtttcaggcatccattggtgatcttggaatttgtcccccatggatgagggggatgactgtttttatttctgccaagtgaagacgtagggaaaaggtgtcccaggagagaaaaacagttgaataaagaccctgaaacatggaaatgcattttatgactggggacaacactgcattttctccactcatgagctattcgaccttggacaaattacttaacttctctgagcctgttttctcatctgtacagtggagtttatggctgagtaagtaaaagtacttcataacactgaggtatcctgtaaatacagagcgctgtttccctcaaatgatcaatatttttagaagatccatgaaagacctgtgagaataatgatccaagggcaaactgcccttttaatggttttactggtgtttccccttaggtcatttaaattgtaagtaagtcttccaggtgattgttggattaattaagaaaataggaatcgtattcactttctgtttacctgtataatattccttcctgcctaagagtagttcgtgtttaactccgacttgaaaataagagaaacattgaagaaactgttatccactaggggtagctgtgttcccatccactaaaagaaattttatagctgaattgtgaagcctacagaatggccgtgtgagagagagctctatatattccagaaaacaagaaaaggaactttgaaccaaagagatcctcagtcttaagaaaaggagagagattgtagcagaaagaggcaaactgagaaaagaaaagttaccttagtccaagcaagagtgaaagatgccagacaataggcagagaaaaaaatttagagaaaagaatgagggaaagaagaaggatatgtgtgtgtgtgtgtgtgtgtgtgtgtgtatgtgtgcgtgtgaatgcatgcacacacgtgcacacgcatgtatgagagacagagaaacacaaataatctatttgtattgaaaagcaattttatagaaaaaccttaatgcaaaaatcaacagacattttctaatttcttactaattgtctgttagactgtcttaggtacgtattaaaatagcttcattgctgtaagaaacttctttctagtccaataaactatatttctatgtgctgtatcagggccctgttaacactgtgattatagcagtaataatcacagacagccttgggaaagccactaaacctctgtaggcctctttttctccatctgtattgagaaaaataatgggatctacctcacagaattgtttgtgaggatcgaatacaataatgcttgctctaatacctcatacatagtaagtgaccaacagatggatcaattaaacaatagaagtttattgaacatagttgtgctgggtggtatgctgctttacctgtattatctcttagtcccgtaaggtctacgcagaccttccatatttgactgataaagttcaaagaggtgaatttatttgcctcaggttgtacagtcaggacctggcagggcagagatttcagctcatgtgtttcagtttaggttgttgacttggaacagaattcactgtacctctgagtaaatttggactattttgatcaactgtgttggcagtaactggccaccgagtgccttggtggggtgcaggaaagctgtggggttctcatttgtcttccagagatttctcttaactctcctgaaggatttttgcagtttctttaggcagtggctctgtatgttttcccaactgaatcttccttttatccataaaaatgttccctcctgaaattttaggtgagttggaagtaggaacttgggaggtgattttgctgctcttactctcattttctattgagctaatttcctcatttccctgaagtgcaatatagattatctgaatctcatgcaaaccctctctcatccatccctaatcgtgctttggaatttgttttgtatataagttctccttcatctcagtttcctttggttccccttatgaaagtcagttctaataagtgattttatgctataggttttgacactccatggagatatcagatacagaaaaacattgattgccaatgatgggacagctcttggagttggctttccaattggcataactgttgatcctgctcgtgggtgagtattcataaatggcacatgtcttccatgcagcattgttcttgttaatgtcagggtctgacaaaatggaagatttcaaatttaggacatcttctgatttcatatgtcaacatttgaaaaataatagatttcagtgagacagagaaatagctctgacctatatttaatgtgcaggatattgtttgtattttgtcctatggtcttcaaatgaacaacactggatttaaaattaattccaaacaagcaagaattttaggaattttaaaatagcattataagaattgacaatatattctgactttgaaaggacacggaaagctctaaggggttatgtaacatttgcaatagagcttgcaggatgagaagccttctagtaggtggagaatgggttgcaaccaggcagtgactcttgaggccaagggatccatgaaggcacagaggtatggcggcacttagcaggattgtggggagagccggaaccagaggcttagagtagggagctgttgaccacatgggagatacaacagataaggtcatttggggacaaatcaaggagggcctttaatatcatgctaagaagttgaactttattcttttgagtaataaggagcaagtagggattattttttaaaaatttcaacttttattttagatatagggggcacatgtgcaggtttgttacatgggtatattgtacccagatagtgagcatagtacccaatagttagtttttcaacccatgccctcctcccttcctcccctctctagtagtccacagtgtctgttgttcccatgtgtatgtccatgtgtgctcaatgtttagctcccacttataagtcagaacatgtggtatttggttttctcttcctagcaaggaattctgaggaagggagtgaaagaaccaaatttgtgtttttagaaaaattggtcaggattgatgtggagagaggccagggccagggagaccagttaggagaaaatggtcttaatggatgtaggctggagtcctccggtctgtttgattggctatttcattctgttgatctactataccatattataaaccagaataacaaattgtaaaatatgaacactgatttttttttaaagagattgtcgcatcattccaagtggattttggcttaatgtttgaaagttatcagattcttaggcctagaagggcactgaagaagtaatttgtattagcgctctgtttcaaataaggatgacatggaaaccaaatccaatttttaaagggcacaagaagcaaacattctattctgtgcctgctggcttgtactagttttcagttattctttctagaagaaggactgtcttaggttcgaaattctacttttgaaactcaggctcactcattatttgtttttcatttatcagacatttctgcattgtgtacctttgttgggtggtgtgttagttaagatagctaactgttgaagcaaataaactcctaaatatgtaatggctcaaagaaaatagaaatttttttgtcttttatatgggcagtggggtttgggcagaagatgggaggaagctctactctacatagtcattcagaacccaggctgatggatgctctgccatcttcagtaggaggcttcctaggtcattctgagtatcaagatctttcgagcagtaaaggaaagaacattcagaaatttgctgggaggtttttatgagccaggcctacaagtagtgcacgccacttctgctcacactccttaagctagaattgggtcacatggccacagctaactgcacggaaggacatgcagtccacctatttacccagagagaagaggaagacattaattttggcaagtggaggcagtctctttcatggggccacggtggggagttcagagggtggatacaaagattaaagacctaatttgcaaccttaaggatttatggcttagtaaggaggataaggcctgtgtataaataacaataacccaggttcatataagattaagagccacaagagaggctaaaaaaattgggatgatagtgctataaagaggtgacatttcagcttggtggaagagatatcatttggactggatcttaaagcatatctagaatttcactgggcagagctagcttttaagatatatcaggcgatatgaaggatggaaggtcaagagcaaagggacagaaaattgagggtttgttcaagtgactaagagcaacccagttgggttgggagacaattagaagagcttagaattttgtcagaggacataggaggagaaacaagacagagacttgaggatctaatgtcttggattctcagtgaagagaaagtcttgataaagttgtgataaatgttattgaaccagttgttgcagaaaaatatctttgtggatgatcactaataaagagctgaggcaattacagggtctcaagagaggatgttgaatagagatagtagaagttaaaagaatggaaagaggatgaggaaatgtgaatactcttttaagaatcttgtattggaaagttagagaaagataaacttgtaggtcaaaatgtaacaggaaaatgtctttcagaatagagaaacctgagtgtattctttagcagcagatgaaagatcaaggatgaagaaataattgattgagagtgaaagttatggggaaggaattagaaatttatgaagaacaggaatgacttgaaatagtcaatatgcagaacatgatataaagtctgctagggatgagaatcctcagcttagattagggaacttagatttttagtgaattcagaattcatgaaagttttgtgctatgtccaggaaactcttgataccctgaaatgggagaggagaaagaaaaaaaagggcagaaacccagggttggagattagcttagacacaatgggaacccaaaagaataaataagaatattgttgaaatggttacatatgatgtccaggtgtagaaggactggagggttgggagctcaggcagggcttaagggcaaagaacaagtttaataggaaaagttaaagcaaggaagaaatgagagtttttggtcgaagcagagcatctcagagtttgagaacttagaggcggagaagtttagagttgaagatgaaattcaaaggatgggtatattgatttggtggtggaagaggtaggtgaataaagactatttaaatgaaggggtttgaggacttttcagaaaagaatgtaggataattgtccgttgaagatatagaaggaggtgcaatcaaaaggaattaaaagttgggttcaagtctagaacttacgtcttcagtggaaatggaaaacagcccttaatatattttaatacattttcatatatcaaggatttggcaatgctgtgtggtgattatggttcatgcatacctgatcgctgtgaaatagaaagaaaaaagaagtcttccttaccccataacagcatgataatgagattccactctcacagaaaagtgttactcattatttctcctattttctgtgtcagttttcaaaactctttgcatttttcatcacagaaatcaggttaggtaattaagtagccggtcttgtggtagatggtgatttggagaataattgaatgaggcctggtgagtgatcagggagtgtactcggcagctttttatattagctttggccttcactatgtactgaagatggagggattattgatgtaggtttcttccttgtcataagcttcccacacacctgaccatgctaaaagttcagctgccagtgggaaaccctagcttcttattccagacaccattttaaatggcctctactccaattatagctaggaaatataccgacattggtagaacactggtgaagtacccctctacattgtatgcaacaagatattgattttcagcctttgcccattgtattgtgagcatcttgaggacaagtaatacacattgtcatttatgtcattgactcaaacccaccttctgttttgttacatgctggtgtttttcatggttgtaggaagctgtactggtcagaccaaggaactgacagtggggttcctgccaagattgccagtgctaacatggatggcacatctgtgaaaactctctttactgggaacctcgaacacctggagtgtgtcactcttgacatcgaagagcagaaactctactgggcagtcactggaagaggagtggtatgagcaccctttcagtcttttggtctttgtgctgagctggtgtagctgatgctgagtgttctgagctgtcaggcagtggttcttgaacaatcttacttggtaacttgtaccagtgtttcattgcctcttctcccaataacttctctcccttgcacatacctcgcccctagctgaagtccagttctttatagtatgtgcatagttccctatagggtaatgtttattaattttcccaccaacgtttgtttttcttcaggataaattaattccatttgtcatttcttacttgtcatttcagagccatttctttcatggtttagtgatttcagtgtttttctttgaaagtactctgggttctccaattatagagaatatacatatacctatatatatgaagagaatatatatatataaaatatagagtatgtatctatactatatggtatatagaatctatatagattctatatatgatctatgtagatatagaatatatattatagaatatagaatatatatttatagaatacagaatatatatctattatatatagaatatagaatttatctgtataggatataggtatattctatgtatctacctatgtgtgtgtgtatgtatgtatgtatctatttatttatttagcaaggttctgaattcagcatcccctcgtagctacacattcttctctaatattttaacatgattaatgcacatgtgaaactttctttagtggtgattttcaactccaaggttgggttcattatattctacaataagaagcagaaactataaagtctcgttcactcattgaaataggatttgaccttcactgagctggggctaagcacatagacaatgctcaataataattattgatgaagcattgctttgggtgctgaactgaatatatgctagtcccttccttgctatttagcagtagttacttcagatccttgacattgatgcttgtcataatattgtgcagtaggtttggctttcagttcattgtttgttcaacaagtactaacttcactccgaatatggacctataatggtggtaagctttggagattaaaaagaagtgatgatgtgtatgaaaacactttgcagagttgggtgcatgtgtgcaatgacgaggaagctcttgttacatggtatggtttctgtacacacatctgacagggcacagcttctaaatctgcgagcttgttagtggtgtgactctccaacctttctcctagtgtagttcccttatttctccttcactctcctggtttaatcatcaccaaatgctgcaatccatcctcagcctgtcactcatgcccagatcttttctgccacctccaccattctgagcaacgtctctctggccttgactaggcatggccttcagtggtgaagcctgctttcatgttggagacatgttttcttcataaagccacagtcagcaagttggatcatggctcagcttggagccttgccctgaggagtagctcccaacacttctgtgaggttgctcagctaatctggtcctggcctccactctctccactctctcctccaagctcatgtttcttatattctaaattctagaactttgatcagtttcatcagcataaccactcttgtaactgctgggctcccttttcagccatggcagtaaagccacactgtgtctctcaccaatacccagcccagatcctggcacagagcaggcacttgaggcaggtttttggagtgaaattaaaccagctacatctacatttcatttttcttccagaagaagctgactacttgtcattttcccttagggactttattcttgtggttcttttccagtgtaccaaagctattttgattaaagcttgttatctgttcaaatttaatggcaccatttttggccctgtcctgtcttgctgtcctctgtggttgtttgggggcatatttccaatctccattacagaaattgtcagtgaaggtgttaaactcagggtgagtcagctcctgtgcaatggcccacacttagatgtttgagtatgtccttgaccagaatatcacatgcagggactagtggtttagctcccttttcttcaccgtgccacctgaaaaggttgactgactcatgtgagctctgtcttcattatcaatgaaaggggcacagtgacattttcctgacctgctgcttggtgtggttgtgatgatcaaatcagaaaatagatgtaaaaaatctctgtaagggatagagggctgtataaatgtgagacattataattaggagaatattagtgtttaaatgttcaaaattttcagtatgaatccatgaaactaatgaaaattccaatcctttagattgaaagaggaaacgtggatggaacagatcgaatgatcctggtacaccagctttcccacccctggggaattgcagtccatgattctttcctttattatactgatgaacagtatgaggtcattgaaagagttgacaaggccactggggccaacaaaatagtcttgagagataatgttccaaatctgaggggtcttcaagtttatcacagacgcagtaagtatttgttactgaaatacattcgtgggtgtataatgcgtattcacacataactcacttttgtaagcacacacccacacacagtttcacgtatatacacgtgcatacaaattgaaattacctgaaatatttaaaaaatgataatgaagtcttaaacatggttaagtgccaagggctaatttggcatctgaaaggccagattgacttcagagtaagtttattccctttctcttcccattactttcaattccttactttgcttttgcttcatagaactccctgttttctattgtttgtgttacttattagaatataacctccatacgggcaggcattttgtctgtcttgtttactgctcaatactcggtgattagaatagtgcttggtacatagaagttgctcagggcatatgagttggatgcctgctgggaaagtgctaatgggatggaatttttagtcttaaaaggaatgcttttggatgttgcctatttcaacatttttttcaaagataatctaatttctgatttacccctttaaattagtggtatgatacaggtattattttttgatgtattttatagctttcgtcttcagccaaagatgatcaaacaatttgtttcctgtcctataacctaagtttgtcactaggtattttttttaactgcatgtgaaagaaacacatgcagtagaaattaattttttattactataaagaatattctttttttaaatttttccataggtttttggggtacaggtggtgtttggttacatgagtaagttctttagtggtgatttgtgagattttggtgcacccatcacctgagcagtatacactgcaccctatttgtagtcttttatccctcgcccccctcccacccttcccccaagtccacaaagtccattgtatcattcttaggcctttgtgtcctcatagcttagctcccacataccagtgagaacatgcgatgtttggttttccattcctgagttacttcactttgaataatagtctccagtttcttccaagtcactgggaatgccattaattccaggattattctttaaatcttatttcatataattaaaaaaatcacattattgatcatgtaactgaacatattattttaagtgccagttcataggcaaattatgagcagatttatatactgacctccctaatcctcgcatgatttgtagaagaaaacaattgaagccccattctctaactattatacaatagttgggttactggtttcatacctttaggtgttattgtataagctctagtctctccaatgttgtttttagattgctaactcagctactatatgttggttattaatttttagaataaattatttggtgacccaattaaagaaatttgagatggggtggcgagtagctaggatcaaaagttacaaatggattttgttttcatttagatgccgccgaatcctcaaatggctgtagcaacaacatgaatgcctgtcagcagatttgcctgcctgtaccaggaggattgttttcctgcgcctgtgccactggatttaaactcaatcctgataatcggtcctgctctccatataactctttcattgttgtttcgacgctgtctgcaatcagaggctttagcttggaattgtcagatcattcagaaaccatggtgccggtggcaggccaaggtatgccaactccaatataagtaagatttgacttcatctggcaccaggttgaaatccctggtgccatgaaaacatttcttcatgtgtggattcagtgcataatgaagctttcctttccctttaaatcaactggcacagcctaaagtgtttttcacactttagtgtgtctctgaatcacctggagggctcacgccaacacaacgccagacctcgtccccagatttttctgattttgtagtctagggtagggccagagaatctgcactcctaataagctcccagggcatgctgatggtgctggcccatggatcacgctaagaagcacaggcccagagcaatatagaatgtaggatgggtttgcaagaagtactacagagttggtgttccgaagaactgtgccctatttctgattattaatggagatttacggtagaaggtatactactatttaatatggtaatgaaatagtccacaaatatgatttattaatatatatttggtgaattgaagcaaaagagttcacagtgttagtccctctttagtaatcatatttttgcagcactttgtgcttacatactgtgaatgtatagaatgatcacttgcttcctagatgagccaaggtttttaggtataccttagcacaagagtaactaagagttttctaacatcgctaggagaatgtcacaggctaaagagagaaatagagggtagaaaggaaggaaaaaaggatgaagtgaatgaaggggttgtagagatggtcagaaaatacagaaatgcacctggagaagggaatcagagagcttccagtcccacacgtcctcctgcctgatggtcatgttcacgtggactcatgactcatctttgtttttccatatctaaaaagttatggatctaagttatcatcttgtacagatatgacaaattcaatagtttttttctcccagcttttcattaaaaaaatgttcaaacacagaaacgttgaaagatttaggaaatatccttatacccattaccaagatttaacagttgttaacatttcatcacatttgagctctcaatttgtatgtgtgtgtgtgtgtgtacatgcatatgcattcatattcattttttatgaaccttttaaaaataaattttaataccatgccactttacccctacatatgttagcatacagtttcaaagggcattattaaatattcataatcatatttctccagttggcctcacaatattttatatatagctgttttgttccatccaagatctaatcaagattcatgcattgcactgggaatatctcattagtttcttccgatttggagtagttgcctctagctttttgctatgacattgatgttttaaagaggcagacctgttgtctttgagaatcccacactgaggatttgtctgaatatttagtctgtctttcattttttaccctgcagttctcatgaaatgcaagttaggtctaattgcttgattagatcaaggttaaatacacttagcaataatactttataggttatgctgtgttagttgatacagaatcttattaggaagaacataatgtcagcttgtcctgctcttagtggcatttgagtttgatcacttggttaaggtggtcactgctacactgctgctttttaaagctgtatttttttccttcttaattttggtggaatctatgcagtcacacttaggccctgtgaatgtcttggctcccaagcaccttttacccattggttttggcagccattgatgatccttgtttgaaatgattatttaatcgaggattgcaaaatggtgattttcttattttagcattccctttacatttgttagataatattcttctataaaggaaagctcttcgtgtctccctggtttactttttaaataatttattattattatggggtcaaatttttattttttaaattcagtgtgttacagtcaattactgtaatccttcttttgatgttttagtggatccattttggccagggagaacctcttcaagtggcgacctgtatatttctgtgtatgccttgtttcttggtacaataagatgtttcacacccacttcgtaccttccctgcctaaacctataatcaacatttctcccgggagccagagctccttattgtgggaaagagtagaaaccaagatgtgggtctgctcagtgcaactgggaaaaaagggtttcattttgtaatggggagatgctcagagcagggggttgggaatgagggtttgagaggaagggcagacatttaaaagttctaatttcagtgacagcattgtttaatgatcttttcttaacttccaggacgaaatgcactgcatgtggatgtggatgtgtcctctggctttatttattggtgcgattttagcagctcagtggcatctgataatgcgatccgtagaattaaaccagatggatcttctttgatgaacattgtgacacatggaataggagaaaatggagtccggggtattgcagtggattgggtagcaggtatgtaagctatatggtgattttaatatgtttgcatctctgtcatcttattttatgctagaaagtttagcctaactccatgtgctacaggtttgtttttctagacaattattaagaccatttaagatacattgaatctagattaagctacgtgtctatttgacaaatgatatggtgtttcagtttacagatttataacaaattaatccttatcattttcttctgttattaacataatctggagacaaaagtggctaaaatattaaattatgtggatttgttttttttacacttagatttgcatttctgcacttagatttctgcattagaaattttctaaattttcaagagaaagagatataaaaatataaactatggaacagcattcatttgctttgaagctgagcaattttagttgccaaattcttaattgcttccttttattcatatataaaaatcccttagatcgtgagatattttattagtaatttttttaaatgcctggtctagtattatattaacttagttgtatttattcatgcacataagcttgaataacccctcatttttatcactcatctgagtaaaaataccactcataattagtggtattatatgttttggaatataatccaattctacataaaatcagtatcattgaatcaagcttggtgagtaggcatcacttagaaatattagcatgtaggcagggcgcggtggctcatgcctgtaatcccagcactttaggaggctgaggcaggcggatcacctgaggtcaagagttcgagaccagcctgaccaacatggtgaaaccccatctctactaaaaacacaaaaattaaccaggcatggtggcgtacgcctgtaatcccagctactcaggagcctgaggcaggagaatcgcttgaagccaggaggtggaggttgcagtgggccgagattaagccactgccatcaagcctgggtgacagactgagactctgtctcaaattaaaaaaaaatttaaaaaaaggaaatattagcatgtattatgaaaatctaagtactataataagagtttattgcaaaaagtaaatatggaagtatggttaaataaagctttaattgggttcctaactcccgttcctgaatagaaattactatttctgagggtatagataaagcagtagtcagcaaactatggcccatgcgtcaaatgcagcctgttgcctgtttttgtaaataaagttttattgtaacacagctatgcccatttatttgtgtattgtctatgactgctttcatgttgcagtggcagtgttgagtacttgtgaaaccatatgctctgcaaagcctaaaatatttattatgtggccctttacagaaaaagtttgccaaccctggattaaaggattggaaatgagcaaatgcatacatagcaagtagagttaggtaatgaaaaaatgtatcagtaacatatttcacattggcctgatttctctagaggtggtttgaatcagatataggaacaaaatatgtgtgtcttggtagtagcattgatagttcaacaacagactttcaactacatgaaatcaataatttgtggtcattctctacttattatactatcttcataaagttatctttttattctagcatgtacataaggcccaaagggaaatggacttttgttttggtcacttttagaaggtccatgggatgaaaacacctacattagttagaaagactaaggaaaaacttcatgttaaccttaagcacaaagaccatttgataacatcaataacaacctgagatgctgctggtgctccctctttgctacttttatcacattgggatggaagttgtgctatgaaaatgtatatttagagtgtttcaagtaggtattaagcatttagagcttcagatagaaaaggagggacattctggaaaatatacctttcagtggaaagtgggttatgatgttgctatgaattctaatctactttagaagctgaagataggcactttctctctaaatttgaagacacaatctctataattcctaggagtaagaacttatttttctaagcctagactgggacattatcatcttggaaaagacaacatatagtgacccagacttcaaccttatatattttgttctgaatttgtaaagttctccctttttttcttcttggttctccattgatcagcatgcactttcatttttcccataggaaatctttatttaaccaatgcctttgtttctgaaacactgatagaagttctgcggatcaatactacttaccgccgtgttcttcttaaagtcacagtggacatgcctaggcatattgttgtagatcccaagaacagatacctcttctgggctgactatgggcagagaccaaagattgagcgttctttccttgactgtaccaatcgaacagtgcttgtgtcagagggcattgtcacaccacggggcttggcagtggaccgaagtgatggctacgtttattgggttgatgattctttagatataattgcaaggattcgtatcaatggagagaactctgaagtgattcgttatggcagccgttacccaactccttatggcatcactgtttttgaaaattctatcatatgggtagataggaatttgaaaaagatcttccaagccagcaaggaaccagagaacacagagccacccacagtgataagagacaatatcaactggctaagagatgtgaccatctttgacaagcaagtccagccccggtcaccagcagaggtcaacaacaacccttgcttggaaaacaatggtgcgtgctctcatctctgctttgctctgcctggattgcacaccccaaaatgtgactgtgcctttgggaccctgcaaagtgatggcaagaattgtgccatttcaacagaaaatttcctcatctttgccttgtctaattccttgagaagcttacacttggaccctgaaaaccatagcccacctttccaaacaataaatgtggaaagaactgtcatgtctctagactatgacagtataagtgatagaatctacttcacacaaaatttagcctctggagttggacagatttcctatgccaccctgtcttcagggatccatactccaactgtcattgcttcaggtaagtgcactccaggtgctgcttgtcctgcaagtagacacaatggggtcaacacacatggatgactgagtgtttctaatgcatatgagactctaatgtctttgtgtgtgcttgtgtgtgtgtctgcctgtatgtgtccaggtatagggactgctgatggcattgcctttgactggcttactagaagaatttattacagtgactacctcaaccagacgattaattccatggctgaagatgggtctaaccgcactgtgatagcccgcgttccaaaaccaagagcaattgtgttagatccctgccaagggtatgccatcatcttccttgttatatttctgtctgcttatttctggaaaaaatggggcctgaaattatgttcatagatagccaatgtgttatgggcttataacactatggctacagattcaaaagtgaaagcatattgagtgattttacctgggaaggagggtgcagcgcatagctccctttgatggcagaaaggttggcaacatactaggaagtcaacaccctgacttactagatcccttttggacaagctgtgtaagtagaaatggagtttcttttgccatgttactggcaatttgcaattaaagaatattgtccttttttttttttttttaaggactatgaggttccctgtgaattaattattgactccttttgtatgactaggtacctgtactgggctgactgggatacacatgccaaaatcgagagagccacattgggaggaaacttccgggtatccattgtgaacagcagtctggtcatgcccagtgggctgactctggactatgaggaggaccttctctactgggtggatgctagtctgtaggtgtctctggttactcacgtgggtgttaagaagaggttttccttccatttccaaagaagagggatttgcatcatgtgatgaaaatacagcatgccagatagacattgccagaatatagaatcacagttttaggaactatgtttatattggaacttggtgaacatactgtgaaaatttatctatatcatgcattgaataattatgaactaaaagacatctaaagatgcattgctaaatatatctataatttcagctataattataaatgtattttctcaatttagaattacaaatgaaattactcaacttacattctgcaggccctaggtaactgctataaaatctgaatgacttttaaatgccaattgatattatgtttttttctgggctttagcattcaatgtcttttagaaaattgttttcttaaaaaaaaaaagaaaattcttttcttcagtctttgactttttgtcatcttttcaaatagaccctttcttctctggcaagcttctcctcagcacatttcttaatattttccttttgtcaactctaattttgtatgtaacttctccaagtaccccccatatttctcacattccagtcatcctaatggaatagttgaagggatgaaatgattttgtttattatggctggtgtctacatatcgggaatcttaatttttcttgcatatttctttggaattttagtcttgtgatgccaagacctaacctcctgatcttttctttattcccctatttgaaacaaagcagtgatgctttgagtctaagcttggattattctaggtaaacacctcaaggtactcaataaacatcaaattgaaaaagtcactaaggaagtgggttggaaaagttattgttttattgagagtctgctatgtgctcaacactgagttccatgcattacatggattatttcacgttttcctgtttctaatatcaacctggttccttttgtaggattactattcatatttggaagtcaatgattttgtataggctattgtttgataagcaaacaagacctcccaccaccagaagaaacatttccagctgccatatgccccatttgaaaagaaagtttgcagcttgtgtaaacaatgatgaggcgcatgcattgggttgccagttgaaaacttaactcacttgagacttcaacttctaaatttttttttgcttcattttaggcagaggattgaacgcagcactctgacgggcatggatcgtgaagtcattgtcaatgcagccgttcatgcttttggcttgactctctatggccagtatatttactggactgacttgtacacacaaagaatttaccgagctaacaaatatgacgggtcaggtcagattgcaatgaccacaaatttgctctcccagcccaggggaatcaacactgttgtgaagaaccagaaacaacagtgtaacaatccttgtgaacagtttaatgggggctgcagccatatctgtgcaccaggtaaggcactgaccatgaaaattagaacatggagaataatgatcacaataccaattggtaaggaaagctgaagttctcacaggagaaaaaattcaaattctccttgatgtcagggtaatttataaaacagacctggggctatattttgagaggaagacttggcaggcttcttttctaatctatatggagcccttttatgaaagcattttcttttattttatttttgagacggagtctcactctgtcacccaggctggagtgcagtggcgggatctcagctcactgcaacctccacctcctgggttcatgccattctcctgcttcagcctccctagtagctgggactacaggcacacgccatgtccagctaatttttgtatttttagtagagacggggcttcaccatgttggccaggctagtttcaaactcttggcctcaagagattgcccacctcggcctcccaaagtgctgggattacaggtgtgagccacagcactcagcctatgaaggcattttacatacaagcttgatggagttagaaagaaagatgaaggccttggctgccctacttcatgtcttgactaggaattctgtcaatgagctggccttccttataaaaggatttacattttctgcttaagaggtattatttatagtttgaaatatttctggtgatatttgcgggtgggatcatatgtgcttcattgtgcattttataaagaacaacaaattcacgggaaggtgtgccttttgatgttgttgctttgcaaattttgctaagaagagtcgttgatatttcctgttgtttagaaggaatcggcacatttattagaaattggtgattgctcttcttgatggaaaagtgactcagaatatagttaaaaggttaatgggcagaatttccatggcttgtcttagggagcatttaatgtagaagctgttgcaagtgctattgtggaggggtcaatgtgaatggtggctgcatccatcttttgcttcttctgggattatctttcttcaggtccaaatggtgccgagtgccagtgtccacatgagggcaactggtatttagccaacaacaggaagcactgcattgtggacaatggtgaacgatgtggtgcatcttccttcacctgctccaatgggcgctgcatctcggaagagtggaagtgtgataatgacaacgactgtggggatggcagtgatgagatggaaagtgtctgtggtgagttggactcttggcgcttttggtaggagctaatggcatcttgatgtcaagtgtttggtatggaatcctgctgtgtgtgaatgtgtttgaaatgtgtgcctaggcatcctggtagagctgaaaaatgtttcctctgataatccagactgtttctgttaaatcacgtctgtagtggttaagagcacaggcacaatcatcatcctggtgatcgcatttgtaatctgtatagacctgggaaagttacttaatatctcaagcctcagacatctcatctgtaaaatggagctactactagggttcttgcgaggagtaagagaaacaatatgtaaaaatcccttagcatgaggcatggtgcatgctaagtctagcttagcttgggactaaggaaacgtatcattttaccaattttcatagcacaaaggtcattatttcaaaaattttatgaaaataacttccaatcctcagctttcatctgaatagagtgaataaaacacaggggactttctcagggagttctgaggttggttaccttttcctagcagactgtgataggagctaggagtttttattttcctgaaataaactataattgcatgcttttttgtgactgagataaattgagattatagagaaacagaatgactttgatttgtgcttaaattacttgatttgcgcctaaaacaatttaaaaaatgtatacaacatattttgcttaatctaactaattaaaagtgttatctcactttgcatgcagtccattttgcagcgttttttgccttggaaggtaaattcaaagtgtctcttttatttaattgtatctttttaaaaatcaggataatgttttaatcaagagggtttgttctcatgtttttcctgttcttagcacttcacacctgctcaccgacagccttcacctgtgccaatgggcgatgtgtccaatactcttaccgctgtgattactacaatgactgtggtgatggcagtgatgaggcagggtgcctgttcagggactgcaatgccaccacggagtttatgtgcaataacagaaggtgcatacctcgtgagtttatctgcaatggtgtagacaactgccatgataataacacttcagatgagaaaaattgccgtaagtttatcttaagtgcttattgtgattttgggtctgaagtcttggatcacaggagatgaaattattatgtaaaaacaaaggatttccaaaaaaaaaaaccctaagtatttatctaaaacgtaaatttttggctaggcgcggtagcaagtatcaacaaataccaatcttgtttcatttttctctccttttttctagtattttaaagtgactcctagacatgcacttcactgataacattttggaaaataactaccatgccattataatgcctggcaaaatcaaaagtgcttactaaatatccctgagtacctagtccatgttcaaattttgtcacttatccccaaaatgtatttttactgttctctgttcaagttagggttcagatgagatctacaactgattttgattgttataattcttcaatctcttttatgccacaacacttcccactttttaatgtcattgattcattagaaagattaggtgatttgtcctgtagaatatctcacattctggacttgactaattgcataattgatccatttaatttatcttatccctcttatttcctatgaactggtatttagacctagagttttgatcataacaggtgcaattctttgggtaagagtatttcagaggtggagctgtgcgtttcctgttgcatcacctcatgaggcacatgatgttttgttgccccactttaagtggattctggtgtcagcctgaatcatctcttatgaagctcccatcatcctttcacccaatggttttagcatccatcggtggttgttccgtaaacccattatttctttaagagttatgaatgggctctttagaattctggtgttcctgccgcatttattagctgaagtttgataaagaagacatttcccttaccagcttttgttggtaattagaatctacaggataaataccttttgcttgtcaattttcagagtaatgagttggtgacaaaggagaattaacttttagtttagtttagtttagtattatattgaactctttgatcttcatgtatttgatgagttttaatacagtgctgtcaactgtttttttttggtgcccagttgtccaaacttaggccaatgggagtccttaacttggattttccgttctttgacatgaccccaatccatcttcttatagctcaagcttgtcttatatttcctgtcccagtcctggaattagccacttatccaaggagacctcattccctttgtggtacttagaaattatcacagggttgaggtgctcattcctacttagctttcattgcttctagtccttttcaatggtcagagctaggaaatacagtttttaaggaaaagaatttttttttgttttttgagatggagtcttgctgtatcgcccaggctggaatgcagtgacgcgatctcagctcactgcaagctctgcctcccgggttcacgccattctcctgcctcagcctcctgagtagctgggactacaggcacctgccaccatgcctggctaattttttgtcttttttagtagagacgaggtttcaccatgttagccaggatggtctcgatctcctgacctcatgatctgcccaccttggcctcccaaagtgctgggattacaggcgtgagccactgcgcccggccagaaaaaatttttattgatatttcccatttaaatttaagattacaggttgtttacattttagattttataattacatctcttcttatgcttaaaatcatagtttctcttgacatttagttatttgttttattatatagtaatttcaaaatgcctataataatttcaacattattataaccactcaaataatactattaacaataaatctactaagtgtgagattcttcttgctttttaggttatgtcccactagagatatgcagtcaaaatactgattttaaagatatttggaatttttttttctgcagggttatgctatcaacctgatatatagttagctttatctattgctgtttccaaattttattttattttattgattttatttgtacaaaataacatacatagttccaaagttaaaactacatgatgaggtgcatttatagaagtccttcatttcttcctctcctttctgcttcctctgtgctcttctcaatctatccagagagatgacaatttttgttagtttatcttttctttgttgttattgtttttaatataagcatctctctcttgctacacacacacacatacacttatatcatcctttttcttacacaaaagttagcctactgttttgaatcttgctttcttactattaacaatatatcctgaagattatactgtcattacttgtcagtatatagaaatcttctttattcctttaatagctacatattactccattgtgccataggttattttaccaagagttggaactcttgttgatactattaattaatgaaaacagatgatttaagttgcaaaccagagtctcctctcccttctccccagtatcagctggaaatatgtctttttactacagaatctataggtaacataagtatcatggatcctgcctttctgatggctttgaaaatgccgccctttaagtggtttgagttccacaatagacgtgttagcatggatactgttcataatacatatttggtggatatattcctaatatttatctggttgtctttttcaagctgatcgcacttgccagtctggatacacaaaatgtcataattcaaatatttgtattcctcgtgtttatttgtgtgacggagacaatgactgtggagataacagtgatgaaaaccctacttattgcagtgagtaagataaaactgctttctttctatcattccagagatgcatgttgtgagctaatacaaagatatgaagcgtgggtattcgggctgatttcaattgtcatttcacattgaccttctaagtagaggtggtaggcagttgctttcatatgtgattgcaggggtatgagaaactctttctctctgttccctggctagaattcccagaccctgaatatttcttccagagatctgctactattggagagccatttctcccagtgttgaaagccttttgccttcatgtacttaggcagaatttgcccgttaagcccttataatttactcttaatattattatagtggccattagtaactgaaaattttttttttttcagacagtctccctctgtcacctgggctgtagtgtagtggcatgatcacagctcaccgcagcctctgcctcctgtgctcaagccatcctcccatctcagcctcctgagtagctgggattacgtgcatgtgacaccacgcccagctaatttttgtattttttgtagatatggggtttctctgtgttacccaggctggtctggaactcttgggctcaagcgatccacccatctcagcctcccaaagtgctgggattgcaagtatgagccaccgtgcctgaccagtaactgaaagtatctttatatcccctagatacatttgaatttcagaaatctgtatttcgtatttagcaatttggttcattcaaacaatttcctgtatttatagctcaaattaaaaagcctttcttaagtttgataactttgagactattagtgtaaatagatacataatttaaggatttagtgattggacttccctgttctgtgtatatgtagttaaactcttgtcactggcccctcccaaggaaatcaaagggcaccataattatttgtcaccaaattagggtacagcacaggaagaggaatctgtttaataacagcagcacaaggaagcagaattcaggttgcagccaccagatagggctagacagataggaattattgctgacttttcagggacctctgcttccattgtcagttctcccctggcaaatcatcagatatcaggggccaaagcaaaacggccttatagaccagaagaattacaagacttgaattagatgtgcacccacataacaatttggaaaatgcatataaccagagctacctaaaattactcgagaaaagagtcaatgttcaaacataggcagtttcccacttactcaactaaaagtctggtattccaaggatgaatacgaagataactttgccaactttctagagttattatctaacgtagctaaaaggttgtgtgtggagcgagcttagatatgatcacgttattgttttgcttttaatcatcattgcaatggaatttatttaattttacattatcatagaaaaaataaaaccaagacttataatttgtgatttcatttatcacaaagatagttctttggtatttctaacaaatacaatcttttttttttgatttctggaatctagaaaaacaaattggggaattggggcaggattgacttccttctgtctcccatgcttcttcctccccacagaaagcttacacaagcatccattttccaggctcagtcttccttttttggtaactattatctagctcagagatagaggcagattgttaagactgatggcaacatgcttgtgttttgctcatgggttttatcttctttccctcctgcagccactcacacgtgcagcagcagtgagttccaatgcacatctgggcgctgtattcctcaacattggtattgtgatcaagaaacagattgttttgatgcctctgatgaacctgcctcttgtggtaagagagtaagcaagcatgaaaaacatcatgatgcagctagacaacttcagtctcttccaaccgcttcaaatacagagcagggtcatggctgctgaatgcttggacttcctgtcccagctttcatctggaatgctgacaccgctcagcggatattcattaagacctgttagtggagagcactgtgtggggagctgatcaggatatggaagctgctgattgatgctgataaaatgaaattatattggtgatgcacctaatacagtgcttagctggtagaacttaattttagttggctctcaattgaagtttctgaatttggttgagtgctggcccagaaagctgtcagaggacccaaaagtgattggagtcatatacatggggaaggagtatattaggagcatgcatcctcttcctgttctctctctgtgccagtttatgagcacaagaggcccaagaagttgcaggggcctttggttgtattcctggggacagttatgccctgtttacatttggaggctgctatttgccttcacaaattctaatctatatccatgcacattttttacataattgtaaaaatataaaaatacaatcttctacattgctttaaaaaacctgtcaataaatcatattgctatataggagtcagaaaactatggctgtggccagttgcctgtctttatagatagcattttactcaaatgcagccacatatggctgctgtccctctactatggccacatcctgtaggtgcaacagagaccatagggcctgtaagcctaaaatatttactatctagttaaaaagtttgctcatccttgtcttcatactgccttttaatgactataatattccattgagtggttatagtatcatcaaattaactgcctctattattaagcattaggttgcttttattttattcctctatagtatatatcattgcagtaaatattaacatcgtatttaaaacattttattttcaggatattttcttaggatcattagtatagttttatagctgaagtcaaactattttcaattccaattttctctcaggtttaaattctgcgttggagagtggtatttggagtgcttcactaagttctttttccccaacactgaaagttttatagaaagcaaagggcacatagagttttgaggacctgtaaaggaaataactagtaactactggatgagtagaatagtcttagagattggttcaaatgtatgaattattggttcaaatatatgaataattaatatgagtttttaaacttctctatggtaacaaaagccatagtaatagcagtgagtaccaatgacctgatatatttaaataaaaataagcacataatctatatatgaatatatcctcattgtagtaaagtaataatattcagaaatatattttaaagaaataatacgatgtacaaaaaagtaaaatttacattttttcatccttctccaatcccctcactcctcaaaggtaatcactattaaaaggttaaaggttgagtgtgaatttgccttacttttatcttttatatatcttactttacttttatatatcttgatatatagattttaaaaaaacagatggagtcttactatacatattttcttcaattagcttttattttttaagcttaacatcatgtcagcaaatacagaccagcctcattcctgtacactgccaaagaatactttaaaatgcgaatggcccatgtatttttatccttttcctagtggttggacatttaggttgtttccattttttcactatgaaaaacagtgtcaggatgaacatcctttgtgcacatgtggaaagatccttatggtctagatgtccagaaatggtgctgctgtatcaaaggagatatgtctcttcaaaaaatctggatcaggccaggcgcggtggctcacgcctgtaatcctagcgctttgggaggccaaggcaggcggatcacaaggtcaagagatcgagaccatcctggccaacatggtgaagcctgtctctactaaaaacacaagaattagccgggcgtggtggcacacgcctgtaatcccagctactcaggcaggagaatcacttgaacccgggaggcggaggttgcagtgagccgagatagcaccactgcactccagcctggccacagagtgagactctgtctcaaaaaaaaaaaaaaaaaaaagtctggatcaatgtacacacttttcatagcagcttctgaaagagcctgtttcttgttactgttatgatataggctgtgtctttatcagttgcaattatactttctcttgccttaggctaattccagggtgccctgggtttgggagcctatgacacgttcattagttaaataggaatatgtggggttagggttaaagcatctgaatcagtgatggccaatttgaagtagaagagtgacttattttaattcagtatttattgaacagctgtgttctaggaacttttggcctgtgtcagtgaataagacaacaatccctacccacatggagctaatattctaaagaggggagacaggcaaccaatcagtaaattgtctagtatgttgaaaggtggtgctaagtgttatggaaagaaggaaagggagcaaggaagccggcatggggagtgcaggcggggggagactttgcacaaaacaaaatggttttggatgaaaagtagattttaaaatagaaacatgtgaaatagtaggtaattcatatctttcctgggaaaagaagtgttctttctctaccatacacataagggaatattgtgtctcattttagtcaccaaagataattagggctttgcactgtcagttgactacttttagctcaaactgttggtcgctggtactaatcttattggaggactaccctagatgtatataatgaaataatgctctgtttcaggttttctagacaacccatgctacagccagcttgtctccagattcctggactgtaaaccactttttttcactgagaatgctattgatcttttcaggtcactctgagcgaacatgcctagctgatgagttcaagtgtgatggtgggaggtgcatcccaagcgaatggatctgtgacggtgataatgactgtggggatatgagtgacgaggatgaaaggcaccagtgtcgtaagtgaagccgattaattcctctgcagagtcacattccagggaaacacagtagagttgtttttctgtgtttggagaatatgattgcagatttctctgtaattgaatggacactgatagaatgttacctttgtttctccatgctgggagtgtttgatatcatccacttaaatgcttcagagtgatgaaaaatgacttatgtttactttctttctcttacatttggctaatggacataatgtcctacatttctaagggaaaaaaaaaacccacaaatacttggttgtctccttttcttttttcttttctttctttctttcttttttttttttttgacaaggtcttactctgttgcccaggctggagtgcagtggcggtatcatggctcagtgcagcctccactttccaggctcaagcgatcctcccacttcagcctcccgagtagttgggaccatacgcccaccaccatgcctggctgattttttatactttttttttgtagagacgaagtctcactatattggctaggctaatctcaaactactgggctcaagcagtcctcttgccttggcctcccaaagtgctgggattacaagcatgagccactgcgcccagtggttggccgctcttaatagcaaccttcacagtataacaatgaactgtctctagtttcctttgtcaccttaaagcggcatggagggaggggtgttatgcctcttgagtagataatgggacatcattttcattaccaacagggtatggaaatcttagctagttcaagaattaatctaatcggtgttagaataatgtctttctatggtagggcaatagactcaatggctccctgctgcttgcatctgatggcaccctcctgtgttgtgactttggtggtgggtcacaactccacatttaccctatccaccctatccactgacatgggtggttttcagctacacatacatggattgtggtgtatgcatttctctcacctgtctttaccaacatcttcttctttcttttgtttcctattcacctgcaatgagtctggataaaacccctgttcttttattttgtggacactaatgatttgatgtcagcatctcacctctttcctcatagcatcatggtttctgacaactctgttagcatatgcctttcctctccaccccaatattgcttggggtggtagctataatgtagttggaaaagcactaaatttggaagagaaagacctaggtttgaagccccagctcttcacctagttctatgactttgagacatccagttaaccatcttgagcttcagttttctcatctatacaaatggtgtaaaaatacctatctcacattgtgcttgtgtgattacactttgtaaactaaaaaaagttaccaaaatataaggcattcggtatccaattaacaaaatggtagtggttttctgaagccctaagggaaaaagtatgaccattctaatgtattttatggaaaaataaatgagacattttattgtattgatttctttgaaaaagccagggtccaaagcaattaaaatggaatctttggaggtatttttattatgatctattattataatagcagtgtaatttgtctacgtgttttcctcccatttcctttcatacttagaatggtaagtaacattaaagcaaagagaattaactgctgcactgagctctcatgctttctgattcttgcgtgctttggtttcagagaatcaaaactgctcagattccgagtttctctgtgtaaatgacagacctccggacaggaggtgcattccccagtcttgggtctgtgatggcgatgtggattgtactgatggctacgatgagaatcagaattgcaccaggagaacttgctctgaaaatgaattcacctgtggttacggactgtgtatcccaaagatattcaggtgaattgaggattcaaaagttacccagcatgcctcaaatgtccatgggggctgggctcacttacctattaggcacccagtggccgcagtgcccagggcccatgatgcttttagtggcctatgaaaatgtttggattcctttcaaaatcaaagggaaaaaaaacttttacatcaaagaaagtattttaatatataatattaatatatctggctttataccaatatgattgcattaaaatgaaaagaagttacttaaattattaatatataataccatattagcaattttaaattaaatatataatttttaatatttttatggaggaaggagcccaagaaggcaaaaatgcctagggcctgtgaaagacagaatctggccttgcacagagggccagggagatgaatggagagggcttgagataagaattctttcttgaagctggtgacccgcttagttttccacttggagtagagacattggtattacaagaactgtttcactctcctctctctactataagaaaaataacagcacaagcatgatgataaatagagcttggctcttaggctcagagtcaagtagaggcaggtggagtgaactgagacaatgtctccaactaaggatgcagacactgatcaatatcatgcaggagggctggaaggccagactttctgatgctctctttttgacagaagttggaaatctggattttcatttgaaatactctgattttaaatgctggaaacaaattttaaaattcttaaaacactgtgtggatcaaacagattcggctcacagcctgctggtttgggggacctctcctgcaatgttccatggttggacttcttacctctttctccaaatgggcctcttcaaacagtttatatacattcttaacatcccaacttctcatcatcccacttaacaaatacttggattatggaaggaaatggagaagaacaatttgtaagtttcaatcctgattgactaggaaaatagtacgagcattagcaaaagtaggggagtccagaaaggtgcttgctcaaggtggaaggtgagtttgacatagtaggacttcctgaggtgaaagtatgtcttaggtatttgggcacaactggagccatgaagagatattgcttgtgccaaggactgttaagggacacacacaggcacattgagagcaacaggaatggccagcttacagcatgcgaaggaagacagtgggaaagatatactaagtaggcacaagatcagagaagcagagtcacaggggccattgactggaggggcaggcagctcatcaacaggtgctaatgtaccattggagtccagtgtggtgtatgattgtgtgtttattgtggtggtcctgaggaagaaggaggaggtgaaggagcagggactcagcagtaatttaaaaagtagataaatgctatcaggaaaatacactctgtgggtgattcatcctctgatgagtggacattgccgagaggtggtagtttgtgaactgacaatgcaaagacattcaagaggtggaactgtcttcttttgtagtgaagctgcagtagaatatgctttgtttgtatttaagtaatatgaatgtaaagtgtagatttttattttttgcacctaaagtggataaatctttgtctatattttctccctactgctcaagagttctattgtgttgcacttctatagtttttctgaatttggtaaatagctaatagcattagtcttagatgtaaatatattctgaatacctaggcttagactctaggcacaagaatggtagcaggtgttgattttgatcagactccaagttatctcctttattcctcacattctgagctttctgggttcttcctttatcattactatgatctcacagcacagtaacctttcctctctccctttctttcttcgtccattgttcctcccttcactttccctccctttctctctctctctctttctttttttccttgagctttctgaatttccttgaaaagggctatagtagaagagaaaaaaaagttctgtttgtttgaaaacctaagctatcagcttctaagtaagtccaaaatctgtgtctggagtagcctctactaggtgtgctgttagtgtgcatctccttgcttgcttggcagaaagtgtgctccccatttggtacagtgggacaggagatcatttttcctattgacctttttttttcttggctcactactgatgctgctgaaaaacatggatgataagactgaggggtgacaatttggtgatgagctggaatactgacttgcaatagtgtctgaaagcttggtgatttgcttgatgacttgtttttcctcctgcgttggatctaaattagacaaaggaaaacattggtgttttcaaaccatttggaaatgagttaaatagctcccgggagaccaaatggagctgagccagtctgccttgaccacagctttcttcacaattacatgcacacattttgctgtaaatcatgttgacaaggccctgggtttatggatggcagtgctggttagcaggcctggttataggtcagttgtaaaactgaccacattcactgttgttgccttcacattttgtaatgctctatgtgccgctcctatgctttctatgataaattgttcaaaaccattagctttgttcactcttatcaaagattccttgatgcatatgtgagaccccctttagacatcataacttctatgggatcttggagtaatatggagaagaaaggccagtttggctcacagaacttcaggaaattatattgttataatgatgcctgtgtatgttaggtcccgagatagcttctagtactacagcatgccttcttcctttgccagtatgccatgctaacctactagcttgcctttattcacatcaccatgaagactcacatctcatgatagatggcaggagtgtaatgaaagatggaaggaacaggactgacaatgtaaacgttattccagtgggaagatatgtgttcttagaggacacacccaataatcttatttataatatatagcactcaccctatgagtttccatttgggtatgggcacttttatcatgtgattacccagtacattgccagtgcctactggctatctcattatctgttgaacatagatagtgccactgttcataagctgtctcatagatctgatgtataccaaaattacaaaagttgtatttaattagtttatcaactaaggaaaaaatgaatgcaattatttttaatagctatagacctactaattgtctatagctattaaatggtagcatttaatggtagcatttctaatggtagcagccagcccctgaggaagttgtgtggaatgccaaatattggattcttctagaattggtgattagtggggtagacgaagatgttgggggaaaggggatcaaggacactggtgatcttgtcgaaatggttgacctggcatttaggtagataaagaaggaagcaaaaccccaagtgggtaatagttgaggtttattgccaacctctctgaaagtggtactggatctcatgatacaggtgtgaccggcacaatgactgtggtgactatagcgatgagaggggctgcttataccagacttgccaacagaatcagtttacctgtcagaacgggcgctgcattagtaaaaccttcgtctgtgatgaggataatgactgtggagatggatctgatgagctgatgcacctgtgccacaccccagcacccacgtgtccacctcacgagttcaagtgtgacaatgggcgctgcatcgagatgatgaaactctgcaaccacctagatgactgtttggacaacagcgatgagaaaggctgtggtgagtacaacagaggatttgggaaaaggaaacagggaagactgaatatggattctcaacccttcacgacttagactttccaacctgtcctctaactacaaagttaccataaaatcacgattcctgatatagcaaaaggttaccaaagtttcttggtatataagatggggacacacatttttttggaccaattctttgcttagatagtcattagagagaacagaagatgggcaaatattcaggccatcatttaacattattgccaaataaggtactcaagaatgaagggaaccaggttgattctctttgaattcttgtaatgactttttgcctgaagcatccctctgctggaactcattggcctgttcttcatttttgtcctcaggtaattgaatgggagagtttaatatctctctcaccccaaccaccacaagtaaagcagttgagaatccacaacatgggcattgtttgcttagcaccatcttgaactccataacattggcagttcatcctgtttgtggtgtttaatccttgtaaccattgtttcatgtatgttgatattgtctctgtaataacaatttagagaccatatcatttcatttattttgttttctttattccacttgttcattgtcagtactcattgaaagcatttgcctaattgacccagaagtatgtaatgtagtttttatccttatatgaaagataagatgtatatgaaataacattaaaattaaatgctagacagaaactgctgtggaaatgtggagaagagattatctatgcataatattaaaaaatctctgcagcaaaccaccatggcacgtgtttacctattataaaaaacttgcacatcccgcacatgtacccctgaacttaaaagttgaagaaaaaaaaagaaaaaaatttaaaaatcatctaaaaactggcttttgctctattgtaagaaaaacttctataaatttctaccaaagtttcaaaaaccatttaataaattaagaaaaacatgtgctatattatacatttatacaaaaatcatatggaactttcttatggttactcctaattcgtatagattcccattgcattttaattaattttgccttacctcaactataagaattaaatcctcaatagtacataattcaaattaaaatttttagcttgaagacgaagtgatctcagtaggtctcatccaaacctatgaaacattcactcttacaactggaaggagtactagtgatcttctgtaccctgttctctttgcagataataagactgtagcccatagatgggaaacgaattgtttgggggtgcacagtgaactagtagaagagcttggcctgatatttggataatggatttcgcaatgcatgaagttttaatctattgctccttgatgagtagagaactaataagaacttgctgtcctccctctgtagatcatttttgggtgaggttgcccatgtgttacaggaccagccagagggacgtgtagtgttgtgttgcacctagtgttgagctcatgccatctcgtgagaggcaaatgtgtgtatctctttgtggttccatgttcagtgatgtcacactggaagcctgagcttgaccatggtgtgaacagtcacactggaacatgctacaaatcagagcatttagaaaatttttcctgagccctgtttgaccagcacactggccaggctcttttcttctcctcttctttctcatttctcctgtattagttgttgaaaccactgatgaaggagtaagttggtgaggaagttgaaaaatagtgacttttcaataatccacagtctttggaagtctttgttgtctgtcttagcatgattcattaagaattggcactgtttagtagaaatgttgactttgaaccattatagtgagttggtcgttgatattttaggatctctaagaactgctttttacctacaggcattaatgaatgccatgacccttcaatcagtggctgcgatcacaactgcacagacaccttaaccagtttctattgttcctgtcgtcctggttacaagctcatgtctgacaagcggacttgtgttgatattgatgaatgcacagagatgccttttgtctgtagccagaagtgtgagaatgtaataggctcctacatctgtaagtgtgccccaggctacctccgagaaccagatggaaagacctgccggcaaaacagtaacatcgaaccctatctcatttttagcaaccgttactatttgagaaatttaactatagatggctatttttactccctcatcttggaaggactgggcaatgttgtggcattagattttgaccgagtagagaagagattgtattggattgatacacagaggcaagtcattgagagaatgtttctgaataagacaaacaaggagacaatcataaaccacagactaccagctgcagaaagtctggctgtagactgggtttccaggtaagaaaacactgatgagctttttaaaagttaaaaattaaaaaattctaaccatgttttcatcttgataggaaattaatttttcaacttgggttaatatgcagatacatttaatgtttctgcaggtttattttctgctttgtatctgatattcaaatgatagattcagaacagaatatctaattattttaaaaatttatagtatcatttttatggaaagaggaattgcaagggaagagagttcactgttgctggccattcacttaactggagatgatatgaagggacgattcatgcattcattggtgcattcagtcattacttcctgagtccctcctacatgcccagtgtgatgacaagcagcaggggttttgaggggaacaaggcagacatggcccttgctctcctgaagtacataggcttgcttacaatacttgtcattggccgggggcagtggctcacgcctgtaatctcagaactttgggaggctgaggtgagaggatcgcttgagcccagaagttcaagaccagcctgggcaacatggcgaaatctgtctctatggaaaatgaaaaaaattagccaggaaaggtggtgttcatctgtagtcccagctactcatgaggctgaggtaggaggatcccttaagcccaggagatgcaggttgcagggaccgagaacatgcatggcactccagcctgagtaacagagtgagaccctttctcaaaaaaaacaaaacaaacaaaacaaaaaaaacaaccaatactagtcattcccagcatgggctgggcgtgaaaactggagaatggctaacatgagactcttgttttgagattgcccttatggaaactgacagtctttaaggcaggccagtgatattttaactaaactaccagatcaaccacacttcttaacatctctattgaatatcaaatctatcggattcttggcagcataaacttattggctttgtggtcaacagacatcaatctgcaggcactgtaaagatgtatgctgtaaagattcttgttgcagtcagtccagacctccagagggctcttccccacatcctcatatttgactcccttaagggtaaagatcctaaaatgggtggggacagttggcttcccagttctccctgaccagtagctggcctgacataggtgctgagtgcttgctgaataatgaatgaaacattgactaagcattcctattgtatgtatcaattcctgttttacgtatcctacatgtcaaaaagtatagtgattaatgatttccaggaacagaactgagcatggtactgttcttgtcaccatcctttgttccactgcagaaaaaataatatttgaactgtaagacattgtcattcagccctctctctcagaaactgctagaatgacatttctcttggatttcagctatttcctctctatctaggtgtgttctttatcagaagagaattaaatacatgtgaggaagatgggcaagaaagtctgggtgagggtagggtaaacttttcttgaaagtccaggagggtgcacaaccaggctcagcgttcctgaaaacacaaaggcagaatggagcccagttacatttacattggtagggggcagttctaagatactagctacactgaaattagaaacaacttttttctccaatattaataaatatttctgctgtcagcactagggtgtttggtttccaaagcccttgcatttgatttaactttttaaaccaccattatgcacattggaagatactgttggctctcagtgatcttaatttttccagtagtggagatggaatatcttctccatgttttcttgagaagaatctgttcacaggatgtcttttgactgtggaataaagagaaattaatgggaaagcagtaagctcaacagagtagagtgccctatggggtagccagtctgccaggacttgaatggtaatagcaacaggaatactaatacgacaagaataataatagcaactccttctaagcctgttgtgatctgaaataatataatgttttaaaaagtccctggtctgaggcctggcatttaacaagtgttcaataattagctactattattctcactgttcttagtgtctacaatgatggaatccaagattgtagccatctcattcatcaggatttactcatttacccaagtgaattaactggcaagacttgtacatatatggatactcattccttcttgctgaagcctgaagcgatgctactatcctaactattcagatatccagcatgaatggttaagggcgtacttattgcaaagaggcattcaggtcttttggaagggaaatcattctccttcattctccttccggttggaattgattatcaaatcctaaatgaccttctcactataggtgcatttaaccctttggaaggttatggatactataagactctggtgaaagccctgggcccctttagaaagtacacagatcaccaaagctggcttccctgattctgggtaaagaccttgggttaagaacacttaccttataagaaaaataaattttattgaataaaaatacatttataacagaaatgtccttgaggtagcagtttctaacagatcctaatatgtttctaaagcttcttaggtttgattaagtgaaatgtgtctcaggttaagaaactcattttgacagcctgtctgacagaggcagggatgtctctttatcctaaggatgtcataatctttatcttaagaatgtcataattcagagtttctctgtgcagtttcagtgacacacttagacaagtgtgtttccttgactccaccatttaaactgtaattcatgatactcacctctgcttccctgttctgctaagcctttgcactgcctggagagggtgctttatgctgcatgaggaaagtaaaaccagatccgtcgaatgaagtgtgtcccccgtgttttctacatgacaccaccttaaagtgggaattattgcacacagtcttgcaccctctgttgcctcactgcaggaagacaaacttcctgttttcccctgccctcatttgcctgaagaaaggtgacttctaacaactgtctgtgattctcaggtagcttggataggaaactgggtggctaaatatgtaccatttcacaaagtgactgtattgattaactcctggctctccattttagaaagctctactggttggatgcccgcctggatggcctctttgtctctgacctcaatggtggacaccgccgcatgctggcccagcactgtgtggatgccaacaacaccttctgctttgataatcccagaggacttgcccttcaccctcaatatgggtatggtctccctgcaatcctgggcttttctttcacctccttcttccgcctctgttaccaaaaaggctgttcatgtaactatctcaaggccaatgtcttgctggggtttgtcttctgcttttcctacttggtaaattgtttagtgtaatgagtagaagcatggcttcttcatatcatcatcatcagctgttctgttttctttgccctgacacacttttgcacttttcaagtcctgtattttggctgcatgcaaagaaaactgtggtttcagaaaaccgatttctttactggactctcaaagtcaaagccactgaaatccagttaacttgtttatttgtgagcattttctgtacattgtccccttcctttttcttttttagattatttgctgttagctctctttcttttctgaggggctctacagaatgcagactccatttctctaaatggagaaaaggtgtgtattttggctactgacttcttttggcatcagggactgaccctttgtgtttgccctgacaggtacatctactgggcagactggggtcaccgcgcatacattgggagagtaggcatggatggaaccaacaagtctgtgattatctccaccaagttagagtggcctaatggcatcaccattgattacaccaatgatctactctactgggcagatgcccacctgggttacatagagtacgtacatagaaaagcataaaacaattgtgtaactgtttatttcaaacatcagagcttgtgattccagtctattagtcccctctattgtctaactggcctgtctgttggaagtcattcagaggaagtcacacttctaactaaaactgctgagctctatggtatggtgcagtagaaagagggtgaacttttaaatcatatggatcagggtttatgacctggtgttttcacttcttattgttttttttcatctagaaaatggggctaataatctctccccatggtagtcagctcagtgtgcaactcatcttaatttttttttatctctttaattggctctcccctatgaaatatatgattaataaattttggtatttgagaaaaggaaaagaataaaaggatctggaaaactttccctaaaatactttggcacatttatggttaagtgcagtgcagtgttttaggtggcagtagagtctgttaacattaatccaatatgataaggcatttatatctttctggtaataggataattttttaagtgtgttaaatatactgttcaataaacaatactcattgtaaaaagatgatacacattattaatcaaaaattaatcaacaatacccatattgaattttgctagttatggcctagttggaccatagtaatgtcttctgcataagcatttatggataacgatccaggaacagcctgttgcactcaaaagcatggaaatgccattcattcagtagaactatttcaaatttttttattttatttttagaaattcctttcttctgttatatttattttgctgccaaagtcagtgtagtaaagtttgaagttctctaacaccatactccctggggacatgccactgaaaaagaaggaatactggcacacacgctagtgctctttcttcctgtgctcatggcaggcataattaatcaatccaagtactttctcttgttgaactggttcatttgctacactaaggtagcctttagcattctcattgcagaatttaccgtagcagatactaactcactcttagggtagagactaactttaattagaagcagtacaatattatttctagtttacttataccattttgatgtgatatgctgatggtaatacccttagcccttcccacagtgtgtgtatcctctcttaaaaggcacatcaaagagctgagttagctttccatacaatcctatattgaattagtagaagcatcaagatgttcaaagaagcttcaacaactttctaactgacatttgttgttctttgggtcctatagattattcttggtcttgaaagcttagtaggtgtcactcagcatacatttagacagtgtttccaggagcattagagatgaaaaaaggaattttctagttacataatattctgttcactttttgataaatctaatatagattatttacttagatggattataaaatttaggcagtagattttagtctaaaagtcaaatcataatatgaggcactgtgatctgggaataaaggaaactttaatattcatgagccatgttaaattggttacctcttggagaggtagcaatgcctgtgttcagaaatatatttcatagacgcataaagcaatagatttttatagagcatccaattgattccttgtacatcttgggatgcaccaacacatcactggagctgtgcctgtagttctactcttacttttttttttttgagatggagattcgctcttgttgcccaggctgaagtgcaatggtgtgatctcggctcaccacaacctctgcctcctgggttcaagcaattctcctgcctcagcctcctgaggagctggtattacaggcgtgcaccaccacgcctggctaattttgtatttttagtagagacggggtttctccatgttggtcaggctggtctcgaactcccgacctcaggtgatctccctgcctctgcctccctaagtgctgggattacaggcgtgagccactgcgcccagctgtgtagttctactcttgacaaaaagtactcatacagatatctgagatctctctgcaaagattacagatgaactggaagggaaggtctcaggactactttctggtctatgatttttttagaaaaacagatggtggctaggtgcagtggctcacacttataatcccagctctttgggaggctgagcagggcagattgcatgaactcaggagttcaagaccagcttgggcaacatgacgaaaccctgtctctacaaaaattacaaaaattagctggatgtggtggcacctgcctgtcccagctactcaggagactgaggtgggaggatcacttgaacccaggaggaagaggttgcagtgagccaacattgtacaactgtactccagcttgggcaacagagtcagactatctctagataaataaataaataaataaataaataaataaataaatcagacggtgactaatttctggtcatttacctgcatccttatcaacaaaggccaaacacatcttcaagttttcctatgacttttataagttaccataaattatattttgggaaatatttttaacattgcatggctaacattatcaggtttcttagttgctagcttgttctatctcctgtttgagttttaggatctgttccaaatttttaaaatattaaattttcactattttagaaatgatttctgatatagacccacagtaatgaaagcccttggaactgagaggacttgggaatttggctgtggatcctttgtaacatcttgaaatcggagaaccttctctggaggtttattcatctgtaaaagtattcgctaatggtgccatggcaagattaataataaatgtcctgctggtgtttgcgaagttaaccctgcaggcctgtaagttgtgttcccctcaggttatactgagaacgcaactatctcctagaatagcgtcccctccggaatgttaatgagaaggtagaattccagtataatattgctatcttctgatttcttccaatggtgttggaagaaacaagaatggtgttcaccccaggatatcaaaagggtgcttaatgaggaacatcactataagaggccataaacctacaacagctataacagcttcatccgcaggaaagcagctgtggttaggaattagtgattatttaaactcctgacactattcctattttgttaagtattgctttttcacttctacatcttttgttcaattcgaattcatcctttaagtttagtttttattttaattaaagactaggagttttgaggatctgaacttatattatcgctaggaggtagaattttattgattggtgaattcttttatcctgcaagacattagaggagaggaattaccttcatcacgtaactgtttctgcttactgctgcaggtactctgatttggagggccaccatcgacacacggtgtatgatggggcactgcctcaccctttcgctattaccatttttgaagacactatttattggacagattggaatacaaggacagtggaaaagggaaacaaatatgatggatcaaatagacagacactggtgaacacaacacacagaccatttgacatccatgtgtaccatccatataggcagcccattggtgagtaggtgattgaggggtttggcaaggttgccttgggttatgtgcatgtcatgattgtctttaagcatgaacttcatgatttacaaaaagtttgttgtacttgctagtgttttcttcaaagcatatgctgaaagttgacagtaggcaaattatctttagagtttatcccccttcccctgggaaagactacctagaactcttctttttcttaaaactcgctcagttcttcaagatcatctttttttttcctttgtttttgataagatttaacagttatcatgttgccatatttacttcatcaatttctatgggaggactgaagtattttaaaggaattaaaaatatggcatttcagccctaaatactaaatactaaataaatgcatatgatattgtattgtgtataaattagatattattcttatcttctagaagataatgtcaagagcagtgcattttagtgttttttaagtaagagaacttgtttttatttgattgtgaactcatattccttttatgcaattaaagcaactttatgatttagagtctgaaataaagataaaggtctgaaatatattttggggatagactggtttttgtgggtctgctttgttgtgatgtcttgctaaaacatatgataaacttggaattaaggaaaaatgagaattagcaaaataaagaaatttagtatttctttctggaagttaatattcttcatatcatttttattagaagttcaagtaaatattcatctcaaagtggtgaccaggaaaattagtaaagatgctgctcagtttattcatccacattatttttggccaaacttgttacctgtatacttagaatgagggaatgaatatagcatctgttggaaattaaaactttaacctaggtctaggcaaatgaacataagctaagtttactgcctgctttcccaggacttggagaaacacatcttttctagtcagaaacaccagtgggtatagctcacttctggtagcatataaatgagctttcttaaagcacagggttgttgcttgtataactctatcatctattttatttaggaacttttgggaaaatcataaatctaggatagttttttttactctctaagaggtgatgagtttaatgtcaagatgtgtaatcagctaatctgtgcttgatactctctttaagcaaatgaacatatattttcttccttttccactagtgagcaatccctgtggtaccaacaatggtggctgttctcatctctgcctcatcaagccaggaggaaaagggttcacttgcgagtgtccagatgacttccgcacccttcagctgagtggcagcacctactgcctgcccatgtgctccagcacccagttcctgtgcgctaacaatgaaaagtaaggctctctttcccctctcctcagtgcctctccagcccgtggacagacattgaccttcaaggctccaagggatgggagttttctaatgagacaagattttggttaattaacttggttcgtgtggaacacagcaagacgctcagcctccaacttcagataatattttccatgaatagaaggagcttgctaaccaaactgttatgcatatatatgcaaactttcatagaaaggaagcaaaccatatatttctcatttctaattgtcctaagtattggagccagagtgtatataagtacatactgaaaaattgtccctagaagtaatagaatttcactgtcttttccatgtctatgccggcctagctccttagctgcctatgctaggggatccagggttacacattcaaatccatttgtgatcattcgtgtttgctatgaaacatggccacagattattttcttaacaatgtccacaggcccattgataactaggggacctgagttagagagtggcatggagagaggcattaatgcagatcatagcatctaagatgcagaggtagacgattgtagtgattaaataagatatctgagattaagaatctagcatacatttatcgtgagaaagaccctcaacagtttttattgccctccaacttcccaaacaatacttttatatcaccctggcagacaatctcaaccaatcactgctcctagaacacagctcaaaacacccactctttatttatttattgttttttttgtgtggaagaaatttattcatcatattaagagcacattttcagtttgtatttggatcttaagaaacctgttctatcttgccaagttatgttttctctgaaaatacaccattgtaactgagatctaattgatcctcttctagggccacgagagagctcatgcatgtcatttcttggaattcagtgttgactccttctctccagataactgttgcccctggtgctttgctaaagaagtgctgtatgttctctgtgcaggtgcattcctatctggtggaaatgtgatggacagaaagactgctcagatggctctgatgaactggccctttgcccgcagcgcttctgccgactgggacagttccagtgcaatgatggcaactgcaccagcccgcagactttatgcaatgctcaccaaaattgccctgatgggtctgatgaagaccgtcttctttgtggtgtgttgaattggtttatgcctctttttccgacttctatgttgattgcatatgatcatgattctgtgggtatttcctgaatatcatgaactaaaaaccagttcaaagtcctagaaggaaactcaggctccatcctttttctatttttatgaagtttttttttttttagaaatcttaaggtttttacaaggcaaatggttgaagtagacaataagttgtctctactggtggctcttcaccatgtgctgggcattgaatcccctttgagagctaacattgaggaggaaacgagaggtttccacccccatttttaacagggactctcagttgtcatatttctttatgtttccatttaaaaggcaaaaaaaaaaaaaaaaaaaaaaagaagactgagcacagtggctcatgcctgtaatcccaacagtttgggaggctgaggcaggtcgatcgcttgagcccaggattccaacaccagcctaggcaacatggcaaaagactgtctctacaaaaaatacaaaaaattagcctggcatggtggcatgtgcctgtaatcccagctacgtgggaggctgcagtagaagaatagcttgatcctgggaggttgaggctgcagtgagccgagattgtgccactgcactcacttggtctcaagaaaataaataaataatcaaataggcacaaaataaaattcccccaaactaaaaacaacacatcagtaacagtaacaaacacaaagtttgaagactattttccagtaggagaatagggacagaggaaggtatgcttaacaggtcagggtgttcagttcttatctcttaagtctgtatgcaataaagggatatttaagaatttgggagacagtaatagtcaaaagaagaagtgctccatgtagtagtactgattgataagtacattaggaaataagacctctaaaaagaaatcatgatcctgctatccaggattcactgatgtcaattaggagctttcattcttgatgccttccaagctgataaccaaatgtccctgctctcagagaatcaccactgtgactccaatgaatggcagtgtgccaacaaacgttgcatcccagaatcctggcagtgtgacacgtttaacgactgtgaggataactcagatgaagacagttcccactgtgccagcaggacctgccggccgggccagtttcggtgtgctaatggccgctgcatcccgcaggcctggaagtgtgacgtggataatgattgtggagaccactcggatgagcccattgaagaatgcagtaagttcctgtgggaggaccaaggcatgaccagagcagggagacacgaggaaacttccatgaggactgagagaggacatggagctttctttttcagctgatgggatgctcccccttggcactccctgcaaactctggcactgcaaggcagagtatagctgtgtggcttgcaggtggaaccagactctgtttctgaagtggctaatacctccttttgatacatagaatgtctaaccaaccagaatatgataccaagaacttatatttcatatatctactgctttctcacttgagccacagagaaatgttatgaggtagggaaggtgggtgtgaaccaattccattttacagatgaggaaactgaggttcacattaagtggatggttacattactgtttagtgtcagacctaacacttcaacccaggttttttacttcaaaccctgtccttccccaaccccacccacaaagttttactgtaaaacaaatgagtggtgctgagatattgagaaaacttaggactatttttctgctcatggtaaaccgatcacatctaaaacagacacatattgccagaggtggtttgcttggtaacatggtcattgttactcctcagtaccacaacctcaatgtgacaatggaaaggtgctttcttgtaccttcagttctgactttgatgcctcctcccttttcagtgagctctgcccatctctgtgacaacttcacagaattcagctgcaaaacaaattaccgctgcatcccaaagtgggccgtgtgcaatggtgtagacgactgcagggacaacagtgatgagcaaggctgtggtaggaggggccacaggggagtggagggagggacaagaaagtgcacatgtcaagcgccatttattagatgagagatgagagtgtatttcccatgtcatcttttctttgtttacctctgtaaaaaaatggttgattcttctaataacatgttacatttttgtagcattttgcagggttaccaggggtatttaatctgtagcattttaagtcatgctgtcattgaggaagacgttattaagatgttagaaacttgtgtaatttcttccaaatgtagaatccttattcatacttgaccagtttaaattgtttctctaattttataaattggttgaaattggtggaaaggggttagagaaaagacttcgtatctatctctaaaaaggatatttccaaattaggatatttcttatttggggattttcatattctgaatgtctctctgattttccctgttatctattggacatctgtagtctctctggtaacatgggaaagccagataaattaatggaatttgtcaagattagtcatagtctaacttgaaaccaaagcatctggagtatgtgtgttgggtttagttggaagagaagtaaggaaggtactaaattcttttaagaacactgagtccaattgactgaagataatatgatcaaaatatttatttattatggcataattttagcatcccataccaggcctttgttgcaaattacaaaccagataccatttcattctttgcacggtttctaccaaagggaatggatcgagtttcaagtggtagaataggctcagggtagctaaaagagggaatgttgaccatgaatgttgctggcattcctctctttgggagcttcaagagtgtgctaatacaattctcagactgtctcacaaggaagccaatactactttgtgcatttctctgccaatggtttatgaagtctttgcaatgactgctttgcagaggagaggacatgccatcctgtgggggatttccgctgtaaaaatcaccactgcatccctcttcgttggcagtgtgatgggcaaaatgactgtggagataactcagatgaggaaaactgtggtgagtgttcacagtcctatggtccttatgtgccaccagagctgtgatgtttgctttttgtccataattcaactgtctatgtcattgatcctcaatgggtaggatgatatcaagctgtctgatctctttctttccactggtcagtacatttctactttctcttccactaaagacataagcatctccttctgagatgtttcacatcaagcttttggaggaaggtatttactgaagtatatcttttgtgtgttgaatttatttacatccaacttttttttccaaaagaagttgaggtgacttatgataaaggaaaaatgtaataagataaatagaatagaaatagaaaaccaggaccagagaagtagagggaggaagggtgctaacccagagacactgcttcttaagctctttccccaaaatggccttcataggagaggagagagaacttgtgtttgcattattacccttcctagaatagttgactattttaggagggctaatagttaaataacaggacaggttttagtttctctctcccagttgaaggtattgactacaaggcattggatagggaggttgaggaaaggaagccaagaggctgagatcatatcaaattagatggtcagaacacactcaatgtgtgttctgaaaacaagcttaatgaagccctgcccagagtgtatatcactgacccatgatatgcgtcaatttctaattgactaatgagacacattctaactttgtttaccttttggaagaaagaagtgatcatcacttgcaataggcaatgagagatttaggaagctgactacacctgcaaatatcagttagctaaaaacttatacaaaagggtaatccaattggcattttgtcttttattaataaaagtcaatgttgaatcctataagaggttatctagagttttacgaaatagaaaaaattaagataaaatcaagctgggcatggtggaacacacctgcagtcccagctacgcaggagcctgagcagggaggattactttagaccaggagttcaaagtcagcctgggcaatgttgaaagatcctgtttcaaaaaaaaaaaaaaaaaaacagagagagagagagagagcaagagagaaagagagatcagatcacctttggacaaacttcttaataaaggccattctttacagactcaaaattaaggtgaaaggtctagttttggagggtgaatgatttcccaagcacacctctggggcttgggacacaggagggtgctgggcacccagggcactatggtcagctcacaagatgtctcctgtatgtgattcctggtgcacactcatggccaggtgcctttcctttccagctccccgggagtgcacagagagcgagtttcgatgtgtcaatcagcagtgcattccctcgcgttggatctgtgaccattacaacgactgtggggacaactcagatgaacgggactgtggtaactgtcatttgagaagcttaccatagaattttgtactgtgacagtgtaggggcttcaaattagtgtttataaggcttttagaggaaaattatttttgtatatgtgtaatatgtaaaccttagcataacacagtatcttctgctctgtattttctatgcattattcttaacttacagcagtctagattagtcataattgaggaaaatagcaaggaattttaaacatttaattttaatatcaacacttcttaggagcagattttaatctgcgttagccttgtaaacaaagacgttgatcttgctactattccaccgaaagtcaccctaaggaatatacatgtgctactatgactctcttgtgtagagatcagatcattgacagagtaatcctaaacccaaagtaatttttatagttctttactgatttggtgttgggtctcaggaaaattagaaaacattgaaaattggggaattccgatttctgaggaaaagcttaagagctggagattatttaatattagggagctaggtacttccatctctgtatgttgagtggggaaagtgtgagttttgagaatgtattaatttgctaaccacaagttgtgggtttgctgtgagccagtcacagggtgtagataggaatgtgatggagtaaccactatactccaggtacctaatatctgtctgaaaatgacaaggccttctcggaatgacaatcttttctcttcagagatgaggacctgccatcctgaatattttcagtgtacaagtggacattgtgtacacagtgaactgaaatgtgatggatccgctgactgtttggatgcgtctgatgaagctgattgtcgtaagtccctagacacatatgtagtactgcttacctgagagcatggatatgatagtttagacatcagtccgctgccgcttcttagattaaaaggccataagtattgtctgttcagcatgcactgataatgatcagttcacctgagttctaagtcatcataatcatatatttcacaatggccgttcaagtgtacttccttgctattttaaatggagaatatattaagtaatctgtgctaacaaagtatttatatattatcagctactatacaaatcattaattagataaaaaacatttcaggtaaaaaaatattcaagcaacgaatacattagtataaagaacttgggttgggtattcgaacatattgaatttatagcattaaagtttttctcagtcacacaatggggtataaaaatgattaaaacttgaagggggccagcccctccacacctgtaggtatttctcctcaggtgggatgagagactgagaagactgagagagatcaaaatggagtttcttgtatcttccttttctgcatagacacagtaactgtctgatctttcttttccctacaaaaactggaaagccaacatgattactcagatttgagtctttatggatcacttgaataaatgcaaaatgtttatacatcattattgctgatccatcaacagtaaccatcatccatgatagccatccatgatggttattgttgatgatgtggttgccaaagagactttataaatgtatgtgggtaaaaccagtcttgacatttgcctgtagagattaagtccagtgctgtccatgccatggatgattcatgccattggaaactgggctctgacagctgcccttaagacatagtccattcaactttcagacaggtcaaggccactatacatcttgatgaataaagaagagcaggctgtaatggcaagagccaaaggagaaatagcaggaagcttccccaaagtagtcaatttgtataataatttgaatatgttttttcccccatggcagccacacgctttcctgatggtgcatactgccaggctactatgttcgaatgcaaaaaccatgtttgtatcccgccatattggaaatgtgatggcgatgatgactgtggcgatggttcagatgaagaacttcacctgtgctgtaagagggagagaaacggagtgaatgggagtggtgttgtctgtcaaatctcaatgtttcttacgtgtagcatgtgagcctggagagcagttgtacaattgtttaggaatggacacaggatcagcgttggtgttatttcactgggtcttccagcttcagttctctctgtaacctgagaaagttgggaaaacctccatgtttttaaacatattatggccttagaaaacaatgtctctaagggaaatgttgcttgaaaacctagtatgcataaataaaggcaggtctgttgtggttgaagtctgaggaagggtagggaggaggctgtacctctcctgctgtatcctactttgggtgcccctggaagtaccctctccaaacccctagagcttcctggagcacctttagaaaatgctaagactttcttaatctctacagtcacttccttttaacatggtaattcaaggccatctaattccctcttgctgaatgatgcatatatatatatatattttaaaccctgcttgtttgtgagtctcaattcaggtacatgtcagtagcagaggaggaggggtatttcaaaatcacatgccctggcctcaccctaggcttagacctgatggagcagaatctccaagaatgaagcctgcacatacatatttttaaaaagcttcttagccttttagtttagtcccctggttgagaactactgattttaatgaagtgaacgtaaatagagtttgttgcagtcattttgctacatgctttgagtcattggaggaactctagggtaatagttctcaaaagtgtcttccctggactaggaatgtcagtgccacttgggaatatgttagaaatgcaaattcatgggatgcaccctatccaaatagaaattaaaaatcaagaccaaaagaagtagaggaaggaaaggcattaactcaaagaccctgctttttgaactctttccccaaagtggccttaattttgtgggaaaattaagggcccagcaatctatacatttacaggcccctcaaatgattctgatgcaaactaaagtgtcaggattttgtgtaagtaaaagcccttaacctaggagacaagacctggagaagcactcctgttggaagttcacgttgcatcttccatcccctttcccagcttcatcactactcatttttagcccagagatttgacttgtgaagatgatatatcttagtattttgtttcttctcagaaaactttaattagtgttcattatatttcacagttgcatcccaacatttttctttacttgttaggaactagccttgttttgctttgaacttcatgaatcttgagacatatcttagacatgtttaactttcaaagaagtccttaggaaatctcttctctccataaggtaaaatgcccatagctagtaaaaataaactttggagagtcagagacacagctacattaaaaggtttccaacactgttttataatattgaacttgcctttcacagcaaataattattgcaatagttctattaacaatacttccaagaatcagcccttagatctgaccctttcccctcaaccaatcttattataagtctctcctcttgatccctgtgtgtgataccaaggcagaaggaaaatcagacagcccaaatcctccatgtgaaagacaggccacatgtgaagaccacatgtatgttgagttcactgaatttgtggtacatgcatactgaaccatgttccctgtaccaaacaagtaggggacctggggactacccttgagttcctcacatctgtacaggcagcagctagaggtctcactctggacagcaagtgtgtcagggtttgattgtgagatatcgattttaaatgtaagaggtgagggaattcaggaaggaaaatccaacacaatttaaagcttcaataaaagactcaggcgctagagactctatgacaactgccaccaggaggatcaaacaaatggcttcctggctgttaggataagagcccgtgtactgccagtctgtccagcctcacagccaccattgtgctccacgctccatgctccagccaccgaggcctttattcaggtccagagacctgccatcctcctccctgactcagaatctatgggaagtttcttccaagtcttcctctccctaacttatgtcagatcaccccagtagatgtttcatagttgtaattgaatggttaatttcaaaagtctgtttctctactagaatgaaagttccatgaggacaaggactgggtctttcttgtttcccatcatatctactgcctagcacagtgccttggtgtgtactatacatgtaaggtgtatctgctgattgattaatcaaatgagtaaatgagtgcatgaatgaagcaagcctggtgctgacactggagtattttagatattgacacttagattctactgttaacttgtaatttcatttttctatctttcctttcagtggatgttccctgtaattcaccaaaccgtttccggtgtgacaacaatcgctgcatttatagtcatgaggtgtgcaatggtgtggatgactgtggagatggaactgatgagacagaggagcactgtaagcaaaagtcaaaagggagaaggaaaaaggaaggaccccaagtggtctgcagtttggaaaatgtgcctctgggatttcagtttgttctatagagttgtgcccatgactgcagatctctgctgacataattgtttacaagaccatgcaaacacatgcattgcttacatgtaaccctgcctgtttcttcctgtctcatttgagcatgatgctggcaaatccattaatttttcagtctttgtttaaacatttaataagccttcccctcctcttttctcataagaaactgagaacaaacactaaatactgattgagccacacctcgcaaattaatagtttattttttcaaatataagatttgatcattcttcagccttcaggagtcgctaattgctaatctaggcaggtgcccagctgcagagatcatgtgaagcaaggcagtactggtgttaacagagcttacctaatatccttgttgaaaatgaaagttcatttcccagaagagaaaagtgatagattagtttaagatagaagttccaaactggctgcatttaacaattgaggcattgaaatatctgtactttttctgcactttcaaaatgttttaaaatctatccattgaaggggaaatttgaccaattttctgggcaatttaatttgcctagaaaaaagtcagtgaggaaaatcatttccccaactccaattattttttccccaaaaagacattatctgggaaaattaagataaatgcctgatttctccactttctatttcttgtattgatgtggtcttagaatgctttgccacagaatgcttacttccaacccccatcccagaggagactgtcagtcagggaggactttgacactaccacaaccttcaagttcgtattcctgttattattattactggcagagataacattaatacattatagcattaatatgtttatttgaggcatagcgcaaaagcatgaaagcccagaaataaaatattttttaaaaatttgagcagatttcccccttccccaaaatctctttccatttcccctactaaaagtgccatttttaaaaaaatggagcaagacatttgtagcacatggtcaaatcccagagtggaaaaaagaatccataaacttctattcttttcaaggaacagggttttagtctgggaaaccactaccggtcaccacaggaagcaacctgcaacatttcaatggcttaaaatggcaaaggttcatttcttgctcatgtaaagtttaatgacagtcaagcaaccctcctccatcccataattataccatcagggacacattcaaggttgccaaggcaggagaagatcaacatggtggaggcacacagcctcttaacttcctgagcctggaaatgacagatatcctcttgctcatagtccattggtcagaaccggtcacatggccctgctctaactgtaagggagactggaaaatgcaagaatatgcattctcatacaatttacccttgtgtcactaaatactcctttattattttcttctcacacacagaacactcttaaccccttcccaagggacatagctcatagtccattcagaaactgaaatccaggacctctgggtaatgggcagtagccactcaatcagttccagatgtggttcctcttggttgggagacccataaactaataaacaatcggtgccgtctgtgcctgataggtagtggcggaacaggggcaacacaatagaaataaacactcccattggaaaggaagaattagagactcatggccatcaccaatgtatagcaattctgaagtcccactgggctgggatgacacatgttggcacaggacagtcctgattcatgtcggctgccccagtggaattatgaatagcaccaccttcactttcaaaagcacactggcttggaaaggagagtaaattacacagccactctgggcagacattgtaaaggtcccttctttggggagtggagggtatttattgattcgctcatgcctctgctctgggaggagctcctgtgttaaaatgtctctcattgtttctgactctaccctttgagagttttttcttgtctattttcctcttcaaatgaagagggaaagggaaatatgctaccattagggccagcacagcagctttctcaccccacttcttgcttatagaaggtcaggagcccaggagttgttttttttttttttttttttttccaagtctcaaacagtcatagtattttggtttatttggttatatctttctcccagaaacataccaggcatttgatctgtttgcttctagcctgttctaaaagttagtaacctgacctagtgctctttttgagacatagttctcaaatctgcttttttctttgctttctttccttcatagagttctgtctgaacttattgtcacttacatccaatccatgtagaaaaatagatgggcagtcattttatccaatgaggaggttttattgggccttcgtgtctcaaagccttttaaacttcagacttttactgtttgggatgtagatacaggtggcttttctcacacagcaaatttctgggctttattttatttctgcttgtaagttaaccagttcttcccttagcttctctctttcttatactatcttgccaaactcaggaatggcaatcaatgcacattgctaacattctatcttctaacctcgctccatgattgacaggttcagtaagcgtgtgatctgccttccagtttttccgaggtgatagctttatcaaatgctttgactttgcataacatgatctcaacctttcctgcctccactatcagtgtccttgttgcttgcctcctgactgttaatccaatgccaaatattttatgtttttattatggcagtactctacttccctcatcactctatgttattcggagtaattaatactagctgttgcaaccagcaaatcctgaagtctcaggggtgtaacataatgaagccttgttgagcactcatataaaggccaacgctggtttcacagccctcctgcatcttgcagctgtgctgcctggaacacatggcttccaaggttgctgcagcagcacaggcgacacagaggaggcacgtgtgcttttcattgcttcagcccagtagtgacacatggcacctccaactgacagtacgttggctagaactggtcacatggtcctaatgcagctgcaagggagactgggaaatgtagggaagcacttgtttatttggtaagcacaaactgtctctgtcatagaaggaagtatcttgcttcataaaagaaaaagttttaattttaacttgttcttacattacaggtagaaaaccaaccccgaaaccttgtacagaatatgaatataagtgtggcaatgggcattgcattccacatgacaatgtgtgtgatgatgccgatgactgtggtgactggtccgatgaactgggttgcagtaagtaaacacttgtttttatagttcattgtagtaactcaggtttacctaattaaaacatgcaataacataatgtagacactgaccacattttctctttaatgtactttttgcttgaattccagtcaagcccatagctagctgtgattgagtgcttatcctagaccagacattgtgtcaaacattctacgtgcctggtagcaatcttatgagttaggtgttattatctctttcttatgtacaaatgagcaacgaacttagaggttaaatgaattggccaggtcttactgtcattaagaggttgactcaggatttgaactctggtctgtttcactgcagagcacatcctcgtcccagtccactgggtgcctcttagcactttaaggctacatattttgtttattagtctgcacattacggtgggaggatgggggagggatagcattaggagaaatacctaatgtaaatgacgagttaacgggtgcagcaagccaacatggcacatgcatacatatgtaacaaacctgcacattgtgcacatgtaccctagaacttaaagtatatacatgaaaaaaatcttaagccgaatgcagtatccttggtacttgaaaatccttctgagggtgtttgatcaagaagggaacgccacaggggacctgggaagggacattgatttttatttttaaagttgagggagtggctggatgcagtggctcatgcctgtaatcccaacactttgggaggccgaggcagacaaatcacttgagcccaggagttcaggaacagcctgggcagcatggcgaaactccgtcttaacaaaatacacaaaaatttgctgggtgtagtggtgtgcacctctagttccagatactcgagaggatgaggtggaaagatggcttgagtgcaggtaggggctgcagtgagctgtgattgtgccactgtactccagcctgggcaataaagcaagaccttgtctcaaaacaaacaaacaaacaaacaaacaaacaaaaaagaaagtagagggagcactttgtgtaggaaaaggatgatgaacataaccaaggaacaattctagctcaatattttgatggaaatgttaaaatgacatgttactaagtcacacctttgtagtccatttatgactcataaagtgctttcacatacattatttaatgtgttactcaagttagccccattgagttgcttttattgtctatgtaataaagctcagagagcttaagtaacttcctcgtggtcacacagaatgtcagaggcagaattggagcagtcacgtaagtccaggttaggagggctggcctctggatccctgccactagctgtgccactttgggcacatactgacctctccagtctttggtttcctcacaggaaaaaggaggcccttctccaaactctaggagcctgtgacttaatcatcctagtgagctccatgtgctttcaacttcttgggctctaattgatttttttctgaggcatccaaaggattttctatcaatttttctcctgcgtgagttacaaagaggtgtgaataaccagccatattgagttggcttgccatttatttcacatacgttttctgtgggacttggagttattgacagaatgaagtgacttgataaaatattttaaaaacctgaacatgatagaatttgcaaaactgaatggcaggtgtgggttcttactcccagagactgataggtggcttaaaatagactacagtactttcttttcaaatggcatttaattagtagcaggtttttttttttttttaaggaaataagtagcacaagcaattcaggtatggaagcagcttctcttttcaaatattaagtgaatatgtgatatggaattcagtcttatttctctgggctaataatttgaggcatagaaatcttttttaatatactagttcttgggtgctgttaatttatttgcctttgtcttttttctccttcctcctgttctccttcttcttcttccttctcctcctactccttcgtcttcttcttctccaaaagcatcattgaagtgtttgagacacattgttcgattttttaaaattgaaggtgtacaacatgacgttttgatatacttatatatagtgatgtgttataatcaagcaaattaacatatccattatctcacatagttatctttaaaaaaattatttttgtggtaagagcacctaaagtctactgtcttggcaaatttttgggaatgaaaatacatcagcattttttctagcaccattcaggtataaaggaaagaagttaacctcaggttgcaaatattatttatgtgatcataaagatagattgacttgctgtttctctggtagttcttattccttcttcataaaatggaaagtagggtatttcttttataaatagagtgccatatgtttgggtttggggaaatcagttatgtgggttaaaatggtgatcattttcaaatgaaaacaatgataagaaagccctcacattttaggaagaatcctacagtgtcgtgtggtttctgctcttgttaaggactcttgcttcacaaaagcgtgactcatttagtggatcacttggtccagaaattcttgactcctgggacccctaatccctttatagatttcagagctggggggaaattacaaagtctagtgatgcatgtgagacccacggaggttatgtgattggctcaatgatatccaagttaataaacctaggtcagattcatttagcaatgtagaggggatatcactgctaacctcacagaaattcaaaagacagtaaggaaatactatgacaaattttatggcaataaattaaacaacttatgtgaagtgaacaaattcttagaaagacacaaaactctgaaaatggatcatgaaaaaaatagaaaatctaaatagatgttttaacaatgtacagttgttaagagctcctataataaaggctgggatctttattataagactttcatgcatacagctttgaagtctgcactccaagggcagcattccattgaatttcattgtactttattttggttatttttctttttgaaacccagtgtttttaatgtactcagacgacatatactgatatgatcatttaccctaaaggactctgaaagtgattaagttcacctcattgcatactatggaaaacagatagatataaatctattttgatttgaaagaattaaaccaggagataccacagtctctttggctaaaatactcagaagcctatgaccaggagactttatttgagagggagatgaagcttaaatccttaatggagataaccactgcctctctttcccccattatcactcagtatctatgttcatctttgccagtttttctgtaagacctaggtttggggatagatggaggataaaagaagcaaactgataagaatgacaaggacgaaagccagatggcttggatagatactggtagagacaagatcttggggcaatgatgaacaatgaagtgttagggtaaagtgtgagctgttaaaagtctgtcttggaacatctggatcagaataacagggatcatttatatgggctctacaaaaataaactgagttttgttttgtttttttactgtgaaagttcaataacaatcaaaagtaaaaatcatttgaatcccatcactaaaagagaactaacctttaaagtttggtgtattttgctgtctttttttttttgcatatgtatatgtaagaaatatttcttagtattttgaaaaattaagaaatattctatactaaatggagtttttcagtctttttttcaatttattataggtatttcccatgtcaaagtatcatttgaaactataaattttaataatcacatagcaattcatcatgtagataatcataacttattgcttctaagatgtatttttttatattttaacatctttgaaaccaagatatgtatcttacaattaataacatgtcagtgtaagttccagacatattcaattttagtgttacataaagtaatggtgcatcagtaatgtcttagtttttttatactataacataatttattccctatcaccgaacatacattcaagttgttttcaaatgttcttattataaatattgttataatccttaaacgtaaattatactgcatattccttctcaagggaaaattcattaacatggaataactgggaaaaagagtatgaatatttttaaagtccttggtgcatacatacatagtacaaaatttctttccttgtgtattaatttatggctctaagagcagttgtatgatttagaactctatgtattttactgcaccctggtcaacacttgatatacatatatatatttgtgtgtgtgtttgtgtgtgtatatatataaccaattggtcaatgttagggaaattatagtcttcttaaaattttataatttcctcctatttgtaactttgttctaacctatctgtatccatgtcttttatttatttatttatttatttatttatttatttatttatttatatctatctgttatctatcgatctatcatctatctctctatctatctattgatctatctatttgcaataggattaaagatagtagagcaggtggtaatagctgtagagtgtcaggcttcatagttgtgcagtccagaattggatgctctgaggataagcctaggagtgctgcatataatgtgaaaattgcctcaaagttttagcattatatgcatttatctaaacggtattcagaccacgatcagaaataggaatcctgactcccccagtgccctctgtcctctcaaagggttatggaaaggggtcatctcaagatgtcctatagttggttacgagtaggtgctccttttgatacaccacttgactgttatttgtggctgatctggtttgtaatgctgggattttgtttttcagataaaggaaaagaaagaacatgtgctgaaaatatatgcgagcaaaattgtacccaattaaatgaaggaggatttatctgctcctgtacagctgggttcgaaaccaatgtttttgacagaacctcctgtctaggtagagtatattttttccaattcctgtttaggtgaactttacatttaaggttctccacccactcccctttattaaataaatcactatttaattcccttaatggtaccatactcatggtttcatggttctaggtcattaaactactcaagaattgctttcccccacctgcatgcatgctatctgaccagtgcctacctaagtgcttgtcagatactgtgtgctcatagagtctgtggaattgatttgaatgatgaaggccttggtgatgatggctgcttattgcaccagtgtgtgaaatcaaagttaatttaaaaaacaaactaggcttactttcttcattgtaagtcaaacaaccaacacgtatttattatacacctacttacgccagacatagatgagttgtaaggtatggagtcagaaggtagcttatcaagatggtgagtgatgggcatgattttaggtgccttttagtatttgaatttactgtttctaattcatgatatgtcatagtcagaagatagtaagagttccttttggacttgaagcttaagaactcaattgaaaaactaaatcaatgactcctgttcctgaagctggttagcagaagtgaagagacaccgaacaatacaacacaacatatgccttctgaaagggaaaatgtgctctgctattgcagagtcatagagtttaaatcctgtctccattgcttatcagctttgggactgtgggcttaatcgtccatacctcttaaagtcttttggcaagattaaacgaggaaaatatttgaaaagcatgtgaaacagtatctgaaacttagtgtttcacaaatgtttgtatcattgcttattttcttctgtacccttctcggtcctcattgctggtgaatatgggtttaaacagaagcaagatctctaaggaatggatgggaacagatgttgcgtatttggttttattttgcctacagatatcaatgaatgtgaacaatttgggacttgtccccagcactgcagaaataccaaaggaagttatgagtgtgtctgcgctgatggcttcacgtctatgagtgaccgccctggaaaacgatgtgcagctgagggtatgatgggttcatgttgggattaattgacttttggggaaataaatactgctaagtacactctacgaggacagaagcttcagcttctcatagtttttcttttctttcttttttttaaaactcgccagctgcttctcttccaacagctctttagtcgctccttctctctcctcccctgccagcttaaaacaatagctacatcccccaagaaatatgtagcaattaaaacaagagccaggtgttacttattataatggatttagcctcttgtctaccttgataaaaacttcaaaaagtggacaagatgtcatctttcttaaggctcaaacaacaacaaaaggttgcctatgggatggtcatcaataaaaggaaggtaacaaggccctctagctcccactccactgagaataagatttgaggcccagtagtccaagagggctcgtgaattggggcaaatcaaggacatatcccttttgtattgttcatggactactgatcacaggcagaaaggagtctggcacagtcataacttcaatcatgagttttacgttttaggttgatgccagtgtctgacaatcgggcctgataaaaacagagaaagaatgtaagtcagatgtattatactccaaattccagaggcctgatctaaatcatcatatcctagttaagaggcatgggtctttattttgaatttgaagtttgtactagagtttaaggaacttgataagaaaatagcactttattttgtaaattaagagtaaatggccaaaatggctgttcaatttcttcatacaaattgagcttttaaagcatacatttgactagcatacttacatattttaccctcaaaacactgttgacagtgaatgaaaactagagtgaaagcatttgaacagttggtctggtaattaagcagcaattttttaaatgtttaaatcctttaactaaggacatgactgaaacaaattggaatattcatataaaacataatgtcaagatagaggaaatatataaaatgaacttttaaaagttacttaaattggattcagttgacattatgcaagtaaattaaacttaacaaattctagacagtgcatcttgggatgagtcaccattaagtagctgctttaggttaaaaaaattaaatcaaggacaagctaggtttattttgtcattagctaggagctaaattgggtcatagagctgattacctgctaaaaagaatcataaaatctgtcaggaaacagtaaggaatgagacttttctggtaaacttttagtaagactataaaagtatttcttctgtgagatagaatgtctgcagtcttgtctgttttgatgtcagttaataaaaacaattcagtgaaaatgaggactctatgtagggttctcagtctagctttgttccatactaccactgagtacaaagaataaagaactgataatgtccctaagagacatattagctttccacttgaagtggagaatgtcaagtcacggattttgtaacccagttggatagtcagctttattgattaacagagatagtcagattcctataaaaactcatgttctttaaaaaggggacgggtacatactgtgcattttatatcctactttatataggaaagtataattcaaacagataaagtagccctttgtttgtttacaggtagctctcctttgttgctactgcctgacaatgtccgaattcgaaaatataatctctcatctgagaggttctcagagtatcttcaagatgaggaatatatccaagctgttgattatgattgggatcccgaggacataggcctcagtgagtataaactttggcatctttcattgatattaagtgactttatagaattttaaggtgttgacttttaaagaatttattgtttaatgagtgaattttgttgcattagtggaggaggaaactcttccaatccagcatgctcctgatgccttagtgtggccttgaatcccagccaagctttcctgatttctttctaaaactcctccgatcactggggtttatcctttctggaccatctcacatcttcttgtattttgaaatttccttgtccttgatactgcagatcttgttccttcctaccattgtacaccttgaaaatttctactcagacctcaaagacccagtttaatatcaccacctctgtgacaacttctatcactccttctggcagagttctatgattgctcaccatgaatctatgtcattttatggcacatgttactctaagttatatagctagttgaccacataatatctttctatcctctagacatctgctttttggggacaaagcctgaatctaatttatctctaaatgcctagcagctgacccaacatctagtacactctatgtggtagttgatcaaaaaatttagttgaatgaaggaaaaagatgaataatgcttattgttgaatctctcatggctctatctggtgttgggggagatgacagtagggtaggagtcagaaaacttgtcttctgtgcctgtaaacttatcttttatgccagtctcccttatctactagctttgtgatcctaaataattgtaacgattctctgaatctcaattttttttctacaaaatcaaagtagtaatcttgttctgtctgcttacctctgagagttgttttgaagattgaatgagatagtagatatgaaaggctttgaaaactatcaataactatgccaatgtaggatttattattggtgtattttcacacatattcatgccatacaatacacttttcaagaatggtgcatacctaggaaagcagcaggtgtccagtgcatccctctacagtcacagtcttcctatgcttttaacatgcctgctgtccaccatccttctgtctgtatataaaataggacttctcgttgacatggcttctttattgcctctgatcttaagtatgctttcaaattctcaacagcctgccctggtttatctctatacattctgttttggaaactagaacttgatcctaataagagtaaataagcactttgttgaaatacgtttaaatgaatcacttttaaatagagatgactaaatctcactaagttctcagttgaagcatttgtagctcatagctcaagtttgataggttttaaagtttgattatactgatgtcattgaattattcatattataacaacagtgaggagggaggtagagatgtcaataaacaaacagtacttcacctgattagacccctgttcttcctttacttgatgctcttgacatgaaactgacctgtgtgtcttcctctgtaggtgttgtgtattacactgtgcgaggggagggctctaggtttggtgctatcaaacgtgcctacatccccaactttgaatccggccgcaataatcttgtgcaggaagttgacctgaaactgaaatacgtaatgcagccagatggaatagcagtggactgggttggaaggtaaatttgccatacattccccccttacctgttctgttttcctggttagagttctctactgcactccatgggccatgagtgagtctgggcctggatatgagtacactcagccatgggtgcagctgggcagtggttgggcttgctgaagccccagcaactacctccacttaccccagcatgtcatggagacattatcatatcctgtattctttgtgggccatgaaaaaaattgggaaagcacccaggtcaatatctggatatagatattatatctaggatataatagtgaatattatatttactataagtgaatagcattcttgccaacagagttctggattccaaaattaactttcagtatggcagcactgctcattttgtgaagaaatgggacagcctcacaattctcccagcaaagcagttgagatgaaactttttttctatggtagttatcttggggacaaacaatccacatcttgtgtttttagcaggcttctagttaaaacagattggaaatttgactaaagaagtctttggaattgagttgatagaggtgtcagtctcttctgttcttctagaccttctagtggcccagggaccagagccacacattttggatggtttttaagtagaacttaagtagggttatcatcaggtaggtgtgtgaggtacaaatggatgtggagaagttagtaagctcattcttcaaggaagaggtttgcactgacttacattggtgggaaaatgattccttgaaaatgaactaataatgcaaacatgtttgagggggaaggttcaggagtcactactctcctggagaatggatagttattttcagtgtaaattctttttcaccttttaaaaaatgtggctggtgttcctggaagagcatctttgaagaagctaattgggtcccgctgtgcctgcaggctaacaggagactcattttagcattttcagtcaagaaacagggccttagagtactgttgctagagtcaggaactcaaaactccagacattaacactgtcttctgaaaaccaaccagggaatggcagatctgtcttcttgtttgaagttttacctctttctcagccttaatgaataagagaattaagaaagtggtggaactttttctgcttgtaagagactgagacctgcagcctcagaagtggaaataaggcaggacagtcttgccgagtttgttattttaaaaggttgtttccactcatctttgagctgacaccaggttcctattgattctaacggggctctttcctgaggaggaaacagactcatgggcagtcagagttaaggcaccagccccaccgtgccttatgacttctacctagaagcccatgtctcataataatgccagtcagaggccagtctgactgctgtgtctatggtagttatcttggggacgagcaatccacatcttgtgtatttagcaggcttgtagttaaaacagattggaaatttgactttcctgtttagtctttggaattgagttaattccattgtggatcctgcgtgattcaggtgctttggctgttgggcaggagtcccctcaattccttactcttccaagtgtaacctgccaaacatgtccccttggctgtagttcccccaagagagggggactatggtctgatgataggtatctgagcagctctctcaccagccaaacgaaatgctctcatcttcaaacctcttacccagtaatgattactctaggctttgcagttgtttaactttgtccctctgaattcaggcatatttactggtcagatgtcaagaataaacgcattgaggtggctaaacttgacggaaggtacagaaagtggctgatttccactgacctggaccaaccagctgccattgctgtgaatcccaaactagggtaagtacttggagaagtcttcaacatctagatatttctccctggattctcatcaaattccatgtttcttataatttttttttcctagtttaactgaaattgtccttcaggtttctgggagtagcgtctatgactgtttcaagaattataacatgcccttgagataatatagaaccaaccatttctgatggggaaattcctttagaacacatctgagaatctttctagttacatggattccttgccaaatcagagctctgaactctaaagttctttgtggatataactgttttaagtgaaggtttcaacagaattgtttttcctttcatttggatgttttaaagtaactcattcattgaaatccagctagggatttggtcatatttcatttaaaaattaaacgtttatatccaaaatatataaatatttaaaatgacacatgtataaatatatattatccatttgtagaaatattccaatttgcagtttatctataaatcatctcagtgtaaatgagaacaagttttgttatttttctctacatttcaagacatttatttgaataatcactaagctgaaatgacttggtatttacatattagcttagcctcagaatagtgacactttaaaaaagttttttgaatgaccccaaataattttcctacttgggcaggaccagtctagccctctgtagatatgccagtatttgtaggtagaaccctaagagctgttattactttaattctgttatatttcatatgttaaatcataccctcagaaactcagcaatgaaatatgaaaaatacttgactgatgagattaacctgtaatgaggacttgtcctcagcattagtcattgctgcttatatcttatctacacaatatattaggagcaaagagatgcagtgtgttctatggtgtgaatgatgtgactgtttccagtgtgccgtttaattttttcctctgtaactaatgtttaaattcatctgatattatgatcatactctgatatccctccactgtttttttcatagaaattcttttttttttttttaatttttttggagatggagtgttgctctgttgcccaggctggagtgcagtggcatgatctcggctcactgcaacctctgtctccaagattcaagtgattctcctgcctcagcctcctggcagctgggattataggcacccaccaccacactgggctaatttttgtattttcagtagagacagggtttcaccatgttgggcagcctggtcttgaactcctgacctcaggtgatccatctgcctcaccctcccagtgtgctgggattacaggtgtgagccaccacacccagccagaaattcttattttagtctttgtaattcctttctctctggaatggctcagtgtagtcctgtgagggataggaagtaagaaaggagtgagaaagggtttcactgcctaaggcctgcagacccgacctacaacctcctcatttcatgatccatttgaaaggctcatcatccataagttttataggcataagcatatatgatgtgttgaaccttcttacagcttctgcggtataagatctgccagtgggtccaaaggatgatgaagatgataactactgataataccagcaacagcaatgaaaagtgccaacatttattatattcttgctgtgtgccagctactctgctaagtgtcctacatatataaactcatttgaattgtacaaaggatctataaattagtcataggtttctatcccttatttacatagatgggtaaaataacaccatgctccttcagacagcaactgttgactataatataagacagaaagggagaattgtcatgaggacactgctgaaaaacactgtgatagttctcctagcttacaagcgttcagggaagctctatggagaaagtagcactgaactgaatgttgaaggttgggatccactggtagtataaccagtgacaaagtatgtgacatgtgaggtcagtgtgggtgagagtgagaagggccacttcccagagaaagtgggactgacatagaacctggatggatgtcttgggtactgataggcaaaggagccaggccggctgttcagaagctcagggaatagcataaacgaagtcatggaggaaacaaaaatcattctgtgtaccttttgtgtgttttttccattccattccctaccttttgtttttttagttttgagtatttcatactttttaatttaaattaaattgaattaattaatttacttatacagacagggtcttgctctgtcacccagactggagtgcagtggcatgatcatagctcactgcagccttgaactcctgggctcaagcagtccgctgcctcagccttctacttgcacaccaccatgcctggcttattatctttaagaaaacggcttatataattcacatatggtatgtatggtatgatacaacttacccatttaaagtgtacaattcactggcttttggtatatgcagagttgtgtatccatcatcataatcagttttaaagcattttcatcaccctacaaagaaaccctgttcctctgagccaccattttcctgccctcagtacctgctaatctgctctctgtctctatagatttgcctattctggacatttcctacaaatggaatcctacagtatgtggttctttgtgactagcttctttcacatgtgtgtcctttttaatgaaaaccaaacaaggtggtatttaccagttgttgagactttaaaggcccctggctgcattttttccagagcccagtttgtctaaaatccacacattcgtcagtagaatttaaaacttggcctatgcctgatgactggtttagactacaggctgcaaagcagtggctggtgggccaaatatggcccataggacatatttggctgggacaacacagagctttaagattttttttttttaacatagcgctgacatttaaaatttaagaaaagaaagaaaacctgtatttcttgctctggaaatcagaggaacggattacactgggtaggtctgccttcctgggcactgacaggagctcttacacagggtcttgctctccccattacttgatatttacaaccaggatctctcctcattcatcttacatacctgttcctctccaggtatttgaaatcatgcaatccctggtctaggtaattcaatgtcagatcatctttgcttacatagacccttgctctacaattaattattaattggatgcaaaagacatatttaaaaagagttgctgggtgtggtggctcactcctgtaatcccaacactttgggaggctgaagtgggggattgcttgagtccaggagttcaagaccagcctgggcagcgctggtcaaaccacgtctctactaaaaacacaaaaaactagccaggcatggtggcacatgcctgtagtcctagctactcaggaggctgagatgagagggtcgcttgagcccaggagtgtagtgagctatgattatgtcgctgcattccagcctgggcaacagagtagctccatgaagatagaaatctttgtatgttttgttctctgatagatcccaaacaccgaacagtgcctctcacacagtaggccttcaattatatttcttgaagagtgaacagctttcataatgcattttaaagggtctgcatatccatccgttggccaatttctattaaggaggtgcagttttctagaaggataaatcacacatgctcttgtgcccctatttttgctccccatcttctgtaaaatataaaactggtgtcactgagcacccaggtccctgagataaacagttggtttccctgtaggtaatgccctgtgctctgctgtagtggagaagtcctaccaggtgagatgctacagtgaagaaatcttctgttataggcttatgttctggactgactggggaaaggaacctaaaatcgagtctgcctggatgaatggagaggaccgcaacatcctggttttcgaggaccttggttggccaactggcctttctatcgattatttgaacaatgaccgaatctactggagtgacttcaaggaggacgttattgaaaccataaaatatgatgggactgataggagagtcattgcaaaggaaggttagaaattagttagaaagtaatatattaaattaataattaacatatttctaatgtctttgcctgttttctcaagaaggagccctgctcttaggaaatggcttatatagttttttagataccacccctccacccccaccaactcccacctgctgaattaaatgcagatgggttcattagcaataattaaatccttttcatcctttttacacaacttaaaaaaaaatgcttctcagcagaagatattgaaataactgagtttcctgttaggttgccccagtagaggtggtttcatgtgtaccaatgttaattcatgtctaaccgcttctggacacattcattttcactttactagattgcccagtatgcacaactgtaaatatctagaaggagatgaacattttttgttgctgttgttcagactctgcagaattgcaatgacccagcacatatcacatttttcctatttggtcagatagacgtcttatgttcaaaagaaaacataaaatcttgccatttaaattgttttccaaaaatgcagtaaaatcagtaacttgaaagtgagctagggccctgtgattggtgtcgggtggtatacatcaatgtggtttaatttctatcttcttgacctcctaatgcagcacactttcacagtcccatgtagctaaagtcagcctgaatattcccagagcttcaaggcattgtatgagggaataattcaagcagaatgacatcagatctagaagtggcggtagggtatagtgggtattttcttttcaataaccttctgttttgtttttcccctgtgggtaagcagcaatgaacccttacagcctggacatctttgaagaccagttatactggatatctaaggaaaagggagaagtatggaaacaaaataaatttgggcaaggaaagaaagagaaaacgctggtagtgaacccttggctcactcaagttcgaatctttcatcaactcagatacaataagtcaggtaatcaccaactttggtataagatgctcctcattacttggaaatcttatttcaaaataatggctatattgctggaagatggcagtagataacaacaagctaatctcttggtgcatgaaaggggtatatgtgtatgtacgtgtgctgggggagaggaacgttttaaccatttcaacaaaagaaagataaaattggaggtcaaatgaaattatgcaaaccatcagcaggtaagtaaaaatatattagccctcatcattgtttggagtgatggatatgtacttctaggccacagaatccagcagacatcagtcccctgctaagtgtgagttgggttaacaagtcacaaaatgggtttcataggcatcagaaatcttatccttcccattgcaaggctaggctagtcaggtcaaccagagatacgtaggtcttagtttaaaatggccagtcatgtgcattcctacccgctcccctctgtctcactttcctacttctgggccctgcttcctcaggttacctgtgcgctaattcatccttcagcagtgtttggagcaagatgaaaggcaaagggaagtgaggaaaggaaatagccttttactaagttcttatgtcaaattctctcttcagtgttaattcagccatctattacttcaattaccttataaagacctcccaaaccttataaggacattttattctcatctcaaataaagaaactgaggccgagacagatttagtaacttgtgtgcctaagtcacataacaaatgggtgagttttaatctcagaaatgaaataatttttaggttcaattctatccaacccaaaactcagcatcttgctgtattggcccagtgttcagtatgccaaagtcccaggttgaatgctatggatatgtggcctttgacaagttactcccttcctgtccccatatgtgagtcatgggtggagtctggggttgtcttgagtctgctgatattttgagaccttgatcagccttgaaaaattgcaactcaaagctgagactcccatgagatgacaggggtggcaaatgccttttctagggcatggcttccttgttttggaagtagtatcaccaaaacactccagaatactccagaccctaccaatagaatagcttttgtgtcctaagtgcccttgcggctctcacacttggcaattttaaaggtaggagaggaaggcacagtacacctggaaaggccatctcccctccctactgcctctggaccctgaggagaaggcagaggaaagtctggaggctgcccctgaaggaaaagcatctcgggcagctgatgctcagggaaggcggctcctttggaaagcgctggtggagtggggatgggggtgggggtggggatggggagtacagccccagcccaacctgtttgaaccaagagttctgaaatttgagcatgcctcagaattatctggagagcttgttaaatatagattcgtgggccccatctgttgcacttctgatgcaatatgcctgaggtggcctaagaatttgcatttctagttctcctgtgacgttgatgctgctggttcagtgaccacattttgagaaccgctgctccagtcccttgctactcagagtgtgggccatgggccaggagtcttgggatccgatgggagctggctagaaatgcagtctctcaggcccaccccagaccttctgaatcagaatctgcattttagcaagattccccaggtgattggtagcacattcaagtttgaaaagctccactctggagggccgaagaaatggtaatgagacagatattgatggaggcttttggaagatgtgttactaatttatagctatgctttgtctgtggttacatcttgaatgacggacaatcaggatcacagaatgttagtctgagaaggaatgtaaagattatccactccagtacaacccttggataaatcataatatatgctaaggtagaattaataagattctagacttacctagggagcttttaatggtaatacttgaactctaccccagaccaattcaaatctgaatctctgtgaatgggcatcaataggtttttttgtttgtttgttttttgtttttgagacggaatcttgctctgtcgccctggctggagtgcagtggtgcaatctcggctcactgcaagctccgcctcccgggttcacaccattctcctgcctcagcctcccgagtacctgggactacaggtgcccaccaccacgcccagctaattttttttttgtatttttagtagagacgaggtttcactgtgttagccaggatggtctcgatctcctgacctcgtgatccgcccaaagcggcctcccaaagtgctgggattacaggtgtgagccactgcgcctggcctggcatcaatagttttgaatagctcccaggtgattatgaggaatcgttgctctaaattcccttttcttgcaattaaggtaactgaaacccagaagaaatgtctccttggagggttagggtggaaatcacatccagtatactttggatagaccatatgttatgatctgtccagttttgggtagtgacaaatcttggtataatatgtggatctcactggtcttttgaaccatctcaagttgtttagcactgagtagattttgaggttaggcagtgaaccagatacccaccttccaaacctctcggggcagcagagaagataagtgatgccaatagaaaatgtgagtggtacagaaattggccggagggcccagagagggactgtcccactgcagtgtggtggcagagatgatagtgtaaatgagggtgagtggccagctgacacgtggactagaggtattgagaggatgcctaggctctgctgtcacctggcagagccacttctagttgctgggtattcaggttattcattctgtcaggacctaactgctattctcacctgctttccagtgcccaacctttgcaaacagatctgcagccacctctgccttctgagacctggaggatacagctgtgcctgtccccaaggctccagctttatagaggggagcaccactgagtgtgatgcaggtaggagcactgcccaagcagctatgggggcctgggagcactcctctgctgccttcaggagtcagaagaatccctgtatgctgggtcctttgcagcagagtggggatggctggaaggagggttaagggatgtgggaggtatgaacagagttgagtgggacttagggggcaaacagaactgtgttccagtgactgctgagaattatttgctaagatctgcagaaatatagatccagtgtccctaaatctattgctgtgttgttgtgtaaagacattttgaagaatgagtttttataagacctctaacctcaagctggattcccattgccccagaatccactcaaccttaactgtagctcctcagggtagagaaccatgttcagttttgacaactgaaaaagggctaccttttgaaaagtgctttatattgtcaggagatgaagaccagcatgaggaagctgtggtttaattctagtcccaaacgctgtgggtgatctattcttggcaagactttttttcaatgactcttttaaggagttaataagccagatgggggcgaataactagtgtccctaactagcatccggtgctggaaaagcctgtgaaaaagtcgtcctgcaattcactagcggcccattttatggctcacatccttggggccttcccccagttttagctgatggggaaaggaaaacgcttaaccaccttctaccaccagggggagcaggcagttagaccaggaaccaccctttgactcattccaaacaggctgaggagttggcaggtttagggaatgaatccagggagaaaaaactgcttcttgtcacccctcttcccctactcttgcactcatcccaacgctactggggaaatattggtaggaatccaatatttcaagccatatttggaacaaaatgacaatttcaggctttgagatttgttccatgctgtggatagattgttttgccacttactgcaatttcacatcgtgggagcagtgtggtcctggttgtcacctcatctactacttttctcatttaaactttttgccaagtggattttattaagattcttgttttaaagaactttaaccgaagtaagcacacgaatgatggcagtcattccatatagggcctcggtttggtataataattaagcaattagtccagtgagatttcttgagtgccagctatgtgccaggcactgttctaagtgctggaggtaacagaggtgaacgaaacagacaaaaccccctgtgtgtattgagtttacattctaagaggacaataaatagagaagtcaataaatatatagtagttcaggtggtactatggagaaaatgaaggcagaggaagagggatgaggatggggtgggtggggattgtcctttagatagtgttcatggaagacatgtctgttacagtgaacattgagtggagactcagattgaaggactgagccaggagggtatctagactctttaaataatatgcacatataacctatacttattaagcatcttcaacataaaagacactgaagcactaattccccatcaggcacatcctgggagtatgtacaggcctagctgggagcagggacttggagtaagggcagtttgggaggacttgaaaactcaggagctctctagctaactgcctatcaaatatctctatatctgtagctatgtgactgcctgtggactgatcaattactgatgctttggtgtctttagttgaagtttcaaggtgggcctacattaaactcttgattttaactgggttcacggaggagaattctgaaaacttcaaatgagaatgtgaacattttaagagattattttaccactaggttcttgtaactattaatatatgtgctccagagtctagtacctctccattgttttttgggaaaaattctataaactgccccctttctttccactaaatgtatgttactctccaagaccttaaggaaactcactggacttagggggaaggtaagctttgacagggagactaattggctggcctgcccctcctcccacccctaacccgggccggtttgcatggtgtgggcactctgctgagtacagctgactaacacctgcatggctttcccttcctgcagccatcgaactgcctatcaacctgccccccccatgcaggtgcatgcacggaggaaattgctattttgatgagactgacctccccaaatgcaagtaagtctgaatgttgaggtcccagctataggccttgcctcttctggggaaatttgagaccttaaagtagccaggaaaacaaatacaggaacctccccagttcactaattcttacactttaaccagcttgccttcccttgagggagtctacagagaactgaggcagtgcttctttaactagaatgtgcataagaatcccgtggagatctggttcaagtgcccattctcacgcacagagattctgcatttctaaccagctctgggtgaggccacagggtcttggaccacactttggggagcaaggagttagagaattggcagcagcattttcctactcgcctggtattgttgattacaacagggctgtgggagaagagctatctgcagggctgctttagtacaaggcactcgtgatgagcagaaagactgggatggattcggaaagaagatgactgtgttgagaaaactctaacatggagcaagataaatagatgtctttaaaaagcatttaatgaaagcatataaaagaaagaaacataaccatggtttccatttgtactctctaaggaagcattgcatagattagacaccaataggttttcgtggccagactcaccccatcagtgccacagctactccattaaaagtgcatttctaaaatcagagcactgttctttctgcttgtcttctcttggcagaataaacaaaagtcatgcaggatacattgtctgttcaacatgtaatttatgcagtcaaagctctctctacttcaggatgtgctcagaaaaatgcagtagaagcctaagaacataacagctagtgaatgatttgctttttcctttcaggtgtcctagcggctacaccggaaaatattgtgaaatggcgttttcaaaaggcatctctccaggaacaagtaagttttaagaatgtgagcaacttggaaattactcatggcccctacattgaatgctgtcacagcttttctacttaacccagtctttgaaggagtggttctagcccccagtttctgccaggattgcgggctcctgtgtgttgatgtgctctctgctgtcttcttctatagccgcagtagctgtgctgttgacaatcctcttgatcgtcgtaattggagctctggcaattgcaggattcttccactatagaagaaccggctcccttttgcctgctctgcccaagctgccaaggtcagtttcattatggggaacgttgatgtttgaagcctaagtgaaggacttagttttctttctaagttaaaaaagcacaatacgcagttcaccgattccacagaaacaaaaagtagtgaggatgtaaagcagtcacttcaaatcccaacttcctagtcaagtgcttctctaaagcctgagtgacaagctgtgttttgtagtccaaatggttgtgcctactggtaggtgttcaggtcagagaggagtgaaaaggcagctgtgtgatggcccaggctttatccttctatgtgctggactctttttcttttagatctcatggttcaggaatgtgctttaacgtttccaggtagctaagggaacttactaccatatttgacagtgtaaatttagaatgggaattgagcattacatttgaggaagacttggcaatgtggaggagaggatactatcgtgaaaggttgtatttgttgtttttgttgttgttgttgttttaaataacaagacactgttttggttacttctttccagcttaagcagtctcgtcaagccctctgaaaatgggaatggggtgaccttcagatcaggggcagatcttaacatggatattggagtgtctggttttggacctgagactgctattgacaggtcaatggcaatggtgagtatggtttcaaaatgattatttgaaggttgtcatttatagaataaatactttttataaagaacaaaattcacctagagaagactgaaatacggtattaggcctctcagaataaagtctgcactacacaagttaggaaacattaggtttgttgctgaaaggtgtctaaaaacattggtaataaaattggaatttacccctgctctaagccacgctgttgaattggaatcatgaacagtctgaagtttaacttgaatattgaagagctttctggtttttttgagggtggtgtgtgaggaggacatgatattttgtttttatttgatgacttttatatgtataaaaggagtagggaactatatttttcctagtgtcgtatatttttctgccaatgtatagtgatgaaataaacagtgattttagagttggcgttggtccagaccacggctctgccacctactaagtatgtgacaatagacatggagcttgatatctctgaccctcattgtccctatttgtaaaataggtaaaataatacctcctgggaggaccaaatgaaatactttatgagggggctgccacagtcttggcactgagggggctttctgtaatcagtgttgggaaaccactttcagaattttgtctctccctcaaatctttcattgttttccttccctgacaatattatattatccattctttttccttcccctctctccttattcttcttttcttcttccaccattatccttttctctgttgcccagacccaattcccaagtgagttatttaagagaatttggatataagaagaatgttaccgtttccttgagttggtaaattagtgcatgttatgttactttgcataataatttgccatatggaggtcttgtgttttgctggcttttttttttttttttgcaagttctcttttgggtagcttttgacgtagcacctagcgtacctccaggtgtgaggaagccacctttctttgtgtgtgaaccagattagtatggagtaatctctctctccgtttctctctctctctctctctctctttctgtctctgccatcagagtgaagactttgtcatggaaatggggaagcagcccataatatttgaaaacccaatgtactcagccagagacagtgctgtcaaagtggttcagccaatccaggtgagaaaccatacagtcttttctttcagttactgctgtcgctggatcttaatctattgagtcatgtcttaggattttcctaacctttcctccaaagggaaggaagcatagtgagtggtccatgctgcagctgccctatctgcaggaacaggaccaacccaaggacataagacctgaaaacaatcagaatcctgttctgttgcacagtggtggaggtttggcagccatgccggggctgctgaccaagaaccttccattttgagtggtgtcagagcaagagaggtctgagtcccttcaggggcctgggaaacacagtgcctgaagcatcacagcttctctacaaatacttgtgaaatgaatgagtggagaattgtcaggtcattatacaggaatttggggactgggcccactctctggttcttgctgctatcccaagcatgtggtttgaggtggattaaagggagagggacctcttatgcttgctgttgccatacttttctgaaaagtacaaaggtctctagagttgatgggcagatatctaaatttccttgttgcagccttgttgctcggtcatctttttttgtgtgtgtgagcaacaaggctatttatttcacctgggtgcaggcgggctgagtccgaaaagagagtcagcgaagggagatggggtggggccgttttataagatttgggtaggtaaaggaaaattacagtcaaaggggggttgttctctggtgggcaagagtgggggtcacaaggtgctcagtgggggggagtttttgagccagatgagccaggaaaaggaatttcacaaggtaatgtcatcagttaaggcaaggaccggccatttttacttcttttatggtggaatgtcatcagttaaggcaggaacaggccattttcacttcttttgtgattcttcagttacttcaggccatctgggtgtatacatgcaggtcacaggggatgcgatggcttggcttgggctcagaggcctgacattcctgccttcttatattaataagaaaaataacataaaatagtattgaagtgttgggacaaagaaaaaaaattttgtgggggtggcatggagagataatgctcaatgtttctcagggctgctcaagcgggattaggggcggcgtgggaacctagagtgggagagattaagctgaaggaagattttgtggtaaggggtgatattgtggggttgttagaagaaacatttgtcgtgtagaattattggtgatggcctggatacggttttgtatgagttgaaaaactaaatggaataagagaaggagaaaaacaggtattaaaggactaagaattgggaggacccaggacatctaattagagagtgcccaaggaggttcggcatagccctgccagcaaagattatttatttactttaagagggagttaagagtggcggtttggggatagcaccaggagatatcagctgtgatggcttggagaaacagggtaaaccggtggtataaacaagagcagggcatttatgagtagttgagaatggtgaataggagtatgactagacagaagacagtagggatgacaagttttttggggtgcagtccaagttggtctggtgtctggaatgagactggggcttaataaaaaggagcatctatacaggagcttaaatgggctgtaccctgtagcattctgaggacaggcctgaattctgagaagggcaagtggtaaaagtattgtccagtcctttttaagttggaggctgagcttggtgaggtgtgtttttaaaagaccattagtccattctacctttcttgaagattgaggaccgtaaggggtatgaaggttccactgaataccaagagcctgagaaactgcttgggtgatttgacaagtaaaggccggtccactgtcggactgtatagaggtgggaaggccaaaccgaggaattatgtctgacagaagggaagaaatgaccgcagtggacttctcagaccctgtgggaaaggcctcttcctatcctgtgaaagtgtctacccagaccaagaggtattttagtttcctgacttgaggcatgtgagtaaagtcaatttgccagtcctgggcgggggaaaaaccccgagcttgaggtgtagggaagggagggggcctgagaaattcctgaggagtagtagaatagcagatggaacactgagaagtgatttccttgaggatagatttccacgatggaaaggaaatgagaggttctaagagacgggctagcggcttgtaacctacatggaagaggttatgaaatgatgacagaatagaatgggcctgtgaggctggaaggagatattttccttggtctaagaaccatttgtcttgtgtgggaagagattgataggtggaagtttcagcgggggactaggtgggagtgactaatgtgaaggagaaaaactgactgtgagggacagaagttggaacgctggctgcttttttagctaatttatcagcataagcattgtcctgagcgatgggatctgatgcctttttgatggcccttgcagtgaatgactccagcttcctctggaagtaaagcggctttgagaagcgtttttattaaagatgcattaatgatagaggacccttgtgtagtgaggaaacctcttgcatggtggtgcaggatatggaaggcatatatagagtcagtataaatactgacgcgtagtccctttgcaagagtgagggtttgacttaaggcaatgagttcggcttgctgagaggttagtggagcggggcagagcggtagcctcaatgatagatgtggaagatactatagcatagcctgcctttgctggtgagtggtgattaggcctggtggaactgctatcagtaaaccaagtgtgttcagggtgaggaacaggaaaaaaggaaatggggaaatggggtgaatgtcaggtggatcagagagatacagtcatgggggtcaggtgtggtatccggaataatgtgggaggccggattgaagtctgggccagaaacaatggtaattgtgggagactcaacaaagagtgagtacagctgaaggagctggggaacagaaagtatatgcgtcaggtgggagaaagaaaatagattttggaagttatgagaactgtagagagtgagttgagcatagtttgtgatttttagggcctctaaaagtattaaagcagtggcagcgctgcatgcagacatgagggctaggctaaaacagtaaggtcaagttgtttggacagaaaggctacagggcacggtcccggctcttgtgtaagaattctgactgcactaaccatgcctaggaaggaaaggagttgttgttttgtagaagggattgaggtttgggagattagtcagacgtgatcggcagggagaacacgtgtgtttttatgagaattatgccaaaataggtaacagatgaggatgaaatttgggcttgactgaagtaatcggggctgtctgtgaagctttgcagcagtacggcccaggtaatttgctgaacctgatgggtgtcaggttcagtctaagtgaaagtgaagagaggctgggataaagggtgcagagggatagtaaacaaagcatgtttgagattcagtcagtcatctttaagaagagctgggagatgaaataggaatataggtgaagggaataactttacataaggtctgcatcaatagccccagcaccacttttactgcttgtcaactgcgaacatgtatctcctttgtcacaacaactatggccttagtgacaatgaataactgtcattgttaacacctatgctccttttgaactcgagatatggcacattttaataccgaaactagaaatgtttattttacaaatattttgtgattttaagatcggaaatgtttaaatcttgaaagcattttccctgatcctctgataaacagatatgaaaaccttaatcacatgataaaagagatacgacatttcatttgacatcttcacttaaaataaaatgaggccatgtatacaaatgcatatccaagtttcagaataaacaagtaatgaatgtgaaaatataggaaaaggagtgaattgtctaccttgtagtttattatgcattcatggtaatttggtcttaaaagggaaccttggaattgtatgaatgttatagaaaaattcatagaagattattaattctatcattctcatcttttcaaaaattcaacctctttttagtagtactatgaaatcttaatttccaaagataggatttattaatattcaaagaaattattaagatccaaagataggattctcagttcatcagtgaggttggggaattattcttgctgttctaggatttggcttccagtatataactagagtatgattatgcaaaaatttggtcaacagtggggataagaaggtatagagaatacagtagaaattgctagtaatcagtgagagtgtgaccagtgagggatgtatttgcctcccaggattaaggtatgaggtgacttagtggttgctgctcttgattttgggacggtgggagtgatgtttagtcctggcccactgggtcatgcaataaaaatggtgcctgatgatgtctgtgggagaacaagatggcaaaaagagccagagttggtacaaactttacagtaaatttatttactactaaattctttcaaaattgggtaaaggcctttaacatgtccacaggtgactgtatctgaaaatgtggataataagaattatggaagtcccataaacccttctgagatagttccagagacaaacccaacttcaccagctgctgatggaactcaggtaacagttgctgactcctgaaataatgtgggatttggaaaaactttgggatgactgggttgttattaaccttaagcaaacaagggagattctggaaggctcaaagatctcaagatgtgttgacagttaataaatataatttttaaagagtcatagattgaaaaactttccaccaaataaagctacattctaacattgagttgggaataatgttccttgtaacataggaggacatgtcacaaagaagaacaaatagacttctggatccagtatcttcagaccagggacatttaagttgacaaattgactcagtatgaataaagatttcacggtgtcaaagatacagatgaaagatccttctgtgtgtgccgtgatttctctacagcatgcatctttattctttcaagctgttcttcgctctcctgctattacagatctttaccactagatggcactaatttacatactctttttccatttatcatccatctattcattattggccaaccaatcatctaactaacgttattcccctcgatgtgtcagggatggtgtttaatactggagattgaaagaaaaaatgccactagatggagcttcttaaacatgcctgcaggtcctttgcaattggtacactatttggtctgcaggaagaaattcaataaatatatttgatattaaactctgtattaatgtatatcattagttttaatgaatgcatatgcagctataccagatatagctgtttgaatctggacaaactgttttacttctggggctagagtcctcaataatatttctcactgggggcgctattggcatattgagtgggacagttctttgtgctacaaaactgtcctatgcactccgggaatttcagtatttctggtccctgtccactgaattccagtagtgtctcccctaattcagtgtgaccccagaaatcacctcccctccccaacacatgtgcactcactcctagctgagaaccactagcatctggaatgtctctgttctaagattctatgaccaattttgtgaagtaatgtaaagaaatgaaagtctaagagtagttggaaattttaccattttatacaatctttatttctcaaatttcatagtctataaacgttgatatctggataacttggcagtctcattatcaccttaaacgttggtttctgttctgcttatttaaatcaaaataaaatttgaactaaattgatgctgagaagagtctatatcaaggcttttgtacaccttctcaaattcccttatttcttcttctcatgtcacacacacacacacacacacacacactcatacactcacagacatacataaatattgtctagaaaggaattttcagtttcagatttttcaagggactaaacattttttctttaagctgtattaaaaatggattttgaagattaattttccacagacacacggatgcttgaatgtcatatatttggtcctccaagcctgagtcaaccccaagctagtgccagatttattttatattttcaacattttttctcagtccatctctagtctagtgatcttcttcactaaatagacattttccctagctggtgcaggaaggggactgtggtggggaggctgtaacctctgacctgcatgtcttttatcagaaacaaaatgtaaactgacaggctctttcaaaggagagcagatcttcaccaattgtagtcctttctttctcttcccctttgtaataccttggttcctcctcttacttttttacattagtgaggctgagaccctctaaaatatgtcttccatattatgtccagggatctcactgtatttcttccctcctgggcactgaattaacagccagcatgctttaaaagcagtagaggcgcttgggtgagatcacctaggttgatttgaatacgccagagtctcacaaatgtatctctcatccataaatatgttgaaagactaacaattaaaaacatgggctgggcacggtggctcacacttgtaatcccagctctttgggaggccgaggtgggtggatcatgatgtcaggagttcaagaccagcctggccaacatagtgaaaccccatctctactaaaaatacaaaaattagttgggttgtggtggcacatgcctgtagtcccagctactcgggaggctgaggcaggagaatcgcttgaacccgggaggcagaagttgtagtgggccgagactgtgccacactgcactccagcctaggcgacagagtgagacttcatctcaaaaaaaaaaaaaaaaaaagattcagttctatcattttccaaaagttacattgatatgcataggactccccaaggagacaaaaatgaaagtcaccgtccctttcttcttgttagtaattgcttaactccaagttagccatttcattttgaagcagtgacatctaagagactttggcccgccccacttaactgtaagcgcccagaggcagggctctgacctgaatgtcttcatgttccccttgggggcactatgtacaaaggaggttctcacttgaatgtgggttaaagtgaagacctcttctacttctgtagccctgtgttccccactcctccacaggctggtcccctactttcacagagtaagagataccccataaaacctgtgggctccctcagctcctgttaagagtaggctatctgttcccttgtctcccaccaggtttttatctggcagtcagcacaacaggcaacttttcagtaaggcgtgggccacgcaccatggtccagggtgattctttttgggttctccagtttataggcctctgggtcccctgagtaattattacctgcccttctacgtgcaatttagttgtataatcttgctgtgactcagcaagtataggataataagtgtacctacctccggggtttgttaaaaaaaaaatcagaaacttgtaaaactcttaaaatagttcctgacacatagtaaacactcaataagtgttagatgtttttgttattattattattatgatacaggagggtatgatgaagggagaagggatactcttgagttgaccaaagaatgttactttagggaataagagttacagtttggcttcaccatctccacccaattttcaggcagccccagaaatctctttttctccagatgcatcttgtgcatgtctgttttatgtgttctctctgtactgaggtaaccaggtgatttgcttgtagatactatggcacaaattctataatatataaatttgaaatcaaagaagtgtttaaaaccattcgatgaaaagagcccagagtttcagttactgttcagggaccataggaggaattgaacaatttaccatatgtgctgaatcacgtggtcccaggtcccaaattgctttacccttcagtaaggagaaattttaaaattgagacaggaggaaaagaaacccacaaaataattccattactgagaggtttttgttttccccttttcatttaggtgacaaaatggaatctcttcaaacgaaaagctaaacaaacaaccaactttgaaaatccaatctatgcacaggtaatttttaacaatttttcttaacacagacattttttcttagaaattatttgcttggttaaattggacacacacttggattattctgagcagagtgtccacaaatagtcttctttatgaaaaaccgtgtatggtgaccttgggggaataaatggctgattcctgttacgttgtgttcttagatggagaacgagcaaaaggaaagtgttgctgcggcaccacctccatcaccttcgctccctgctaagcctaagcctccttcgagaagagacccaactccaacctattctgcaacagaagacacttttaaagacaccgcaaatcttgttaaagaagactctgaagtatagctataccagctatttagggaataattagaaacacacttttgcacatatattttttacaaacagatgaaaaaagttaacattcagtactttatgaaaaaaatatatttttccctgtttgcctatagttggaagtatcctgtgtgtctttttttacttatgccgtctcatatttttacaaataattatcacaatgtactatatgtatatctttgcactgaagttgtctgaaggtaatactataaatatattgtatatttgtaaattttggaaagattatcctgttactgaatttgctaataaagatgtctgctgatttggttggtgatcattatagtaaatgatccaacgagaaaaggaattgactgggacctttagctgtgtctaaagaagaggcaccactcatatttcctataaaattatctaggaaaggaatccaggccccgctcttgggtccatttttacacattagcacttaattaatgttcaatattacatgtcaatttgattaatggctatgttgataggggccactatgtgttatatagacatctggacttgactgtagactcctcagataatacagaaggtagaaaaagcaattcagtttggcccttctgtgtgttggcattgtctaaccagaactctctgtttcatgtatgttctctcactagctgccaaggcaacatttttatttgtgatgtctatgaggaaatcccatatcattaagtgccagtgtcctgcattgagtttgtggttaattaaatgagctcttctgcttgatggaccctggagcaatttctcccctcacctgacattcaaggtggtcacctgccctagtagttggagctcagtagctgaatttctgaaaccaaatctgtgtcttcataaaataaggtgcaaaaaaaaaaaaaaaaaaaaaccggttaagcaaagcctcaactgggtttttgtttctatgaaaatatcattataatcactatttatttcctaagttgaacctgaatagaaagggaaaccattcttattaagctttttattaggccctgtggctaaatgtgtacatttatattagaatgtactgtacagtccagatcttctttttaattcttattggtttttttttttttttagagatggagtcttgctatattgcccaggctgatcttgaagtcctgggctcaagtgatcctcccacctcagcctcctgagtggttggggttacgggcgtgagccactgtgcctggcttccagctcttctcttaaatagtgggtatagtctgcacaacaggaaccatggcaggaatatacactttcccatagcaaatagcatacctgactctctgtgctaatattgcacatttgttaaacaatgaatggatggatggatggatggatggatgaatgaatgaaacatatactactgattattttattccagagttctcaaaatatttgttgctgatattttgagtgctgactgtaattactttgattagataaacaactggaaataatgctgctgaaaaatttctaataaatgtgtattttatcaga

SEQ ID NO: 25 - DNA, 161737 bp, Mus musculus
  source 1..161737: mol_type = genomic DNA
gcgcgggtagaaaacgggatgcctcaggcgccgggaccggctttctgcctctaggagccagcgactgctgctgagcaagactcctgttccggagcggagtaacctgcctgtgcccgctgcgacgcgcgcccacctcccggggaaggaacggcgaggcccggggccgtctccgcgatggagcgcggggccgcggcggcggcatggatgctgctgctggcgatcgctgcctgcctggcgccagtcagtggccaaggtaagcggtcacctgcccgcgctacgccaccatagtcgctgcggagctgagccggacgagggtgggcggctgcggagctgctccggctgagcgctccggtgaccccaggagagatgactgcagcgccgcttcttgtactggttggggaacgcggacgcaccggtttcggtgacagctcgtcccacggctatcgtgcctttgttcccacgggaattagtcctgaccctcaaggctttccaggatggaacctggagtacgagggtctcccgcgtgggtctgcagctttcttctggctggggcggggcggtcctccacgccgctcccagcgccgctttccacctgcagcgtccagccggcgcgggagatccgatcccaccgtgcgccaggggccgccggccagagcctccttccatcagtggcgaaaccctgtcccgcggtgacccccatgagaccgcatctcatgataccgatcgtttacgagcccagataaggcggggaggtgggattggcagaggaagcggctgatacactagagtacttttcttgaaggctttccctttcctacccagagcgggtgcttttgtgttgatgaatggagctggttagctgcgcctgagtttggggactggaatgcagaaagtttctaaagtgactacaaactttttcaagttgtccgggaggttttttttttttccttccccgtgaaacagggagagagaggaaagggaggaaattatttagaatagaaaactataagagaagaaaatgagagacaagttgaaaggaatggagaaaacgggaaagcaaagtgaggaaggagggagggagggagggagggagggagggagagagagagagagagagagagagagagagagagagagagagagagagactgactcaaggagaacccacgagctctctccctggctttcgttgctaggtagcagcctggtgctgcgtgtgaccgaccaccagacagacagaacggacgctgcagcctctgcagggactaatctgtctgtggggatgggccagtccccacttcccctcccgctctttcccgtcggacaacttaattgccctacaataaaaatgaaacccctattgttgcaggattagtcaaagcaataaattgatttccctagatcacatattggggttgatgggtgaggactgtggaagcccccatttatagagaggagagaggggagggcttgtggatgggccgtggcatgtattcaaatggttaatctgctttctttcctcaattcttagcgtaagctccttagagggaatcaagtaagtaattatacagcagctccaggcagcacccatctcagacttcctgggaagtttgggagcgccaacaaatccaccaggctttgcaaaaatctttcgaaaaggaggggtgggcggcaagagaagatgtctaacagttcttcctttgaacacctttctacagtattggaaacgcagaaaggagacttactgttatattgtgtgtgcgcccgcggtagggagagtgcttagggttatatatcatgcgctaaatatagccctagggtttagtgtacttttctgttcctgtctggagggaaaggttgcttacattcttgagctgatgtccctttaccaccggaacatgcattcttctccctgttttttggtgtcaccaaatactgtgtacctagatttcctcaagttctcatccatgtgaattacggagaaaaagtgggaagcatttttcaagtttttagcggataatgcaataatcacctaacatatggctgagagcacatacaagcatacatacatgcacacatacacgtgtatgacatgtgtatatattcttcaggaatttgtttatttgtttgtttatttatttatttgagacagggtttctctgtagtcctgactgtcctggaacttgctctgttgattaggttggcctggaactcagatctgcctgcctctgcctcctgagtgctgggattgatggcatgcatcgcccgccctggcattctgggtaacaaactagagcccaagtgtcaccatttttagttttgctatttgattattgtaattaattttttttaaaatgaaccagtgtttccatgtttagcccaggctggcctgaagttatgactcaggctgtttgtgatcttctggtctcatttcttttccaaacacacacacaaaatgtaattttgcctttattcatgtgtgtgtaagcgtgcacgcgagtgcacatatcataaacatgtggaaagtagtgtggatcccagaatgcagttcaagtggtcaggcttggcgtcgagcattttcctgataaatcattttgataaatgcattttgaagtgatttttttctttccttttcattttttaagaatctgtcccccacttaaattctttaatccaataccaatttggttatgccttttgtgatgattgtatcttgagtgggacctgtaatacacaggctacatttgtttttgtttttttctaactctggtctctgcaaccttgtttgctgttgtatttatttcaaggtggtcttctgttcctatgcttggaattctttttggctgtaactgggttctgcctcaactcttcaatcatctcgatttgatgtggaaggttttagagctgcagggaacctgagtatctacacctgtgtatcattgttttatactgaggatggttaaccccagcgggggtggagggaggtcctgaaaagctggaaagaatgtcggtcagctcctggcccgagggcgtgtagtgtgatagagccccttggagtcagtttctccgagtttatctcctttttttagttgtccccaccctccgtggttgagacttttagattcctttcaggtgacccatacttatcagatgaagcaaagactaacaagtagatgaccttggcagactttaacaagattggatgtgccagtcaggccaaagagcaatggttctcaaccttgcggcggatgctgtgactctaggacactcatgctgtggtgacccccaaccataaaaccgttgtcattcatacttcataatctaacttggctactgtcgtgaattgtaatgtaaatatcccatatggagtataactgatatgggaccctttacgaaggaatcgtttgagccctataaaggggttgtgacccacaggttgagaaccactgccatacagccctggcaggccaaagaggtatttataggttaagacagcttcaggacttgagcttccagctttgtctagaacttatggcacatcagtgccaggtaccccttcagatccattttttaacattctttcttttgttgttggttttttgttttgttttgttttccagacagggtttctctgtgtagccctggctgttctggaacttactctgtagaccaggctggtcttgaactcagaaatccgcctgcctctgcctcccaagtgctgggattaaaagcttgcgctaccatgcccagctcattttttaaaagtcttgtactattagtgcacactcgtgacactctggaatttgcagcgtagactgctgcacaactgaagctttaggcttagacaagataatttctaggtcctggctaatcattgtctctagacaagcaccttaagaacattaaagtttaaaacattcttagtaaatttttaattgcatttaaaaatattgataccaagaacctagttattttccagtattttagaaacattgtcattgtctttgaccattaagttttcttagctaggatagggtaacaagacattatcgggtacttaggaagtgttcattgtcttcattcattatggttctaaggacccaactttgggcctggggtatgctaggcattgttccacttctgagttctttgtactcatagcacaccaataacagaatccaaagcaaagggaagccaggtgtggtagagtcatttggttttttttttttgttgttgttgttttttgtttttttgttttttttgagacaagttctcactttgtagccttggctggcctggaacacacacatgcctctgagctgggattaagggtttgtgttggagtttgtttttttctccccaaagacagggtttttctataatatccttggctgtccttgaactcactttgtagaccaggctggcctcgagctcacagatccacagatccacctgcttctgcctcccaagcgctgggattaaaggccacttttccctgtctggaatattcttttaatcccagaatttgggaggtggaggcagtgggatcaagagttcttgtcttgcatataacattcctatatattagctgtatagggaattctcagttagcctgggctacatgagaccatcttatacttttaacctcaaaagtagggagggcagagggattctgagtatgattgtagaacaactgcaaacccaccagataccaagctctgctctggaatggagaaaatgaggttgaaagagctctcgtaaccggaatggtttccatgttaactttgtgatcctgaagaaataaaagaaatggctgctactagtgtactggggatgtggtagccagcgaaggagtctgaatttcataattaaaacgtactccagctccactttatggctttgagagagtcattgcctggtttcccattacccctcccaggacccttctggtttaaggaagagttgacatgcttcagtgtcagttttgggtttctctttgaacacgattagtggtggtttgttttgaaatgccaagtttgcttttgtgcctcatgttctattgaggtccacaaaaagaagttggcaatgtttgcgattttgcattaagacttttagtttgaaccccacttttctttccttgttatccgggaaatccggtgtaactgcttgaggtgctgtgggccactcacttttcttgtctgtaaaatgggctcacacctacttcctagaaccattatatagatagagtaaattaggcaatgaataagaatagcttacagacagtgtccatcagtattaatcattttttaaatagaagcttactttacagttttgtttttctcttttgatcccaaggtgactccattttcagacctgttcacttggtgtaaaatgactcactggcatcggggcttcatcctatcatgtcatatccatagggaaaaagaaaacagccttaaccgagtctcagttgcattgcaatggctttgctcaatcataagcttattggacaaattaatcaccatactcaggggtagaagtattcccataggttgggctctgccacacacttggtcccagactcagcaaagtgtgggccatagagggagattgggggtggggggagggctgtgaagacaatggtggccacaggctgaaccgcaaatcagatataaaaccttatcagacaaaatcggctaatgatgcaattttcattttgtatgtgaagacagattggaaagacatggaaatctctcaagaactggcagtcctgagctagttcagtgagctgaaagaaggaatgtattagaaacattctatgttcctggaatcatgttgcaacttttaaagttgttattaatcattattacaaccatggccataccaaagattaaatctataggcccatgtatgccagacaaggactctaccacacagctgcaaccacaacccacttttcaagtttagaatgagggaaggaagaacttttagatactttaaaaatttttttaaatggttttttaaagattttatttatgtatgtgagtacactgtagctgattctagacacaccagaagagggcattatgagccaccatgtggttgctgggacttgaactcaggacctctgaaagagcagtcagtgctcttaaccactgagccatctctctagccctagatactttatttatttactttatctttctttctttctttcttcctttctttctttctttctttctttctttctttctttctttctttctttctttctttctttcttccttccttccttccttccttcctttctttctttctttctttctttctttcttccttccttctttccttccttctttccttcctttctttctttcttcctttttttctttctttctttctttctttctttctttctttctttctttctttctttctctctttccttccttgcttccttgcttccttcctttttttttcttttttaaaaaaaagatttatttattgtatataaaagtacactgtagctgccttcagatacaccagaagaggacaccagatctcatgatggatggttgtgagctaccatgtggttgctgggaattgaactcaggacctctggaagagcagtcagcgctcttagctgctgagccatctctctagcccctttctttcctttctttctttctttttttcaagacagggtttccctgtaatgtcctggctgtcccagaacttgctctatagaacaggctggcctggaactcacagatccacccgcctctacctcctaagtgctgggattaaagatgtgttctaccacccaggcccaagtaaagttttcttatttggagaactgtggagaggagtgggaagtctgggagtacgagtgtagagattagagcgtggattcggtccattgtagggcttcaacttactgtgatgtcttttctagtttactttattatgattctaggatctggacccttttctacgttcttgatcaggattatgggaaagagaagcatcaggaaacaggttaagatctctgtggagacatcttagtgcttagtgcataaggagtctctagcactatgtcaagcactcattccataaaaggtagacatttttttcttcccaaataaatgcactttatgttttcttttcttcttcttcttctttttttgtttttgtttttttttgttttttgtttttttcgagacagggtttttctgtgtagccctggctgtcctggaactcactttgtagaccaggctggcctcgaactcagaaatccgcctgcctctgcctcccaagtgctgggatcaaaggcgtgatggctactttgttagtctttgatttaaatcctatttctatagcagttgctaagaaaatggagacattcccattcctaaagtacaagtcgcctctgattaaaaggacagcaataaaacccgtctctcccagaaaacaacagcaagataacatgtagctttcactctgaaatctcagtgcgtttcgccatgagccccccagatcatactggagcccgaggatatggaaaacagtaagaagtgaaggaaagaaggaaaacgtaataaccattctgtgcattgaaaagttaagccgctgttaccatggatacgacggcttgtttgtttactggctatggacccctgggattccagtttgtaagcaataactggagctcttccaagcatgtgtactgccagccagtaacttgatgattcctcataactatgaaaggaagcttttatcgcttgctactgatgcacaaaaagtggaagtgcatgtacttctgagagtccaactggtgctgaaacctgaaagtgatggagagcaacaatctggttaggctagaatttcttgaatcctcatataaaaacaacgtcttataagtatcaagcatttgcatgtgttttgggaccaattttgtgatttttttaaaatagtattaacagtactgaaaacctttcatgtccttaaatacagttgactctgagcatccatgggcccaggttggttgactctggaggtcttcttgtagtgtctttgacccctctggatccctccatcctatcccctaatcttccacaagactccctaagctccacctattgtttggctgagggtctctgcatctgcttccatcagctgctggatgaaggctctcaggagacagttaggctaagcttctgtcttcaagcaaagcagagtatcattaacagtgtcaggggttggctctctcccatgggatgggtctcaagttgggccagtcaatggttggccattccctcaatctctgctcatctttatccttgtgcatcttgcagacaggacacactttggtcgaaggttttgtgagtagattggtgttgccctccttccactggaaatgtggcctggcttcaggaggtggtcacttcagtctccagctagggacaccactatagtgcccctccccctaggtctccagcttgtcctagagaagtcctctactgatttccattcaggcctctcccaccactctaaccccacacctgatccccatcctagttccctccctccctccctccttccctccctccctccctccctccctccctccctccctccctccctccctccctccctccctccatctctgtctattttagttccccttctgagtgagatcaagcatcctctcttgggcctttcttgttacttagtttctttgcttctgggtcttatggctattgtccataggggctggacctaggcgccccctacacaattgtagcagatgtacaacttggtgttcatgtctgtcccctaacaaactgaagtgggactgtgtctgactgttgcctgcctttggatccccttcccctagctggactgcctttgttagacctcagtgggagagaatgcactttgtcctctccaacttgatgtgcagggcagtgcccatgagggagtagtgtcggtttataagggtgggactgggaggagagaagagaggggtctgtgtttgggatataaagtgaataaattatagaaaaactgagacaggttttctctatgtagttctggctgtcttgaaactcaccacatagaccaggctgacttgcctctgcttcctgggtttcacccgcatgatcaatggctttttttaagggtctcatgttagtccaggatagccttgaactactgaccccttgactttacctgcaaagtgctgggattgtaggtgtacactaccatacccaactccttttttggtctttttggcacagggttttatctgtggcccaggttggcctgggacccattatgtagcccattcaggctggccttgaattcttggcacccctccctcagtaaatgggtacagggattacaggtgtgaattattaggcctgataatacagctgagtggatattttatctgaaatatgccactactggctacattttaaccttagtaaaggggtgaagaaaggaagctagcatggacttctacattgttttaattctgatatccagaaagctgcagcaatacttactgttttaagaaacaaatagaaaacccaacccacactgactaaaacaatggagtctttcctggctcctggagtggagttttggtgagggccatctaggctcccaatcttttgtgtttttctgagctcttttcttctctggcatccggctggctttcaggaagctttcctatggttttaatatggctgtcagagcaaacggggtttcatgtcctcttgatcttgtttgagaaaatccagcctggaaggtttcagtcccttctttcttttcttctccccctctctccttccttcactctctccccctccttccctccctctctcctccccctttctccctctctctctccctcctttcctctttctctccctcctttcctctttctctccctccctccctccctccctccttccttccctccctccttccctcccttcctccctcccccctctgacctttccctgttctcttttcttcattttctctctctttttttctcttagctcttgctatgtagtccaacctagtcttggaacctttgaccctgagttctggctttacaggtgtgagccaccaatgccttggttgttatgcttttattttttatttttttctcttgcttttggagacaatgtctcctgtagctctggatggccctgaacttctgatattcctgcctctacctcccaagtctggagtaatagacaggaggagaccttgctgggcttccctgatgttcttaaaagtataactacttcacttcaataacttggaatgctataatttctaaggactctaggtagatggcagccagctctggcatatcatgcatcatctggggagctttataaagcatatatatttacaggccagagcacatagtcactgaagcagaaacatgcattttgaagagtttccagttagctttggggatcagacaatttaagaatagctgttatggggaatccctctcatttttcagtttttgaactgagacttggggataaacttatgtgctgtgtaaatccctctccatgacaattcactctgctctgccaactccgctcttccatttgaaggagctacaagcaaaagcactttcccatctgtgaaatgctgccctcatccctgtgtgtctttgtgagttccctgatcactctggaagcccttgtcactttaaaaagtaaagaactgggagaggttttctgttcccgtctagtgaagtcagggttcgactcagcatctccaatacagcgcagtgaagtcaggatgcaccatagagcccactggcttctggaatagccttctgttctgtggttgcaatggcagcccgtttcctttttatccccagtttgctgagtcaccacctctcctggtgcctcagatctcagtcattcccttcctcagattatttcagagtcattgcttaagtgacttccttcatacactctgggcagcttggccttctttcgcttgctctgcaaagctccaacactggttaaagcaagttctgcacatctgcttctctatgtctaaaacacggtgggagaataatactacacagtgcaaagctaaagtcgggagatgaatctcaggtttaggactcatttcctaacttggaacctctgacaccatctgcctagatgtttttaacgtgtgtatgcccaactctgttttctctgtgaaaacagagaatgcctctcatttgtataacaatagttactgcatactttcagcctgcatagcctgtctgtgtgctggaagaaagtcctatatgctaagttccaagtaattcaagttctagatcaacctcagcagttgcctgttggctccttcactctcttctatctcctaattgttcctccccgctctcatacatacatatatatatatatatatatatatatatttgtagacagcctggctttgtctattatttttatctattattatctacatcttgtaacatagactgacttcagctcaaactgaacgtccatggagtctttcctgattggctcactttttccattacatcactcatcagctgaagcatcaagttacataactacttacttgcctagtgcacaccagtctttaggttccatccccagtgccatacaaactggatgtggttgtatacctgtgattcaagaacctgctagattagatgcaggaaacccagacattcaagggcatccttgaatgacgaatatatctatatctatatctatatctatatctatatctatatctatatctatatctattatcatctacatctatatcatctatatttatctgggctacatgagattctgtttcaaaacaaggaaataagtgaacatacaaatataagaattttcaaaaaggcctgtgctatcgctcagtggaagagcactagcctgcctaacttgcacaaagatgttggagtcaacctctagtactaaaaaggtggggcatgttacactaactagttttgccagcccttaatatcttagggtctctttaggtcctgagagaagaaaaagaaaattgttgtcttaatcaaagcaagtggcttagcaacagtgtttctctccagctgaaccccccaccccccactccactcactggtgacccccagtgcatctgagagtggctgcttcttcattcctttttaaacttgcccccagatccatggttatactgtgggaattctcctatacatacacaatgggtcattctgccattttttactacacatttgatacagtagcttttacaaaaagataagccaaagtttttccatgttctgttagtggactgtcattctgtatttaaacagagcacaaaagaaagctgtctgggaccatggtacactgaaaatcgcagctgagacaaaaggccctctgaagagaggagcggatttccaagtccgggaggcagctggctgaggtgggaagagtctctgagtgcccagtcaaactcccatgagtcttgtttctgatggatgaaggaaaaataggcctggtgaaagggtctcaggctggtgataaaggccaaggctacttgtcctgtggtcacagactttttacccaagtgttggggaactggttcagtggtaaaagtgtttgtcttgcaaacatgagtttaatctccagcagagagaccagccagcctaggctaactagtgggcagcaagccccagggtgagtggctccccaggctaaccttggccaagtcacatgtaaagaagctgagaaaatgagcttcgttagaatgactaatttttaagtgccttctgtgtacttggcacgttcctagtggctatgcaagaagaaagtggaagatggttcccctgtgccaactcaaataaatcccttcacttgtgtcatggtgagggaacctcacttcagagcctggtgtctgagcagctcaacctttggctttcttctacttttgatagtttctccaagcatattccatatgttgatggtgactttgtcatattcaggggtcgtagaaccaggagctgtataacatacagattcacttgacatatatctctgatgttgaaaaaactacatttctcctctcccagttgccctcccatgctgtgtatgcatttctgtctgctgagttgtcccccctcatccccccaacccctgctgtcattttgtcaccttggagagttgtttcctctattatgtgcttttcaattcaaactctctaacttgatcagagagttctgttccatttcaggttagggatggcgtgataatatggatggggaatctccaagtccggttatatgaagttctaggagagatggatgagtaaatgagggttgagtctctctgcattcaggaggaggctcctcttgtggggctggggagatgtatcagatggctgagtgtaaaggtctctgctcccaaagcatttcttttctttttttaaagattaatttattgttatatgtaagtacactgtaactgtcttcagacacaccagaagagggcatcagatcccattacagatggttgtgagccaccatatggttgctgggatttgaactcaggaccttcagaagagcagttgctgctcttaccctctgagccatctcaccagtccccaaagcatttttttttttttttttttggttttttgagacagggtttctctgtgtagccctggctgtcctggaactcactttgtagaccaggctggcctcaaactcagaaatccgcctgtctttgcctcctgagtgctgggattaaaggcgtacgccaccactgcctggctacccaaagcatttcttaactgtgtccaaagatgttctgtcatcactaaagccagttcttcagagtggcacgctgtttccctgtggacacagaagaaaactccgagttggcattgcttttcagagagataaaagaagggcagtagaaaataccagaaggtgagagggactcttaaaaggaaatcaactccctctccccttactgtgtgtgtgtgtgtgtgtgtgattacatgttcttcaggtgtctttaaagagtccctggttgaacagttaagccaattctaaaagaggacattttacctggaagtgtggctttcctcccatacttagctcaattgaagggttgttagaaaaagctctagctgatgtggtggttcattcctgttctgagtctaagggtagcctggtttcacagtgagtttcaggactgcctggacttcagtaagatcctttattaaaaacaaaacaaaagccccaaataactaaaacattacctgtcaaacaaacaaacaaacaaacaaataaacaattgttaggatccatcagttattgtaagtttgcgaagaggctcttgggttgggatgcattcttgcccccacacctatatccataccgtaatccacccacctagtaagcagacaaatacaataaaataaatcgttttcttttctttttttttaaagatttatttaatatttattatgtctaagtacactgtagctgtcttcagacacaccagagaggccatcagatctcattacagatagttgtgagtcaccatgtggttgctgggatttgaactcagaatctttggaagagcaatcagtgctcttaactgctgagctacctctccagcccaaaataaataattttcaaggaaacacctactactactactaagcttgcacgttagtacacactcttctcaagttggttgctgttttatttttgtttttggtagggtcttaccatgcaagctggcctgaattcctcctgtgtgtcaacctcctgaatgttttgtgtactactaagcctggtttcaagtcagttgctgaagggttaacttttttttaaggtttatttattattatgtgtaagtacactgtagctgactttagacacaccagaagaggacatcagaactcactacagatggttgtgagccaccatgtggttgctgggatttgaacttaggaccttcggaagagcagtcagtgctcttacccacggagccatctctccagccctgaagggttaacttttatgtaccagaattctgacttttccctagtacacttttgacataaaaatttacttcttccctaatatttggtgcagtgaagtgttgaaggaatttgctaagcaatcaatagaagctgaggttctggtgaaaaacaaaatgtgtggcttaaaaattgaaggtttgatgctcctcactgtaaataattaaacccagcagtcacagacaagaggacgcggcaccatgtggcactggaacgattaaggagaatgctctgtgtacgcttcgtccttgcaagaaccaaagaagggctgtaacagttgcggggtggcaggtgtgtgtgtgtgtgtgtgtgtgtgtgtgtgtgtgtgtgtgtgtgaaaatcctcttgtgatctacaattgtttttcaggcattttgatgtgattaagggggtaagaaagagtagtaaataaagatgggtctttatttgagccccagttctcggtagggggtctgagactcactgtagtgacctcctccagacaccgctgtttcacatgcacaggtcaaaggcagttggctctctttatttagaagagaactgatagaaccaccaattgagaactgaagccatagagaacatcctggcccatagtcatggaagctgaggttctggtgccatccctttatatccagtccctacaaataaagtattcttgtctttctccaccccccccccccaagaaattcactttcctcgatgaaagtctcagtcacttttcactcattcatgcttgttttcttagcccataacctctttgttgtttcttgagacagggtttctcaactatagccatggtgtctcagaactcactctgtagaccaggctagcctcagactcactgatctgcctgcctctgcctcccaagtactgagattaaagcccttcaccacttcttcttcttcttcttcttcttcttcttcttcttcttcttcttcttcttcttcttcttcttcttcttcttcttcttcttcctcctcctcctcctcctcctcctcctccccctcctaccccttctcctcctcctccttcttcttttttatggttttagagctttattgtagaaaggcagggagaaagagagaaggtagaaagagggagagaggtcagccatggccatgtggagagagggggcaagggagggagagaaagagggctagagatgaaagtaagaaaggtgagagcttaaagagcaagtcccccacttcttgtggtgggggtgagggattgctaatcttttgaggtcgttattaatctcactatgtggtcatgaccgttgaccaggctgtcctcagactcagtgatctgcctgcctctgtgctaggattaaagctgtgcaccaccacaccacactactagccttcatttttatatctgtaaaaatgaatacaattttacaggttttatagcaatagactttgactatgttaacatagactaaattgtttgtgtgtacagtactgtaatcttttggaaatatactagccgtgctagcatgtgctctaccattgagctacacccaaccctatttccataaatatatttttttgtttttgtttttttcaagacagggtttctctgtgtagccttggctgtcctggaactcactctgtagaccaggctggcctcgaactcagagatccgcctgcctctgcctcccaagtgctgggattaaaggcgtgctcccccacgcccggctatttccataaatattaacctatgtgtatattagtgtaacaaccaacacagtcaggattagaacagttcagcccctgcccccatttgtttgtttgtgctgtccctttatatccagtccctacgaatgaagtatttttaagtctctttttttttttactggaaattcactttcctagatgaaagtctcaattgcctttcacttgttcatttttattcaagaagtgttctctgctggtttttgaagtaattcaaaatgacatggtcggtaaagtcgcacggctggatttcctttattataatggagggtgggggaggggaagggaggctatggaaagatagaagccctttcaatatagccatataagaaaagatcgtgttcattcttagattggaatctgaaaagagaacactcaagagtctcccttcaagaaggggaggggggtgtttttattcaagaaattactccctgacacctacccgggaaatgattagttgtttccaaagaagatgaagttagtgtggttaattaactgtggtaatcaggtgacttaaatcaattaactccctgttaacaatttccatcaattttgtaaataagttaccaaatcaataaattgtacacataagatgaaagactcttctctcttttttggttttttttttttttttgatggcggattagagatggtctctgtcttgtttcattcgctttctgctacacttgctttaatgatatgaacactcaaattggctttcatctgagaaggacacaccagggtaacttttactatacagttactgtacagtcaggactctgccccttcatctttgcacatttctttttttttttttttttttttttttttaaagatttatttatttatttatttatttatttatttattacatgtaagtacactgtagctgtcttcagaccctccagaagagggagtcagatcttgttacagatggttgtgagccaccatgtggttgctgggatttgaacttcagaccttcggaagagcagtcgggtgctcttacccactgagccatctcaccagcccctttgcacatttcaaaacactgatttaggagaaacttaagtcagccatgtcatggtgacactaggagattcaggcaacatagaatgtgtccagttgtctgaagctgtttcctttgtcagaacttcatgagtgatgttaatggtgatgtaataaaatgggccttgattcttggctagactaaatttaaatcgtctttcttatatttcactctctgtctctgtctgtctctctttctctgtctctttctttccgtctctgtctctctgtctgtttctcggtctctctctctttctctgtgtatgtgtgtgtttgtgacatgagtttggagggcagaggacaatttgtgggagttgactaattctaaggattgaactcaggcccttgggtcagtggcaggtgccttcattcacggaaccatcttgtcaacccccaaagtaaactttagaggactcctttggtgatccacttaaaggaaatatctctatatttagacagagtctcatgtagcgcaagttagcctcaagttcactatataagaagagactgaccttgaattcctggttcttctgtttctatgtcgaaggtgttaggattatcagatgacaggcatgtactaccattcctagcagggacggtatataatgtaaaaaaataaaataaaaacagggccaagaacacgctaggcaagttgccgtaccattgaaaggaatctccttcccatcctgttagcctatatcgaccacagtcgttggtaaaagttcaattatgttttgaaaatatacaaataacactgctaaattctcattttagcctccccagtggtataactactgagccagatactaaacgacacgtcctagactaaaatgaaatgtgaaccagaatattacaaaaccgtgtaccgtgtcctagaacaccgttatatttcctgaaaggcttgtacataggcaattcacaacctaggacagatgttatggaatggcttagggctgtgtcaggaagaaatatttgagttgtatatatttatccatttgcaataattctatgctaaaattacttctgtttttaaaaatagaatccccacagtttcctcaaagctattgacggtagcttgacttaggttaggcacataactcagtcacttcgagatagacacaggagaatccctagggcttgctgcagctagtctagtctgtctgtgagctccaggttcagtgagatcctgtctcagcaactaaggtggagaatgattgaggaagatgcccgatgtgggtctctgaccattgtacacacacccgtcacatagactgcatccatacatatgaatatgtatgtacacatggcctgcttagaaggaatgggatggaaccaggggtctatgtttaaagctcttgctaccaagccagactttgggctttcctatgattttagaagctcgctggctgtgtgactcccagccgctcgaagaccccacaatctcagggtttatgatgaactcagtaaacctggggccagattttgtcttgtgtttgggacatgggctgtgacttggagatttagctcggagctgctgtccagacgcattcctgtggatcccatgaactctgaacccaagtttcccaactgtaccatgtcaatttgaatttctgcctcccgggagtagttaaaggtcattgtgaacatgcaaggtactagagcttggtgagcgttcagtgaacgaacatttggccccacagggaacctggtgccaaattattcacatttgaccagttcctggttgggtcagtgctgctgaccagcctccgtgctgtgggcttttgaaatgtagaaaccacctgtcaagttctctatccatagaaactgctgagggaaaaaaataacggagctttttaaaggaagtggagttgtcagacaaagcagtgttagaagacaaggcctccgcacctgcctgtctgctcccaagaagggtttgtttggtccttcagagttttcaagatgaaaacccaatgctaagttatggaaaggttcaattttctcagcagacttggtgtttttaatctcatgtgctggacatgcattctgtcagtttgtctttctgtagtttattgttatgtctctaatcctggttggattagaggtctaatcaaagggctatatgccctctggtcaggaagggtttgcagagggcagagtacatgaggatgaacacttgattctgtgagagcctttttaggcagggcatcccgaccatagcaaggcatcaacatttgttcccttatattggatccccttattcatccacacatgctagcccaagcctgtaatcctaggatttgggaggttgaggcagcaggattgactttgtaactggcatgggctatatacaaagcccaattctttcttatttaatgaaattacaagaggctcaccaagaagttgtacaggtgagtagaaggtaagttggatcactggcacacttatttatttatttatttatttatttatttaatatatttgagtacactgtagctatcttcagacacaccagaagaggtgaccagagggcatctgatcccattacagatggttttgagccaccatgtggttgctgggaaatgaactcaggacctctggaagaacagtcagtactcttaaccgctgagccatcttctccagccccactggtgtgattattacacaagtatttgcatgttgtgtcaggaaccagttagatagagatggtgagacatgcaaacggacactgtgctgtaccagaggtttgggagcacagcaaaggggatgatgtaatccagtttgtgcggcaagaaagacggaccccacttgtgaactgtttgaactgagtcttcaaggaggttgtgtcatgggagacagatctgggagagctgcaccatagaagatctcatttgactaagctgagaggttgggtggctttgaagacttctaagttgggaagtatagtgacctgatattctctctctctctctctctcttttgtatgtatgtgtgtttctatgcacacacatgcatatgtgtacgtggaggtgaaaaaaatgtcaaatgtctttctcaactgatgtctatcttttcttttggagcagcgtctcttgttgagcttggagcttactggctggtcagcaggctcccaagatcctctgcttcccatctcccctgggatttcgggccctcgcttttgcttggttggcttttttttttttttttttttttttttttaatgtgagtgtaggggatcaaaatcaaatccttgtgattgtgtagcaaatgctttaccaacttagtcatctctccatctttttataaaaatgacatgaaatattgtctggaaaaaaatgtgttccttctctggttttgaaataatgggagtgataacagtctggattttttattgtttggtttttttggttttgtttgtttctttgtttgtttgtttgagacaggggttctctgtatagctttggctgtcctggaactcactctgtagaccaggctagccttgaactcagaaatttgcctgcctctgcctcccaagtgctgggattaaggcgtgtgccaccatgcccggcctgttgggttttttgaatcagggtctcactctatagctctggctatcccagaccttacttcattgttaacctggcctctaactgttctgcctccagagtgctgggattaaatgtgagagcaaccacacttaacaagcaggactttttcaattagttctatgcttagccttttaaaagatgacatcaaggcagagctacctaacacttgaaatgttaacttttgcaatgtttgtaaaacatcaatgtcaacatattgcacttcatggagatatatttttgaaagcatttggaatcaatgcgtatctggaaactagttttctatgtggattcactttaattttatctagttcagtgttgtgaatataactctgaatttcatcagtaggaaatgtttagttaagagtatcattttaaatgaaaataacataatatttaagtttccgtggcagcatttgagatgcagatattataattagttgatataaaaaaggttttcaaattggctgtagattatgaatatggaagagtcagagataagtaaatatgtatagtaaaaaaaaaatcacagggacacaatatgtagatttaaagaatcaggaaacacttgtctagaatatagcaaatcttccatctcctgttgcccatgctccaggcccatacgactcacactgcctttaacaccacggacaggagcttttattatcactacgctttgaggaaaaccagaccctgacagtaacatggctttcagagagtaaggtgaagctggggtctgagtctggggtgtatgatgtcagggacttaaccctgagcagttactctgcttccctcttgccctttccttactctactgtaaatttgcagggctttatcagtagggcacagccatctggtcatttacacttagcctcagcactctgaggaagagctggtggtggcttttagatatgaggggggctgagtgaaagaaggaaagtgtaaactcatacgtaaagaaataatgatttcgtatttagttaaggcagttgactctgtaaggagggaaacttgcctccgcttcctcattaactccagcgaggagaacaagcatgcttgtatacagtatcttcacaaatatgagtgcccctcccccttattttgaaagcctgtgctgggggctgctgtgtatggatgtgtgcacggacatctgagttctgtttgggtgaaattagtgaaccctgtgtttccagggaaaggggccacttgtctcataactgacacagtaagatttcaaattagtattgcaacaaatgcgtttatttgtcggttgcttctcttcaagccttggaagtcattacctgcacagtatttcccatggccttttcctttagttaattctaagatttattatacttctgtagagagttctcttttttgactgtattttaactcctctatgctttttgtagaaagagtctcaacctgatgagacttttggcttcaacaaaagccttgttacaatgcatgacgttaggcacctgtctaaagtaccccgcttcctttcagtttgcttcaccgagcttcagggagggtatctgaacattgaaaaaacgaccacaggggcattacagagtgagttccctcacaggcttcctgtttcaccaagtgcacgtgcccatgcccatgcccatgagaaacactactttaaaaggttctggaaattcatttggggacagattttggaggccaagagatcctgggatagagaatggattttcagataagcaagtggatgtgggatctcttgattagataaggctctgattattggactgttggaagagccttttaagttaaagatgatttttctcctttctaacgttaccgagaagacttaggaagcgcagagtctgaacaggaagcccggagccctgacaggaaggactgacctgccctcatttcttagattctagatgaatcttggctagttgacttggttctctggaagagaatgaattgcacatttgctgacagttgtctcaaaatattttcctgcttgtcaatacgtgtttgctttggactgagttaaacatgattagggtatgaagagtacttaggatatccatccatccatccatccatccatccatccatccatccacccacccacccatctatccatccatctatcatgtacctatctacctacccatctatctctgagacagggtctcactctagcttctgctactctggtacttagtagagagccaagacagttctcttgcctcaggtaccaagttcttggattacaggcatgagagaccattttaaggcctctgtttcagaagcagtgatggagtcatggctaacgggttcatggtccttttaggaggaaaagttggatggctatacttattcatgttcaatcagaaataaagtaatgtgcaatgtcttagaatggttaagttttcctttcagtgtattgtaaaggtgctgggacatgatcattcagtaaggatgtttttgcaattgtgtttttctaacatgtaagtctgataatataaatagttaatgtatatctttagtgctttttaaacactttacattgatttagcgtgtgtgtgtgtgtgtgtgtgtgtgtgtgtatgtgtgtgtgtgtgtgtgtgtatgtgtgtgtgtatgtgtgtgtgtgtgtatgtgtgtgtgtgtgtatgtgtgtgtgtgtgtatgtgtgtgtgtatgtgtgtgtgtgtatgtgtgtgtgtgtatgtgtgtatgtgtgtgtgtgtatgtgtgtgtgtgtgtgtgtatgtgtgtgtgtgtgtatgtgtgtgtgtgtatgtgtgtgtatgtgtgtgtgtgtgtatgtgtgtgtgtgtatgtgtgtgtgtgtgtctgtatgtgtgtgtgtgtgtcttcgtgagcaaggtgctgctgctaacctggtacccgagtttgatactgaaaggaagccctgatccccacaagttttcctgtgatctccacactcacactgtggtgtaggtttgcctcccctttgtaaacaaataattataataacaaactttaaaccttacatttataatgatggcaatacattctttgattactaacgatacttaacgcattaggtaagatattcggagatgccatttttatctttttcttcctcttcctgcttgtggcaggcgtcacagataacctcatcttactgaagcagctattaattagtattagggcagcatacattctccacaaataggcagaaacctgagtaaagttttatcatgcacgggtatcagctggtgaaataatgctgtgatttgtgtcaacaagactttgaattgtgtcatcatggccacataacatgacgtgatgacatttatagtgcctgggagtgatttggagacctataaatgctattcgagctcaggcataacaagccagagccgaatgacttgaggccacgacagatgacctgaagggttttcttccctttaattaaaattacatttagattgatattaaaattacattgatacttacactcataacctaaagtttttctctttaattaaaattacatttatatttaatatgcctattaataaactgatagcagtatgctaagtataaagaacagatataacacatagtgtggatgaatacctgacgtgtactttctgaaaatacattctgacgagaagtaacttagtccttactttgtgatttgtgactaataaaggcacacaccaatgaaatgggctggagtcaataaggttgaattgctattttgttcctttttgaagtcaaggtgcaagacagatactgcttgggatgcccagtgtcattgaattcctgtgcctagaaatgatagcccttctttccgatctctgtgtgccgctgcattgactttctaagtgggttctggggattgggctcattgtctggcttgcccttccacccatggagccagcttcctagttccagcaaagtatggagtttttttttttttgtttgttttttccttcttttattattatggaactttttagtaacagcaattttttttttaaaaatgtcaaggtctgctaattttacctgcctgttaggatggccaaagtcctgcttgaagttttagtacacgtgcacccacataattttcactgatggttcagtacttggcatagtgaaccagaaaaactctggtttgacattgcaatgcttcggtgcgttgggttctgttgagccactgaaagcccttaatcaagcccctccctgcttttgaagtgtgcgtttgttcttcctgaataactaattttggttttaatgtttgagtccctttaactattttctaataatattgctatatttaggaagccgatagaaatcctttaaacgattcgggccagaagacagcttgagtctgtgtgtgaatgggtgatttataggttctctccccacacccccactgcccccaacccgagtatttaaatcatcaagcgttgaagggtattctacccttttctgaagtagtttgattcattgggtccttatttacgggagccagcagacaaccttaaacttccctgttagacagggttcttttcagcatcctttgagggttctcctcttaagagtggagaggaaggactgaggcttactgtgctgtgtgtcgggagtccctctacagacccttccggcttagcagttggggaaagtgacgcagggaatttaagactagcagggaatccaccagacccacttctgcttgtttggttcagactgggaggatattttagagccgtagtggatgtccaacttagatacatttttctgtgagagcgaggaggaggcaatgggagatgtatctgcttctgatgacttcacactaaggacagcgcgcttatggcttttcagttcacagcaacgaccctttacattactcaagaggtccttcggaagttttgatgtctgccctttgctttcctggcccgacctctccctcccctagaacggaaaagcccgtggatgcgctggagcgttccagggtgaaacaagcctccctgcaacttaagattctttatcacccgcgcaggggaattcatttcacgttactggtaccagcagctgcggcgtgctatttcccaatctcagatcttattgatgggtgggaaggagtgcacttgctgtttgagaaattttattatcttttggaaggggaggaatttattccaggggctttcttagatgatctttcatgttaaggcatttgacgtttgaatggccaagctccttagagattgagttggtggcgtctgggggatggtcctgctagctagtggttttgaagttgagacagcacagtgggcactcttaacattgctcaggtcagggctgtggagccagggtgctgtgacttttgcgttgctcaggactgttctggaagatgagtgactgtctcatctcaagtgccaataaccttctttctttcccaaagccttgagaagtgtggcttaattcacaatgctccgtagtgcttacagacaggctgattgcagggtgggagttgcttaatgaaaaactaagcagtgtatgcaagaactccccaaagggagaccaaggctggtgactgactagtagttagatggaaaaggagaaaatatgatataaaagacgatggctttgtctcctcatcccattgcttggcaaagaaaggctacatcccattctgctggcatttatcatggggaagcctatctattactcagacaaatatttaggattttgaagttgagctgaccttcagctgaattctgtgaggatgctgggcaaggtccctaggatatctgttaacagatcccttgcagtaggatctgttaacaattgccatacgaacaaatgttctggatctggccggaggcttttggagggttacaaggtaagacctatctctgctgacagcctgctggggaacatctcattagcctactctctggtccctgctctgcatgagagtctgaggagtctccatggccatggttgggcactagtttaggcttatcttcccagagttttaacatagtcccgaacaggtgaccatgaccactctgccacttacttgatgatgtcccctcccccaccccctttttttgcttgagagagaatctcactatgtagcctaggttggccttctgagtgctggactcatagatgtgcgccatcacttccaacactcctcctgttctctgtccaccacactgtcagaggttccccttgatggaggccttatcactctgccctaatgcatgctaggatctgttgagagtcctaactgggcagttatttttctctttgtggctgtggggaggttggttagtgccgtggaggcttctattaagtaagaatatatccggggctggagagatgactcagtggtgaagagcactgactgctcttccaaaggtcctgaattcaattccctgcaaatctgatgtcctcttctgatgtgtctgaagacagctacaatgtactcatataaataaaataaattcatctttttttaaaaaaagtaagactctatcattcacacagtggggacagtggctatgtatatgtaccaaatgaaaagtagttgctctaggtattgaataacatgtccccaatggtttgtaatctctgaagaagagccctatctcatttcttctataaacactaaaacagtgtttacatataggagccaggaattttattttgtgactttagtgaatttgacatgttcttttgttttcagatttatttttattttatgtgtgtatcatgtgcatgactggtgccagtggaggtcagaagaaggcattgaaccccctggaactggagctactgatggttgtaagccactgtgtggatgctgggaactgaaccccaattttttgcaggagtaataagtacttttaactgctgagccatatccccatgttaaaattaaaagatttcctattttaaattgtgtgtgtgtgtgtgtgtgtttgtgtgtgtgtgtgtgtgtgtgtgtgtatgcatgtacaagagtcatggcacatgctcacaggtcagaagacaacttctaggaatttgttctcttctgctaaggggattgaactcagccatcagctgtctcatcctccccgcctcccgcaacagccattcttttaacctgtatcccttccatggattctcttagaagagcggcaaatgctagtcaatagaacattgtctgaagtcaatacagtggagcaatttctgacccaaattcttcttccccccccccccccagatcctcttaacacatgcttttcctcccaaacactttccccggggaagttgatgtgtctgctctcaatgtgtgcagctaaataaatcacagtgattgctctgccttcgcagaactcagaaccagcgtagagcagttccctaattcattcataagttttgctcacctcttctgtgcttcatttcaaatcccttgacacggagagacatatctgtaatgtttataatgagtgatgattcagtataatttgcaccactgacctacataaaaggtcaggctcctttggagatttaaggttaactgtttataactttgtgctgtttcaatgacagccgaggtaacaaatcatgtggacgatcctgcccagcctagtggcgactggtaaacagtaatgagctccctaacggacctgaagcaaagccacatcctcattttctgtagagcattttagttgcttgcttttcataacagaacaccaaatgggacctgaaattcgtttgtatccttgatctagtctataaactcttgggcttctttttcagagcccgagtatgttaagaaggcatttgcagaagtcagatacttaggaacagagcccatgaaagcaattactgcataatcatgtacaataaccattttaatgcaacctaaaaagaattaggatcaggagctgactggatggttcagtttgagtattgcttcctagcacccgtgatgaacagcacacaaccacctgcaactcaaattccagaggtgcccgggcacctgcacttacacacatatacacgcacacatgccacacacttacatacacacatgcatacagtcatacgcacactcgtaagcgcacattcatgaacacacccacatgtacacactcacatgcacacactcactctgacacatacacatcataaaattaggggaaaaaaaagaatggaaggttagtatcatggtgtcttgtcttttcttccaaaaagaaattcttcatagggtctggagagatggcttagcagtttagaatacacactgctcttgcagaggacttgactctgggccccagagccaacataaggtagctcacaatttccttttactctagctctggagatgtgtatgtttgtatattcctacatgcacatgttgtatatacactcgtgtacacatatatgtaaccatatactcataaacaactgaaaagccacttcttcatagtcttcatttctaatcattccatttgtgtccttttcactttctttagaactttgctaagcagcccaggtctgatactttgcagccctaggccaaccttgaaaacatggtgcagatttcatgagacctggttttgccttttcacccaagagatcctcttgcctcagcctccttagggttggcattacaggcatctgccaccacacctgggttcatttctctaaatttaagattagaaattcccattcattgctctgttactgatttcctgacatgccttcattatcccacagtgcacagcaccctgccagagactgtaaatggcagtggagtggccttctcaatccagtggctttccctagaaaacaatgacttctttcctcctggacatttccttagtccaacactggggcctggaagcttgggattctgccttttaaagaaaactggtcttttgttatgctaatacctttgggctcttagttgtgaaatctatgcccatatttggtttaaatttccaggatgtatcaaaattccttttgaatttcccttagttgcttatgagtgctgcaaaaatttcaaagcttccctaaatcttaccgcaatattagtttccaagtagagtaagtacatgtctgtgtacgggttctgtgggtttcaggccactctgattcacgaactcaataatgctagatagcaagttcagaaaacaaatgaaaaccccacgttcatttttgagtttgaaataattcagtgtgcatgacaagaatgcagaacagtggattgtttactggagtggagatgttaggtttaagcgatttctttatgttatttgctgttgaatgctaagttattggacctctctgtacctgaatttccagcatggtatgtatctcaaggttgctataaggattaatttggggccttttcagggcttgtgagttaaggttgcttcattaatacaagacacataaaaaatacacaggaaccgattgatgttgggggtgcctgagatggtaatcaagacctaatctagacctttccacaagcacctggctttaaaacaacacacattctcttcatagtagaatgaaagacacaacttctgataccagtggaggattttggctgagataccacacagcaatgatctagtgtctgtttgtttttttctggagagatattttcaaacaatggtcatttgagagttataacagacatggaagttcccactgaaaagatgaatttgacaaattatcatggaagtgatgataaactgagtaaactggattttactttagataatggaacaattggagcataaactggaaatcatgacccgtagtttaaatgcaggatttcctatcagtttcaatgtttatgtgtgattttaaataatttacttttaagtattccaaaataatttttatgcctgttttgtatttgtgtgtgtgtgtgtttactttgatattttaacaaaattaaacaaaaccaaacctcagttggcttggcattgaaagcatctcaagaaatagtattaattaggtgtatttttttaaaacaggcaattttctttctgcgacaatataaaactctggtgagattgtcctttacagaggctatgatttttttcaatcaggagtgattaactattaagagacacaagtacattaaacttgcaaatgcattatgttggattactaacaatagacctgattgataaaggtgatttcacatatgttgtgttaatagctgaacctccaaagcccctaatctcccagggaaatactgcttcgtagagcaaaatccaatggggagctctgggattccagagtgaatttgtacattccttaggggcatttctgcaagggaggttgttgtgttttaaaggtagttgataagagacccgcaccaccaaccactaccatgcattaggctgtagaaggtatttgggtgtccgtacgcctgtaccactcggtaccaccattcagccaagggagacttctggccgtttgcagcgtacattataaatcagggtgtcactaccagacaatcagatttgaacattccgggaacaaagtagcttatattccctgggaatagatcacttaactctgtttatatcttgctgttgatatgcctgcattcacataagtcaggataacatcttgtttatttattctaggaggaggtaattgatctctatatttatcgaaggtggggttaattatagccagaaacctgaattgtctcatttagcatgattgcttaaatacagaagaaaaataaaatgatttttccccccaactttgaaaagtactcctattccttgggtttgggaaataaattggaattttctccaagctgggctcaggttgactgccctctttgaaattttttttctatttggcacaaaatttttgggaagctcactggctagctagatattggggaaacttacaggatttctaactgtcagattagtccctgcacagtcaaagtgtcatgcacagtggtttttgtttgtttgtttgttttgtttttgtcttttgtttttaaatgaaatgaatttaagtcatatcccctttacaatttctctgccacttgggtttggggccagatttgtaccctctggttgcaaaaaacatctttgtcagacttgacaatatacacactagttttaagtttctggttaacgtttgcttctgtgtcttaattaaatatatattttcatggattcttaacatatcaaggcatagatgtaagaaagtaccgattttcttattattggataggaacattgtagtttattatgagtaatgttgtgatgaaaacatttcaaatcttgatgaatatttgttctttgatcagttccttaggaaaaggagatgtgaaagtcccaaatctctctcctgagtgctgggattaaaggcatgtgccaccatgcctggcagagtaaacatttttaaggagcaaggtacaagtgtcaaattgcttcctggacaggtcatgtcaaggtgtactctaatcaactgtgtaggaaaatagccttcttgcagacatccaaacaaacgtcttctatgttatcagcgtgaaattgctttaccaattttacacataatttgcattcttttgcttctaaatagttgaatattttttttctttcatccctaacttgtattccgttcatacaatatcttgtttttcttttatctttgagaacagtagttctctctctctctcttttttaagatttatttattattttaagatttatttattataagtacactgcagctgtcttcagatgcaccagaagagggtatcagatctcattacagatggttgttagacaccatgtggttgctgggatttgaactcaggaccttcagaagagcagtcggtgctcttaaccactgagccatctcttcagcccttgtttttcttttattgagaatatttttctcacattctgatcatggtctcccctgtccacctcacctctggtcatgacgtatcttaaaagtttgttgttgttgtttgagatatgctctcaaaatagcttaagttttgaaacaatgatgtctgtttctctgttactacagaatgtggcagtgggaattttcgctgtgacaacggatactgtatccctgcatcctggaggtgtgatgggaccagagactgtttggatgacactgatgaaattggctgtcgtaagtgactaggagccaggcttggttgtgtgctctgagtgtctcagctgtaatgagagaagggctgtgctttggtgtcagatccagggctgggctgaggtttacacagagggacagcctctttgtatataaaaaaaagatgtagagtaacctgtgaaccaccacaaagaacgtcacagtggctagtttggtcttatgctattaaaaatctagataaagcaacataatattttaaacttgaatttacttatctatggacttttaaatcattttgacacatttcttcatatagctctcagcaataatgctataataatgccagaatattctgcatagattccagattaggaaacagtctcagtagttgagtcacttacaggtgacatggccgctcctctcaagccacttacctcaactctaaccctctagtcctttgctctgactcgtcaccagtgatgagtcactaggctgtgaagtccttcattctgacaggtcaacagatgagggttatcatcccagtcaggaaggcagcagacaacatgagtgtttgaccactccatgcacagctgagcagctgtcacgctccagtgatgcattcgaaatgggaatgaaggaaagaaatatgtctggggcctctcacacttacacatacacatagatcttgcagaaccacaagatgccactccatggctgggggcggagcctgataggttgtgcattcctactagtccctaattgatcaggtgatactttattttcagctatgattttggcatatgatatcgtaggacatgatcatatgatattaattcactctgattcctgggattttactgtttaagaaatgggggtgggagtggggagggggcagaatgtgcaaatggtattctaggatgcgggcatgcacagacagtctccaggtcttcagacatttcggtgccctacgactatgacctcaatagtgcctgtggcaatgagagttagcattacatggctcttttacacacattatttttttcacttttaggatgcagacattaaggctcagaactcaccaaaattcctaaaacaagtaaatgtggaaagaatcatttcattcttggtttctctctctcttcaaatttcacctattgttcatcaactgtgacactttacgcttagatgctagaaatctagcaaaaaacactagttaattttttttttttgttttacatagattagatttttgcgacttctgttagatgagtgtgcatgtgtgcttacttaagtctctctttgagattacctgtttggatgccatcgctgggatgatctaacaactgtgcccagcaagcactgctgttactgtatcaagcagttggcctgcataagcccctcccctctttatggttttgtttcagctcccaggtcctgcggttcaggctttttcctgtgtcctgccgaaggcacctgcatccctagctcctgggtgtgtgaccaggataaggattgttccgatggtgcagatgaacagcaaaattgccgtaagtggttttagagaaagggttttttcttcttctccttctcctcctcctccttctttcttcctcttcctcttcctcttcctcttcctcttcttcttccatctccagttagtgtgctgtatacaggtgacacacagagagctgatttttcatcaccaaggctctggaacttaaactatctagtgatatgctggtaatctcatcctgctaatctggttcagaggccgggtcatataaagtgtgtctatacaacagacttagacccctgaagcttggaactggttagcttgtcaggccttaatttgaagtataaaattaaaatagtggtagtgagcaagccccatctcaggatggtcctgctattctttgctctgtgggctgatgaggactcaaagctatgcttaggtcccagatctttctttttgcctgtattttatattaaaatagatttctgtttgcggcaggaaatatgttatccacaagcaccaaaagaaatcatgttcccactggaacctgccctgggaacatggaagttatttctgattgattcttccctctctttcattggccacactaatttaccatttcccacctgacttgtcccagaatctttcttaggctcagaaatcccttccatccctcctctcattctgtgcttggcacctgagctgtctgctgctagacactgctgccgagatccagttagaccgtgtgcctgcacataccttaagcagaggtgtgaggactgctgtgagcttgaggccattgggctacataatgctttctaggcctgccagggtgacagagtgaaatactgtctaaaaaccgaaatgacaatagccaaattaaataccttactaaaccccttttcgagccatgatttggtttccagttgcctcatggagatagcaatgatgcttccatgccttccttcctggtccttaaattgttcttggggcagaaagcttgctgttcccagtcatagccttctgtctttatgcatgctatctaggtgttcattgtcttttgtccagttgtgtcagctagatgctcgcccacagctccctgtctattctcctcctatgtgagaggaagttgcctttgccctccttctcaccgcacacccttatttcccgttccctgcaaagttactgaggctggtctggaactttgatcctcttgcctctaccttgcccttccatgttctggctgtacagtcatgcctattactccttcccatgacaccaggactctatttcctgcgtgtctgggagccactgctgccctttccttttttaaaggtatttattcacttatgtgtatgtgtgtttacctgcatgagtttatgtgcaccgtgtccatgcagaagcccaagaagaccagaagagggcattggatcctggggaacaggagtcatgggtggtcgtgggccatcatgtgggtgctggaaattgacccctggactttttgacagaggaacaagtgctcttagccactgaactatttctccacccctatacttaccagtctttggttaacgcccatatcttattcaccctcttttatacaccttttaaatttctgtagtgctcaacacatgttaataactacagtacaaaatacctttgcttttgcatatgtccctgtgaagtatacatccaatagatgcttgtttttgtcttcccctccagtatcattattcatatttggtaaacatcaatggctactctatgtttggtaataactgtaaacaaagttctctgttcttcgcagctgggaccacgtgctcaagccagcagctgacgtgctccaatggtcagtgtgttcccatcgagtacaggtgtgaccatgtcagtgactgccccgatggctctgacgagagaaactgctgtgagtctgctttgcccagtgcttgctttcacctttggcatcttaatcaacttgctaggtttgctgatggacagaaatgcctacaatacgcctcttgttgagagctcttggcagattcttttgtggattaggggtgatggtctgatggcagttctcttttaacaaggcatcctgtttttcctgtcttagcatgtcaggtttttttgaagtaagaaactttaaaacattagcagaattccccaagcttattgaatcattgagcacagcatccatttttggtcaaaatctatagtttttatatttaattgctttggtcaagtttcgaggtaaaatttcgtagtttttttttttttttctctttttgtggactctgtacgttccagaaaatactttggaaaatagttacattttgaaaatgtatctctgtataatggcagttacttagatcagtttgtaatggattgacacaaaataggacatataaatcatggtattctctgcacaatgtaaataataacagtcaaaacagaaactgccgcattgtatactatgaaaaaggcagagaggtttatacaaaaccggtaggcactgggtgtaacgggaggcagaaacaatcaggtctttatgagttccgggcctgccaccgtgtctatacagcaagttctaggctggccagggttatgcagtgagacataacctgtataagacacagaagtttgggctggggctgcgactctgttggttgagtggctgtcaggtagcatgacctggattggatccccagcttcgaatacaccaggtgtgatggtccacccctgtaatcctagcgtggagacaggaggataaggaatgccatgctgtttctttttactttggatgttatgcatctaagtgactggacactggcaattttagagatgataaggccttggtattttgtgaagcaagcaataggttctttaccacacaatggtgatatatggcatattgtcgcattttgtgaattctgatcattataattccagctattaggacaacaggacaggtgaaatagtcttctccaaataaaagaactaaaacttcaaagggtctaggggctgttctaggtctcagtttgtcttccggttcagcctggccactaccaggagaaagggccatctttcacagagagctccagggctttgtgtcaccagcactcggactgtgtccttttcctttatctacaaatgtgtaaaaatggtgcttcatgccaaatgtaggaaaggaatgctactttgagagagtgaaaggcagctgagagtctggagcatttccgtgtgagcaccctccagccaaggcagggtcagctagcacaactgcattggatcttccaggggttggtgatggtgggggtcgggaggaaacatggtaggatatgaggatgatgagcagccacaataagagagggaaggggagggactacacacacacacacacacacacacacacacacacacacacacacacgagtatggggaggtgagttctctccatgtgggttctggagattgaactcaggtcgttaggcttggcaacaagtgcctgtgtctactgattaaggtctcaccagaccttaatcaacctttgagatgcagatttttctctcagtgcaagggcttggtgagggaaggagagagatccagagtcaagatccctgttcctggaatgagacagtgccaggagctcttcagtgcacgcacacaaaagccttaagcaaacctcacatatttaaggagatttgcaatgactcctctgttaaatcgtatttgcttttatgtattagattctcccagatgaggaagttaggaaccttcacacttcctccttagtgctctcatctgctgtggggctggaacgatggcgccctctgctcccagcacccatttcagacagttcacaactgcctgtaaatccagcaccagggggtgtggtgcctccggcctagtgggcatatacacgtgcatatacaccctcgaagacacacgtgcataccacgttaaacatctttgaaaaacgtttaggaaagtgccagtgtgggtgtgtatgggaaccacaagagttcgaatctcttcagagaaggagctggtattcaccagctacccggcaggcaatcaccgtacagcagtgtaataagcacccttgttccacatggaatctaaaggcagggtcaggattccaatccacagcccaacagcaagggcacgcatgtctcatgcatcccagactggcctcaatcttactgtgaccttgaactccgagtcttccaaagtgctggggttataaacatactaccgtccttaatttatgccttgtattaggaatgaaagtttataaaaatttattggcttgaagtgtatgtagctatatatttttttccttttcctttttttccccttgagatgaggtctcactatgtagctctgctgtcccaagttcatagaaatctacgtgcctctgcctcctgagtactgggattaaaagctaccacacctggctgatagtttgcattttgaaatgttactctttatggctgcttttttttactgtggaagttttttttttttttttaatttcagttaaacaccctacacataaataaacaaaactcagaagaaggagggggaatggggaaaagggaagggagggggaggaagaggaggaagtccttcctgttagttgtcctagaattttctagtctggttttgattctttgcattcttcacctctttttttttttttttttaagatttatttattattatatataagtacgctgtagctgtcttcagacatcctagaacagggtatcagatctcattacagatggttgtgagccatcatgtggttgctgggatttaaactcagaaccttcagaagagcagtcagtgctcttaactgctgagccatctctccagccccatcctttacctctttgtccttcaccacggttttgtttttttttgttttgttttgttttctgtctcctagaaattagctgtatctaatgttgccaactctggcttcagtgacaccaagacttgagatttctagactgttctatgcactgcaggaaatgtctattagatgccaggagtgtatccccaacaggacatctcaaatgtctcctggagcaaagccaccctcttgctgctctagttgaaaattgactgataggcagaatgaatcgatgcctggaccttcaggaagggagtgttacagcaaagcgacagtcctctgtagagagtgctgtgtgccaagctgtctctatgcctgtgatgtccgtgctggtgagatccatttcatcagattcttagctgtcttaaacatgagtttggatgcatagcagccgctagttgcgttagtgttcttatgtgatcaggggttaagccagacacattttctcttgttgagttcttctgccccggagtcattgcttgtggacaaacccaacacaagcgtatgagatgacttttgttcctcttttcgtagcaataagaaactgggtcttgagctgtcagatacctagaaatcactcacagatagcaatggatgtaggaagagccccagagaatttattttcccaacatctgaagcccaaggagcttggctctgttatttgtagctctgccagagagaccagacctctgtgtcatgatccctagcctttcaagtttctaaggccgacacgttgccctccgagacagaacaccttgtatccattccaggaattcctttccggaaggaggagtgatgtgcagggatatgtcttctctagagaaggcgaggatggttgggaggaaggcaaagcagttaaggtcccaataactggatcatctgaagagtcaactaagagataggcattggagagacagacatgtttgtgaccccagagctacagaggctgaggcaggaggacctctagttggaggccggctgggcctcctgcacgccccctccctaccaatataaatttcctatgacataagatctacttaacgcctctggcctttttgcctgctctattgtcatatgccttaggtccttttgattattctgtacattgaagaatatgtctacctatgttaaaagctttgaaatagttatagcccccctccccaccacacacactggtgttttattactcatctgtaaaatggcatctaatattaaacagcttgcctctttctttctttctttctttctttctttctttctttctttctttctttctttctttctttctttttttttctaaagaaaccagaaagactgaaaactgcagtccattttacttgtaatgggattagcatcaagcaaaaccactcatgcagagtcttagataaacatcagaacaatgcaccaattatgggccattcatttaatatactgaagtgacttttgcttgctcaaaaaatagtagctgttttcagggaggtaaaaaaaagattattttttgttttattgagcaccagataggaacgattctggtgtgagtaaaactatcgctaattatcgtgggtttgcagccctctcttttgttacttaggaatgctaaagaaagggtaaaatccgcgttacaatggaggctttcttgctcttaagcagaggtatttggtctgcctgctaccggggttgctttgtccctgacagttcatttctattgactttctgttcagaatttaaacatttttctaactgcggaatctccagctggggccgcagttggaaggagtaaggaagacagtttgagtcactctggaccgcgagaagaacgcactgttcctgagcctcagttcacaataggccgcccgataagtctcgctcaggtgaccctggcacacatatcacagtacagttggacctgcttagtattctcacgacaagcctgaaatctgagggaaaaaagagagaaaaaaataaatctcttatttagtctacttcaaataagaactttataaatatctctaatctttataaaaattctaaaatcacagttagctattgcccaatttctctatcccctgtcacaacaaagcccccccctcacacacacacacacacacacacacacacacacacacacacacacacatcactgtatagccctacttgcttgtagccaatccaacttcctggaacactcttgtcaatacccccagtcaacaacattttgttacacttagtagttcttgttcaaatcttatcttattaaggagttattgttatcttaccctgctctttttttgtaattttttttgtgtgtgtacacatgtacattgctctatttattctggataacatttgtgttggtgtctgtcattccactgcctcaaacagaatgagaattccacaatagcagggactttatttacacagctctatctaaagtgccttgatacttgtgatatggaaggattattatttattatattagttttacaattctgaggcacagctggccactgaaaatggccatgaggaggagctaggaacagggccgaggtgttggttagctctgacaacacacagccccataactcctatattggaacactgccactaaatatggcgtctgttaacagttgtgcacgtgtcctatgaaggcattttgttctgcactctgggccattttactcttgtattagagtttgtgttgcaggtttgtttgcgtgtaggtggaaggagggagggcttcttctcaggcacatttctgagtttaatctcaggtcagtgcacactagatggtgtgcttctaaatgctaggttggggttgggggcttttaaccttgctttacatatcaaactgacatctttatagaatatgctatgtggctaaagactgtggagttggcctcaactttctgggaagttgagagaaagaagcttcattggcatgagttgttttctttccatttcctccctccctccctccctccctccctccctccctccctccctccctccctccctccctccctttggtctgcctcactctgtagcccaggctaatctggaattcactttgtagctcagactggccttgaacttgcatcctgctgagtattgggatttgaatttttctccattgccactccattcatgatctttctttggtaatttttctttttcgcccatttacttggaagccttgtgaaccagactgtctgaatttgaattcaggctctccagtttaccaattatgtgacattcctcaacttcttgggtgcttcaggctcctcatctataaagtggaaacagatgttcacctcatgtggatgggaaaaaaaatccatgtatattgaatatattacctgtttctgggacgtagttttcaatatattgttgttgatgatgatatttgcttatttagctttatgggttgagttcctgacggagtgctggatttactagtcaaactggtaaacttcttttggtaaatcattattacatcccttggatcagcctgtttgagagcagagtacaagacattaagtaaaagaatgactgtaagatcttggaagagccaggtatctgtgcttgtgtatcagtaacttcttatctgctctgtctgtgatctcgggctttagtgtgctctctcccttcctttctcttctcttctcttctcttctcttctcttctcttctcttctcttctcttctcttctcttctcttctctcctctcctctcctctcctctcctctcctctcctctcctctcctctcctctcctctcctctcctctcctcccctcccctcccctgccctcccctcctctcccctcccctcaccccctttctcctctcctcccctcccttcccctcccctctcctctccccctttcccctcttcccctttcccctctcccccctcccctctcccccctctcccttcaccctctcccctcttccctctcccctctctcctctctctcctctctctcctctctcccctcccctcccctccttccctcttctccttttttttttctttctctatctgtaaccctggctgtcctagaactctgtagacctacagaactctgagctgctgccttctgagtgctgggattaaaggatgggtcaccatttctcaatgagcaatgggaaattagttttcttggtatgcactgaagatgccttctttttataattagtttgctctactgtcatccctctacctctccctcccttcctttccttccttttcttcctttcttcttcccacagggtctctgtgccttggctggcctgaaattcgctatgtggatcatgctggccttaactcccctacctgcctctgcctcccagaccccggggtctaaagtcctgtgcactcttctgttttgatagagttctgacactgaagactggagacttagagctgtgtcttctggggggggggggttgtaaatgactccattcttagaggttcaggtactcggctctgttcagatgacttcctccttggttcttgttttgtttgggggaaggctcactttactttttagtcctggctgtcctgcatctcactaagtagaccaagctggcctcctagatctgccatcctctgggtgccatagagcctggacccagtccttgattatgtaatagaataatagcatgaaagtttcttgcacaaaaccaagtcattaaaaagggagcagagtgttgtgtgtgtatattttgtgacatatcaatttgtgagaacaactcactccattggaacaggagggaacagaaggagcagtgtgtagtgtgaggaagtgtgacaattttatcttagttgagtggcccctgaacaaggctcaggatgaagctgattctctgagttgttttttgctccctcaaatttcactttctctgcttgacaattctgcaagacacctcggtcattgggtggctttgctctgtggataaaacaatggaaggttaggtgaaggcttgccaaatgtattgcccaatgggaaactcacctgattatgacttcctgccctgagattagcttgaaagtctttaacattttcggcaagggaaatttggaactgtttcttttgggtgaatatctgaacagggatgcaccacaagctatctacacgcaaaaaaggccagaaggtttgtagggtttggagttgagatttgccatcttttgtttgagagagattcattatcagcgtagatggagacaatagccgtttgctcctcattgggagagctgacccctggccatcctgataccaccctgatgatatcaagctggccctgtttgctgctgggaaaagagccttgtcagtggatactgatttaactcttaagttttatggttggcgaaaacaagagaccgcccagcatgttgattaccgatccttcctagctataacagccaccttaaatgtggtagccacagaccaaacccaaataaattttcaccgacaggtggcttatgtgtggcagagggatgactttcttggcttgatgctgctctcagaaggttagataagaagttggctcctggaactatctggcacatgctgtggggtgggtgagggagtaaggagctcacctggccttgtacatctctggaaggcagaattaataaacgagttgtgtgacccattaaaggcacttttgcaaagcacagcatccccataacgaaaggagaacactgatctaaggatgaattcaatttggggctattgtaaaataaagttcggaacaaatttaaatttttagtgagatattttaaaacgccccgtcttttggtgcttcaccttacagttttcagaagtagaagctcccagagaaggagcagacagtgtcacctgacagcctaaccacactacttttcctggttcttcagcattcttttggacaagggtccagcatcttcttcaacctctttttactgtttattttttttaaatttatttttattgtatgtgcattggtgtttgccagcatgtatgtctgcgttgaggctattcgatcccctgcaactggagttccagacagttgtgagctgccatgtgggttttgagttggtgttgggtattgagaatagccagtgctctttaactgtggagccatcttcccattctcccaatccccttctgtttgtttgctcttagaatactttttcaaagcaatatgctcacacattgtgtgctggacatgaccagattgagtcgtgggtactttggcctttgttccaccaatatgctaattctggtaacatactggtggaccacactttaaagttaagagtttggatccttctagctcctgggccccaagattccagttacataggtgccaggtacacacagaagtcaccaagacacctgttgcatatgggggagggagatctttgtttttacaaaggcttcctttcctagtcttccctagagcacaagaagtatgccctgtggctatccatcccccgtgactgtccatttcccatatagagtatgaagggcatgctcattcatgtcagtgagctgctggcacctaggacacgttcattttatgttgaagccactaaggtccctagtgaagagccttctgttgaagtcatgtgactgagtggctgcatgtaactttggaaatttaaaaatataacgacactggtgactcacttttgaatttctggaaactgaggatgtaggcttatttttactatagataacagggagaaggttatttgagaggttatttttaacactggggcaaggtgaatgcagtttagcaaggattctggacctagcttttgcttgataggactatccaggaattatatggcatacatttattaagatttatatatatatatatatatatatatatatatatatatatatatatatatatatatatatatatatatgagtacactgttactgtcttcagaaacaccagaagagggcatcagatccattacagatggttgtgagccaccatgtggttgctgggaattgaactcaggacctcttgaagatcagtcagtgctcttaactgctgagccatctctccagaccctatatggcatatcttaataagcttgtaaaacctgaagttgggttcttcagtgcaattttagcttcaggttagggaggtgctatcctcactttgagatttgccttggttaaaattagatccaaagacaaccagagaatcaccaggaaaataatcctcaatgagaaagacaatcagaccaaggaggagatcacactgatgtgaaggactatatatatataaaaaaaaactattaagtacgaagtgacgccacatgcctataatcccaacactagggcagctgaagcaggagggtcctgagttgaggacaggctagcctgggctacatagcaagactctaccacaaaatgaaacaaagagtaacaaagtaaagcagaaacaaaacaacatttaactccatagctgcctatggtagctcaatagcaatagtgaccagttctttctccttctttcctccttcacttcccagaacatgtataacagttcatgagtttctagaatgtgatttgtattgtagaggaggaagttccattttgagtcatcatatgttttctaattcttcagctttcatctcaaaagctacctctttagggagctatctctctgctcccatatcttcctatggtgacttttttttggaaatttccatattcgcgtgtcattatttgattgatgcatccctcactctgtctccgggaggtcaggggtcatctcctagtcagtgcctagcatatggcagtgtctcaggaaatgttcactaaaaggatgcttttatttaaggtttgcttgctattttttttttccttaaacagattatccaacatgtgatcaacttacttgtgccaacggagcctgctataacacgagtcagaagtgtgaccacaaagttgactgcagggactcctctgacgaagctaactgcagtaagtcacgtcctttaaaggggtggtggcaagttgaggctggcttatgctgacttgagagggacaagagtaaccatctcttcccaagccctcgtccactgaatccatattagttgtttggaatcagccaccactgggaatattgacaccatggattttagtagaagctacatcctgagccctttctattccccaaggactggttctatcagtaccccactgcctagtaagtcaggtagggtcttctggtaaaattaagtggtgacaactcaactgaaatgatctatctcattttctctctcgtttcaacctcgtgtcccagctacgctgtgttcgcaaaaagaattccaatgtggcagtggagagtgcatccttcgtgcctatgtctgtgaccatgacaatgactgtgaagataacagcgatgagcacaattgcagtacggtgatttttctcttatgctgggtcatgtgataagatgtgataagggaggggtactttcctctcccttatactaacataccacttttttttttttttttttgtctcaaagaagtttctgtttggcagaagaagccaaaagttaatggaggagctactgctccaagcttattagtattgtgtgacctgcatccccttatccttatcctctagggatcatagtagaagtgaagagttgtcagcttgcattcttccctacatcctttgtgacagtgtcacaatatgtcacaggactctgatcttttaattttttaattttttttttttatttttgggttttcgaggcaggatttccttgtgtcgttctggctgtcctggaactcactctgcctggccttgaactcagagatctaccctcctctgcctcccgaatgctgagattaaaggtgttgcccactaccacacagtggagactctgatcttgacagtagctccaatttctgctttgattgactgatgcctcatctctctgtttttctgggagctaggtcttagaacctgggcattatttcagtgagtgaaataaaaagatggaggcatcatggagtgggtgactaggagtgttttggtgcagatgagagttacaatgcttctttttcctcctttttctcttccttctctcctcctcttccttttcttcttcacgtttgtcaagatactaatgctccaaccgatgcagatgcttcagttcccaggatgcagtgcaggcaggatgaacactttgattcccgcccccacccccaaccccacccccacccccagactgtgcctttgcagtgctcatgttgcatgcaattttaaaaacctgcttgctcgctctctttcttgagagctctttccaccctccccgctaggccctgtgatcagcagaccccagcctcactcagctctgccaattgccagctgatgttttttccttgaaagctgggagctgcattgctctccgtcagccaacaacaccctgcagctagctgcagccaatgaccgccccggctgtgccctttctcctgcccaccttagtcaccggggatggaaaacacgagacagccttaacattttaaaactagctagataactcaatggttgtgaagaatacccagtcccatccttcttggcctccacctccaccaccggcagaggccccaggacctacatgactgttgcttcctccactatactgcccgctctgaatcctcattcgcatcgcctttcttctatctccccagggaccaggaagccccacctttccactttgtccagagactggactccttccttttttattgacacaaccaagaagcaattagggaaacaatacctgcacctacagtgctctgttgctctcttccagactatgacacctgcggaggccaccagttcacttgctccaatggccagtgcattaaccagaactgggtttgtgatggggacgatgattgccaggattctggtgatgaggatggctgtggtaaggaccagaggagatgcctacctagaatcatattcctcccttagagattagaacccagatgtaacaacgtcagttaaccctctccttcctgtcattgaggaacttgccttattattttttcttttttaaagatttatttgcttaaagtatatgagtgctctgtcttcctgtacatctgcctgacagaagagggcatcctattatagatggttgtgagccatcagtcggttcctgggaattgaactcacaacctctgaagagcagccattgagccattgctccagctccacttttcttttttcttcaagactacttgtttttgttttttgttttttgttttttttgatattaaagtcataaaccaggggaaagagggaaaaggcagtatgagagcctttaaaaatgcctaggcctgtggtagtctgtgagtttcgattttgagtcactgaaggctgggaacatgaggatggaactcaggatgggcaggtgcacgtggcttcctatccaaggagagtcttcattcgagaaggatattgtccttagtatgccttctgccactgtcactagcagtccctataatttttcgatgtccactatatacagcaggtgcctctcacggctccagttccagacagaaggctgactcttattccgttggttttaggttttggtattcccgaggaacaccacttttgagttataactttcctttgattatcaatgtttgttggcagccacattcagaaagtgtgccatgttaatagttgcatttgatcaaaggctggtggtagcctttattttaacagataggttgtttggatttttgtttctcatctggtccatgtcttctcttaactatggattttattaggagtgttaaatctttagggtggcccataactctctctttccttccctttcagaaagtaaccaacgtcatcatacatgttacccaagagaatgggcgtgtcctgggtctggacgatgcatctcaatggataaagtttgtgatggagttcccgactgtccagaaggagaggatgagaacaatgccacaagtggacgatactgtggtgagtgtgggagctgtatatggctcacttcctgataagaaggtttctagaccagactctcaaatgcagagaatatcagctgacatttccacaacaaaatagctcggttcagtcacttcattgacatttattatgtctcatggcagttcttgcctataccagcccactgtctaacccacacttggtttcacaatggtggagagtagaccctatcatttgaacaattttaagtctctgcaagccatgtttgctaaggtattgaccacattcaggtgaggccagagtggaacaaaagtatatgccaacaaggaaagttttttttttttttgagacagggattctctgtgtagctttggttgtcctggaactcactttgtagaccaggctggcctcgaactcagagatccgcctgcctctgcttctgcctctgcctcccaagtgctgggattaaaggtgtatgccaccacgcctggctggaagttgttttaataacaagtatgatgactttaacatgggagcatctcatcttgtgatactagggctcagacataaagaattatgggaattatgccctacccattgaacttgttacatacgtttgatatcttatcttatcctggtcttatttagatattctaagacaagcttctgattcctagggtgtgtaagttgtcttctagcggttcttaggataggtaatgaactgaattggccatttggtatctaagcaccatttttgtctctctccccctaagtcaatccagttctgagaacatctcacatctcaaaggggacaattttgaacttgatctcatcatttcgacactaactcagttggtgattgcacagatgagcacatgtccttctaactccaaggatcccctgaccccaatacttgtcatatctaaaagtctttccattcagcttagaagatttagtataaaagcttcagaataaacaaatgatatgtaatcagtggccaaagttttgagaagagatattaacaggaaaaacaaacaaaactaatctcctgaaagcctactattgcaagccagccacagtcagagctaccaaagcttatgacctgatttttcatgaatggagttaacagccttttatgtctacaggtaacagtagctgtaatatgaaaagaaaaagaggtttaagaaacacaaagcatttgctacgtggtattgcaggaggtggcaggctctcctgctgtattgcatgctcattgttttttttttttttttttttttttttctgtttggaagttactaggtaaactagtcttgtccagagccatccagttagcagtttctttccttctgtttaggtacgggtctctgctctatcttaaactgtgagtaccaatgccatcagacgccatatggaggagaatgcttctgcccgccaggtcatattatcaacagcaatgacagccgtacttgcattggtaagtgtcagcttggaaggccaagggtccccctcccacagttcctcatcccattcttccttccccttgccgttgagggggtgctctcccccactagacctcccccttccctggggcctcaagcctcttgagggttaagtgcatcttctctgccactgaggcaagaccaggcagacttctgctatatatgtgctgggggtggggggtggggggctggggtggggtaggggctcagactagcctgtgtgtgctgcctggttggtggctcagtctctgggagctccctggcatctgggttagttgagacgctggtcttcctcctctggggtctccctccccttcagcttcttcagtccttccctaatccaaccataagggtccctgaattcagtggttggatataagtgtctgcatctgtttcagctgctcgtagggcctctcagaggacagccatgccaggctcccatctgtaagcatatcatatgattagtaatcgtgtcaggccttggtccccccccccccccatgagatggataccaagttaggccagtcattggactgcctttccttctgtctcttctccagttgtagttcttttagacaggaacagttctgggtcagtatatgttttgttttttagttagcataaacagtgtggggttgtagtgcatcattttcagataaaatgtttcagataaaactttcttagtgttaccaagaactataatagcagggtttgcgtgctgttttttttaaaagatttatttattattattatatctaagtacactgtagctgtcttcagacgcaccagagaggccatcagatctcattacagatggttgtgagctaccatgtggttactgggatttgaactcaggaccttcggaagagcagttggtgctcttaaccactgggccatctctccagctccgagtgctgtctttttatattcagtaaaataatccaaagaagttattcttgtgataaccgaaggaatgcagtgtttttttgtttttttttgtttttttttctgttcccacccccacccttttgatcctcttctttgcctctgcttaccaagttcaatatcaggtctatatcctaaggtatgcctatggcctaactgtctctcttaagtgactatattacttaagtcttccggtgtctcacacctgcaatcctagtatttgggaaagggaggcaaggagatctggacttggctgcatagtgagtttgaggctaccctggtctacagaaaactctgtggctcatgccgagagaccgagaaaagtctaaagtattataatcaaccatccaggtttctaatactgtgaagacattttgtaggtgaactattctttgagacagtgatgttttcccgttcattctcattgcactggggtgcagtcaaggattgaacagcccacacaggagcatcctcattggtctggctggtgggctgctcctgtaactctggaagccctgcccatccatgtctcctggcatccctctgtgagtggcattccgttttcttgggggcggtgctcatttgtggggtgagactgcccctttgtctttggcaagggtcaggcgtctctgctcccaggctgccagtgcactgccagtcccatctccaggctttcccttctaggcagttcccttttctctcagtagcaaaggaattccaagagaaataccagaaaccactctctcagtattacatcagctctcctttttttctttcacaatccctaaagcttgccatggggtgaggactgtggggggtggggattgtaggggatggagattgtgggtgggggtggggattgtggggggtagggattttaggggttgtggggattggtattgtgtgtgtggtgggtgggagttggggggtggggatgaggattgtggggggtagggattgtagggggtgggggtcgtggggatggggttgtggggggtagggattgtggaaggtgggggatggggattgcatggtttaggggttgctggggtgagggttgtgggatggtaaggggggtggggactgtagggggtaggggttgggggttggagtgccagctgtcttgcagtggaaacttgataagccttgatgtcttttcagcaagagtgacttgcttttacagtgtgccctgtcctgtgctgcccataacctgttcctctgcctcttctccccttcaacgtagcacatttcctgtcctcccattatacaaccctgagctctgtgaggcttgtctctacaggagctccttaaacgcaagagactcgcatcgcttctgtttctaactggcaaggtgttttgaggtctgtagttttacacgtagcctgataataatgtgatgcgggaaaaccagacttatcaagctgccaggtgtttgtttttagggcttacccaacacttttagttagatgcacaatgggaaccgcaatggctgaccagtggcagatgagagttttaaatttcagcgaatacccttcagtcgccccacccccaccccacccccaggctctttctgggacattcatacagacagccccacttagagataagctcaaacgtctacatttgagggcctttgtgactggaaggccccctgccacctgcagaggcctcttctgtgaccttccctgtcaaaaattctcgaatgcatggtttatttttgaggctgtttgtgtcaaagatgactttttatcggtgtgaagagaaactctatttaaatcaaatacaggacgttatgaagccagatctgcgctcctttaagctgagctgggagttcaggagaattgttttggtttcttctctgaagcatttcaactcagtaaatcctctgcagggtcttcaccctctgcatggctgactcggtagacttgaggtgtggggtgccttcttccacgggtctctccactgtacgattcggtggtaaatcaagaatagagccgagtaatctctacatgggatctggtgtctttccaccattcattggcccttggtagttctgacctggcagtggagtttctgtggcatgcaggaacagtttcctgggctcattgtttctgactgacaagacaggctggctgtttgttgacagagtgacattgtgctgctgaggtcagggcagggaggccattcagcacgcagggtttcacacagccaggcagaggtatcttaggtgatcttagcccaaaagtagggcttgaattttgtcaaagcagtatttgttggtactggagttgggcagagaataagaaagggagggatagacatagatcgatgtggagggaccatgcatgggctaggattcatttcgagccgtttccacggcgttcctagtttcgtgaaagtaactgctctacttttgtttccgtattttattcgactgatgatagatgtttaattagtcttcatttttcacagttagggatctaaatagcacataggtaaataggtaaataaggacttacatggtataatgaaagcaccaactcagaagttgtcccctaactttcacacacataccctggaatgcatgtaaacacacacacacacacacacacacacacacacacacacacttaataaaaattaggtggtatctgctcatagtgacactctttaatgccagcagaggaatttcaaggctaggatagccaggtctacatagagactttatttatttatttttaatttttttattaggtattttcctcatttacatttccaatgctatcccaaaagtcccccataccctccccctcactcccctacccaccctctcccacttcttggccctggcgttcccttatactgaggcatataaagtttgcacgaccaatgggcctctctttccattgatggccggctaggccatcttctgatacatatgcagctagagacacgagctccggggggtactggttagttcatattgttgttccacctatagggttgcagatccatttagctccttggatactttctctagctcctccattggaggccctgtgatccatccaatagctgactgtgagcatccacttctgtgtttgctaggccctggcatagtctcacaagagacagctatatcagggtcctttcagcaatcttgctagtgtatgcaatggtgtctgtgtttggaggctgattatgggatggattccaggatatggtggtctctagatgttccatccttttgtctcagctccaaactttgtctctgtaactccttccatgggtgttttgttcccaattctaaggggcaaagtgtccacactttggtcttcattcttcttgagtctcatgtgctttgtatcttgtatcttgggtatgctaagtttctgggctaatatccacttatcagtgagtacatatcatgtgagttcttttgtgattgggttacctcattcaggattatgccctccaggtcaatctatttgcctaggaatttcataaattcattctttttaatagctgagtagtactccattgtgcaaatataccacattttctgtatccctctgttgaggggcatctgggttcttttcagcttctggctattataaataaggctgctatcaacatagtggagcatgtgtctttcttagcacttggaacatcttctggatatatgcccaggagaggtattgcaggatcctccggtagtactatgtccaattttctgaggaaccaccagactgatttccagagtggttgtacaagcttgcagtcccaccagcaatggaggactgttcctttttctccatcctcgccagcatctgctgtcacctgaatttttgatcttagtcattctgactggtgtgagatggaatctcagggctgctttgatttgcatttccctgaaacaaacaaatagatagggattataatcaatacactttcctaatgccagaggcttagctggctgttcacagttagatagggagaggtcagggatatgaagagtatttaaatgtggtagtagttgaccaaggactggaccatttgagcatccttcaaactttataattgtgaagaaagtctcttgtaatgttgtatgtgtcatttacattagaattccttgtcctttgtgtgtgagatgtgtatctcttttatgtaagggacgttcagccttttaaatgcatgagtaatttaggaataaacaagataattttaacgttgcttatgactttgacgtcaaagcgaaggcacttgggtaaacagaaatgcccaaatacttaatttgaagctacagaccaatttttttttttaaatgggtcgctttacaaattcaaaaataatgttgctcagtagaactttctgggcaaatgtatatattccttcctgtagcttcacttttcttgcattcagcagtcacgtggagatattgaggacttcaagtgtggccgacaaggcttagacacttacgtttctgtaactaggggacacatggctagtattggaaaagcataggtacaggggaagtatttttgccaaaacgtattcatcttgtaagccgatgttaattaatgagacaatgagacatagtaatgtgggtctgtgggtaccgtgccaggaaccccggtaaaagcgagccttcctagggacagtgttctggggcttttttccccttgatgaaaataccagtcttaagcttctgcttcctgctttgtatacttctcaaggacttaataatttttctggacaaattctccaatatttctcactgggaatccccaagaaatgctggtgaacaagattatgaatgtgtgtctctcccacggcagatttcgatgactgccagatatggggaatttgtgaccagaagtgtgagagccgacagggccgtcaccagtgcctctgtgaagaaggttatatcctggagcgcgggcagcattgcaaatccaacgactcctgtgagtacacagcagctagcttccagtatcttccttccatagccaaggcaaaagaaataacagtattcatgtctgtggcaaagctttataacaccacagagtggaggtagtctttcggcctgagaacaaagataagccttgattgtatataattattaaggactgatttgcatattcatggtgtatatttctaatattttcttcttttctgccttcccttttgcagtactaggtattgaacctaaggctaccagtcttcgtttttccccagagacagggtttttctttgtgtggccctggctatcctggaactcacttggttttccaggctggcgttgaactcagagatccacttgcctctgcctcctgagtgctgagattaaaggcgtgcgccactgctccgctgagtttcagtcatttttaatggcttctttactgacccaggctattgtatcacccaattaattttattgtggaataagatttatggctgcagttgattggcacaaatgtttaacctttaattaatttgcctattacaaaggttgtcgaaattatatgtaagaataatttagaaagtttcaaaatggccatgctaaatttgttttacatttttgtgaacatcaaattctaggtattctatggatattcctagactgatggagatcagtctgtcataactggttcggagtgttgattttaattcctttcctccctccctctttccttcattacttccactgatgcacatggccaggtcttagctctcagttcacacttggcttttaaatgcctctggtgccttctgaaagtgcactgctcatgtgacccacatgagcaaccatttttctttttctctttctttttctttttctctttctttttctttttccttctccttttctttttctttttgcatattacatatgtatgattttgacagctacatttattcatttttgaatatgatatatgattatgatatatagatagtatgcccatgatcagtttggagggatggcatacggttgtaatcctagtacgtgggcggtgggagttcaaggtcatcctcaactccttaataagtttgagccaacctggactatgtgagatcctgtctccagacaagaaaataaaagtagtttcatgttaaaaaaatccatattatgtccttccatccttgattccttctcccaagttttatatttcctttgctagaagcaattgttcttcatttcaatcttagagaatttaaaaatgcaaaagcaaaagtagagttatagatttaaccccatccttcatgtaccaggagccatgaacatttgctagtgacactcaatattttctagactgttctgtataaactcttccatggttgttattatcattattattattttgtggaaatttatgagacagtttcttacactgtagctcatgctggctttaaactggatagtcctcttgcctcagcagcaattacaggaacgaactaccactgtctgcttcagtgattattttatattgtatggcatggtacatcagctttgaatgcatgtacagctctacaaaaacatcttttttatgtgtctgagtgctttgcctgcatgtgtgtctgtgcaacaagacatccagaggagggtgtcagaaaacctggaactggagttatagaaaactacaaggtgtccttcaagttgtgggactcaaacctgcatcctctggaagagaatccagtgcttttaaccaccgagccacctcttcccgctctgcacataattttataaaccagccaatcatatttttttgtactaacaggactcagtgagtgattccatcatgatatcttgtatactcgagaatctatcatgtggacttggatccaccagagccatatcttcctggattctttaaaatgtgttctgcatttaacagagcatgagcatacatgcgaccgtaagctgtccaaatcaagagacttcctgtattcttttcctaactgcattggaccaacagtgaggactctgctctaacccactgattggaacactttgttaagtgtctttgtgaggcagttcaccttctgtaaggctgggagaaggattgtgtctgcttgtctcattggaatcatagaggctgatactagttgttcctcactgtttttggctgtcgtccttctcccttgcagtcagtgcggcctccattatcttctctaatggtcgggatttgctagttggagatcttcatggaagaaacttccggattctagcagagtctaagaaccgtggaatagttatgggagtggattttcactatcagaagcacagagttttttggacagaccccatgcaggcgaaggtaactagaaaattcaagggcatagcttatgggccaaatggaacctaaagcacaaagtgttgatagcttttcattttggggggaggagaggggaaaattcctttgttttctgacaagaatagcccttgagatattttatgttagtcagcgtttttttcccatgctatactattacatgtgacctgtgagacaaagacagctattatttggattagccttgagcaacttttaattttattcataaaggagtccaaaagcctaatgaaaagaaatcatagacctttcagagctagatagatatttagtcgccattttggaaacttgatcatttaaaatataaaaatactcttcttacttgcatgataaaaatcagatttttttttaaaccttcatcttgcacatggaattgtaattgaaggttgggcaaaaaaattgtttttttttttttttttttaatgtgatgctcaaaatctcattgcattgttttacttagaaagtaagattgattttagttagaaatttgactataatatagattcagattcatgaaacatacattttagaaactgctaaaaagtcatggaattttgtttattcttgctgcatttcttttaatgtgaaaccaagtgtgtctttaaaacattctaattaaggctaacacacaaagttgaattttgatcattagcaattcttatttgaataaaactaaaaatcaaaacaaaatactatcatctttatcaaaacaaaacaaaacaaaacaaaacaaaacaaaacaaaataaaacactctacaaaactcgaccatgtatttaccttatatatactgaacaggatccattttcttctggtagcattgtagggttgaggtagtactttctatctatccatccatctgtctgtctgtctgtttatctatttatgtatctactataagtagatacatatagataaaaaatataggaaaacagggttcatgctcaggtttaggaagtataacaattgtgtcatttctttcaggttttttccactgacattaatggcttaaatacccaagaaattcttaatgtttctattgatgctccagagaatctggctgtggattggattaataataaactttatctggtagagacaagagtcaaccgcattgatgtggtcaacttggagggaaatcagcgtgttactctcataactgaaaacttggggcatcctagaggaattgcccttgatccaactgtggggtaggtgacacccattcctcgccatacacatctaatctgtcctggattcattgaaggttaattctgagttctttcagttctgtacactagaacctatgtttagaaggttcttaggtatagaggctttagcagagttcactaaatattaatccatgtgaggagatgtaatccaagcacgcctattggtgcctcggaagcacctgttggtgtgacttgtcgtcttcctatttaaccatatttgcctagctcggggttctgttttggtttaatcattaacataacattagcatgctccacctatgttaaggggattcatttgagcatgaactggaagacaaagttgttaaagagggaaggccactgtgactactctgcttcagagtggagctctcctgctcatcatcagagtgaaccagcacagcacaccaaatgcctacttcccttcaggcttaaatgcaaatgtcttattaaaacaaatatttgattgcaaatgtttgcatatgcgagttttaggaggataaagtaaacttgcaaacagactctttcatcttctgctcttcttttgtagctatttgtttttctcagattggggaagcctctctgggcaacccaaggtggagagagccttcatggatggtagcaatcggaaagacctggtaacgaccaaattggggtggcctgctgggatcactctggatcttgtatccaagcgagtttactgggtggactctcgttatgactacattgaaactgtaacatatgatggaattcaaaggtgagggttttttttttaatggctttataaagttgggaggaattgtataaatatgaaggaccagaattaaaatcaattttgtgaaatgtgagcatgattgatctttgtgttgacttgtgtgcccagtgacctgctctttcctagcaccaggaggcagagatggatggatctctctgtgagtttgaggccagcccagtctacatacagatatacttgccacaaaacaaccaaccaatcaaccaacaacacaaaacatttattttattttttattgctattattatttttattgtgtatgttttcatctttttgaagagccccattgtactgttttcagggcttggtaacattttttccttggataatagtttctccttgagaaatcctctctctactctcctgtgtctaatcaaatgattgtttgtcagctgtggtacacattctttatttctctccttttctcagtatcttctgccttgtttttttttttttttttttcttatttcagcagttctggcctgctcctgcaataattctgatctgtggacagtttcctccgacagttatgagtggtagcactgtatgtttgtcaggtgcttacctgcattccattgtctggcctcctagttgttgaggactggtctgtggtgggatgggatattgctgtcggggagtcatccaccagatttcagatcctgactccatctatccatccatccatccatccatccatccatccatccatccattcacccacccacccacccacccatccacccacccatccacccacccatccatccatggagtttaaaataccatctcacatcctagacttttatgtgaggcaaccctaaaagtatgaaggccaagtgagaaaacaagcgtcctcttcttcttcttcctcctcctcctcttcctcctcttcctccttccctttgctttggtggtactgggaccttaacataatggtaggcaccctgcctctgagctacaacccaagcctgatagttaagactcagctgtctttgtttaagaaagaaaattctacataattaagaagggatttcaaaagcatcccataatatttctattccaacttgttctatattataacaggaactaatttaggtttttagagattcagctgaacaaattacctcttcactaaaataaaaacagaacagcagaggtatgacccatgcttgtatccttttgtaacaggaagacggtagcgcgtggaggctccctcgtccctcatccgtttggaataagcttatttgaggagcacgtgttctttactgattggacaaagatggcggtgatgaaggcaaacaagttcacagacaccaaccctcaagtgtaccaccagtcttccctgacgcctttcggagtgacagtttaccatgccctcaggcagcccaatggtaagtttctgggcaatgttcaccttacttggaacaggaaagggtttcttgtagttatggaaactaatgaagcaccgcccgaagtttgggtgctatgtaggtatatttacagctgtccagagcgctaaccttctcaagatcatgaacctctgcagaaatcagtaaagtcgccaatgtcaaggggatgccttgcatgcatgcttcttggctcctgtagtgtattccagagcctgctcaggtgcttggttctagtggcaaatgacctataccaaccactccaccgggagcagtctatggcatttgtcctgccacatttgaggtcaccggggttccatgcaacataagaagaactcagctttcttactgcgaaatgtgttttctacttctttggatatgttttgcatttgttctttggtttgcattaaggctgtcatggaccaagtatgtttagtatgtttgtctggtccctagctacatctctggttgcaaatgccttcagtcctagccgaggcagatatctttctgaagttgaatataccatagagccatagtaacaaaacagtgaatagtactgacttaaaaatacgcatgaaggaattttgattcagttactgttattttagagtaggatttatgtgtgtttgagtgttttaaatcgaacttttggtatatctatctgcactgtatttggccattttctgtgtttgtggactgaagaaaagaaatactgaaaccaaggcaatgttggtagaaagatctattaataaatcacaatttagagaaagttctcatgttgactgaggaatctgtttagaatgaagaagaactacaaagtaattaaactgatgtttaaattaggaaagagagccacatgctagaacaaaatcacacactagatatagctagatgggtagaagttaataggatacacttgaaaaaaaaagcatgcttggtctgaaaacattctggacatctctggaatgatttttcagactctttatgagctctcattgaattcagagctactgtaatctgttcagccatccatattattttcgttattcagctgtgaatatctggctatcatttcctcaaatcaacacagttgatagaataagaataagtcaaagtttctgaagatggtttataaagcagctgagtggcttagcagtgaagggacctgcactgacacccacatggtggctcacaacaatctgtaaaggggatctgatgccctcttctggcatccttgggcactgcacacacatggtgtacagacataaatgcaggccaacacccatacacataagacaaacaaaaaacaaactttataaagcagacaaaggaaattagtgctggcagccttgagcacaggctgcagggacctatctgaaggtgtaaacttgttgcacaggtgcgtagtagggtttgcactagtttagtcaagcactcaaatcttggcaactttcagaacctgatgggataataatttttctctcctagagctattggtagtacactaacttacttgcaaaacatgtattcaccaagtaataggaaaaatgtgtattaccaggaaagagtctatcataggaataaatggttttgtgtggttggtgttactcagttttctcaatgcatcttaatccatgtgctttccccagccaccaatccgtgcggaaacaacaatgggggctgtgcgcagatctgtgttcttagtcacaggacggataatggcggcctgggctaccggtgcaagtgtgaatttggctttgaactggatgcagatgagcaccactgtgttggtaagacatcttaccttaccttcactgtctttctggtgaacaccacatgctttatgcacacacacttctgcccaggccatcttgttctgaactgggctagcgctgttgactgaattcttccctgtaagaagggaacaaagaggtttctctttgttccttgttcagggttagggaatcttttcccttttattactataaattattagctatgacctttaaattctataggttcgagctactttctatttctactttcctttttaggctgacctggaattatggtcttcctgcctcagaaccccgacttgcagttgtagaccaccatttggggagtgtccacatttcctcccctgtgctggtgttggaaccccagggtcttgtgctctgcctatcaccttagtgtctccacgttacacactaccttaattttggtgggatgggaagctgtccattcctgtgaatgacttctaggtcagctggcctcgtgtctatattctaaaatagttctgtttctctcctccctctcctcctcctggctctcttggagcctgtccttttccttgcttatcagctcatctattcccgatgactctgaactctgctaatattgctgctcgtcatcttatggatatatccttgctctctagatattcgtgcctctggtgccttctccaatatctagtgtttaaaaaaaaaaaacattgcctaatgatttgattttaaacttcttcagtttttgccttcttagtttggatgcacttccatcgtctttgaattttctaacatgctgtcatggttttcattgcttttagacatcattccccattctttcatttcctcaatctctcacttctctccctaacatctttttgaataatctacataatttctactctttgtctctgtgtctcttctgtctctgtctgtttctgtgtctttctctgtgtctctctgtctgtctgtctctgtctgtgtctctgtgtgtctgtgtgtctgtgtgtggttgccttgtaactaagtgagctgcaggttcaatgagaagcaccatttctgggaacagggctagagcctttcctctggcttttgccctctcaggtgcccccatgccccacagtacctcaaacacaagaagagctaacaagggtgtgaatatacatgacatttgtgtataaaaatgtaataacaaaaagagaggactttaacacttctgtgaccattgtttgcttatctcccttcttctagactagtttccagttatattaactctacatttagctgttgttcctctcggagttggattttatggttacctactgtactggagggagataagcaatgtctctggaacatggcggggccgcactgctggctcactttcatgtgtccttcctctttctacagccgttaagaacttcctgctcttctcatcacaaacggctgtgcgtgggatcccattcaccctctccacccaggaagatgtcatggttcctgttacagggagtccttccttctttgttggaattgactttgatgctcaacacagtaccatcttctactcagatttgtcgaaaaacataatttatcaacaaaaaattgatggcacaggtgaggaaagtgtgtatgtgttgacatatttgatttgttttccctaatactagcaactactcatttgttttgcatacatatacacatatatcatataatacacatttgcatacatattcatacatcatacacatacacacacacatatatattatacaattacacaaatgcatacatacatacatacatacatacatacatacatgcatacatgcatacaggctttgacctactgttctctatacctctcctttgctctagctcacactggcttagaacttgcaagaataccccctgcctcagcctcctgagttctgggttgatagatatgagccaccctattccctgatacctctcatttattttcaagacaaatcataatcagagttggctttatttgtaagtttgttggagatagggtcttactatgaagacccagtttgtcttgatctgtgttatataacccagtctgggcctcaactcacagctatgctcttgcctcaacttcctaaagtctgggattataggcttgagccactacccaggctcaggctgtggctttttctttgtttgtattttattttctttaagaaagtacattttaatgttgacaaatgagtagttcttggagccccaacctgctggtcctttgtcctccctgtccttcagtccctagctaagctgtgacaacacctggcactgtctccctctgctcccttgggaacatctaacctgccatgcactatcaggctgtgtgcactggagactcattgcttcctccgctccatatttcttgtacccaatgctttattttgcatcttgctactcatcatctataaaaaggctcagtaacaatccccatgcatatatcgtacccatgatgttgaatggatacctgcaaggaacctggctcaaagtgaatatttaagcagcatatttttgtattattggcacaaaaaggccaccttttatttttatctatctatctatctatctatctatctatctatctatctatctatctatcttgaaatcctttatttatttatttttctttttttgagacagagtttctcagtgtaacagctctggctgtcctggaactctctctgtagaccaggctggcctcaggaactcagagacgcaccggccttgattaaaggcatgtgtcttaaaacacactgcaaaacagaaatgtggttgcttattctcagtgagctagagagaaggaagccccaaagttgccacagggaaggatttgcagaggaaaggtgatcttgttctcacgtagccagctcctctggcttctttgcaatcttggcttcctatggctgtccaagcccgctgagtgtctctggagggttgggcggtactgtttgtgagctacccccaactgtacctggcagtgtcagctcagagctgtctctgggtggtagtaggtgagttcaggtatctttctcacgtgttctggaaggttgaagaagggagtaaagccagacccagttctgtttatcactcactaccgtatctcctcttggagatccaaactgtgggcaagagctagattctaggtttatctcattgttgctcagcagttcacagattctttttttccttaaagaattccacacatgtttctacaatatgccccttttcattcaatctttaaacgtgcagccgttgggaaatttgtcttaaataacatgactgtatttttaccattaggaaaagaagtcatcacagcaaacaggttgcaaaatgttgagtgtctgtcctttgactggatctcaaggaatctctactggacagatggagggtcgaagagtgtcactgtcatgaagctggctgataagtcccgacgacagataatcagcaacttaaacaaccctcgatccattgtggtgcatcccgctgctgggtatgtgagagcttgcaactgctgaatgcctttcatggtgtgttgctccagggaccagctgtgcaactcacctgcagtttcatctcttcggcataagcttcagggatcaccttatctacttgaaaattacgttttacctttctctaaagtattgtttttctatagttaccctaggaaggaaaaaaaatcttccttgatgcagggctatcaaggaaggatccaattcttgcctcgctttagtgtattgatatatacacgaggttttagcagggggtggggtggggtgggggcttgggtgataatcatctagtcgttttcagtagaagaactttcaaatccctgtttcatgtaccattaacacagggtcagacaggaggaaacagaacagtctacagtgttctttttttaaaattttacttgaatatgtacagtagcttattcagaacacacctgagaaaaacttgtgactcaccaagccaggttccctcacctggggcgggggtgggatgtagctaggtgaggtatagtgacttggaagggctcatactattgagccaaatctgtagtcaaactctagacctgctcagacacaaaatttgtcctttctttctttgcttctttctttctttctttctttctttctttctttctttctttctttctttctttctttcttccttccttccttccttccttccttccttcctttctctctctctctctctctctctctttctttctttctttctctctctctttctttctttctaaaagctgtgttctctttatacttttagtttttctttgtaaaccttatttacctacacagttaaatggttgattttttttctaatggatttatagcaaccttaatctttagttttgaaaagctgtttcattcttcccattttctttgaaatgatgtgaagccatcatagtttagaaagttacacccggaaatggttttgattcccagcgattgtatgaaagaaaaaaaaaaagaagtggagagaaaaaaagtggtgtgtgactttaatcccagcaattgggagacagaggaaagtggatctctttgagttcaaggcctcctgcagtgagttctaggatagccagggttatatagtaagagaccatggttcaaaacaaaaccaaataaccccccccccacccctcaaaaaaccaatacaaaacaaaaaggaaagaaaaagatgttgattagacttaatgagtatgtgtttagagtttgattaatgtgtgtgtgtgtgtgtgtgtgtgtgtgtttatatgttgtatgtgtctgtaggtaagaatgcctgtgaataatctagaggccagaagatggtgtctgggatttgaactccagattccatgaacaagtgctcttacttactgaaccatctcttgatccctaacactgagagaattttgtagaattataaattccttatagaagaataaatagagaatggtctggtgggttctgaatgtttaatcccagattaaaagaaaatatatttgatttcttattcatgaagtcttcactaggtaacttgaatcagggtcgcatatgaaagttgacacctaactattatctagcattggtgttatagtgctgatgacaaagaaacataagttgaatgccagcttggctacataggtggacataaacccagcaaactcctgttctgttctgttctgttctgttctgttctgttctgttctgttctgttctgttctgttctgttctgttctgttttgttctgagacagggtcttcctatgtagctctggctgtcctgaaacttagtatgtagaccaggctggccttgaactcactatggaactcaaggtgacatatgtctcccaagtgttggaaattaaaggtgtccactaatatgttgggtgacagaagttttataacctgtggtctagttattctctctcccagatgctcattttaaaatcatgtataattgtgactgtgattacatatttataacttaaattgtaacttagaattaaatatgccaaacttgatagcatatatggagagtaaaatcagttgtaactctttcaaggttatcagtttgttcccatattgccctccttgatttgctcctgctttttaggtatatgttcctgagtgattggttccgtcctgcaaagattatgagagcatggagcgatggatctcacctaatgcccatagtcaacactagtctggggtggcccaatggcttggccatcgattggaggtgcgtagataccatctgaattttaatcgctgtagagtgtggagaaggtatactagacactagttctagtattctggacactggttccagtatcctggacacatggtagtgtgttggagtaaggaaatgaatcctgaaagtttctgagactttttgattgctgtcaggtcatgggtaatggatgctcaatgatctagaatacaaacacaactggccagctgctggtaggataaaaagtcaatgcactcgtaagtattttgaggaaatttctaaaaacagtagaatgacagggccaagatggatgaagttcgtgtagagattggatgaaatgtagcagcttcaggatattaattaatcaacaagtgagttagttagtgaatactgactcaatcgactagtttatacatgctttatatcgatttgtttatacatgctttggggattcttaggagttgatcaatttaggaagaagaccaatgagcttataaattattaaagcaggttatgggagaaaaagggcagaagcatgtttagtcttttaaacgttaccatcaatattcttgtctatttctcaaggaggaaacacatttcccagctcaaagatttcaaattttaagcttactgtatgtgtgagaagcatacaatgtaaatttctaatagacacatttggcttttatatggaagtaatccgccaatgtcctccctgtttgggacactcatgtcttgggattagataacatgtcttcttccttttcttagtacttcccggttgtactgggtggatgccttttttgataagattgagcacagcaaccttgatggtttagacaggaaaagactgggccatgttgaccagatgacacatccgtttggactcaccgtttttaaaggtatgctttgaggcaacaaaaggtatatgtttgccacagaaccctattcccaccccaaaatgtgaacagaaacatatgactgtgtttttccattcatatttctatacaattttcacattgctagtaaagatttctgagaggcatggaattgtgggaaatggccatgattcccgccaaacttttgtctacttctctcaactaccttcttcagtggagacgtgcttctgtgacttgggttgctcagaatgaatctctctcctctctctctctctctctctctctctctctctctctctctctctctggtgagccaggcttggtggcacacactcatctgggaggctgagtcaggaggaccaccatgagagtggcctgggccacatagttaagtcatggctcacttgtataacaagactatgcagaataaaacagctgacttgtttattcctgaaacagggttcttgtgtgtagtttgtggattacacacaaatactctctcaaactttctggtggtgtgttcctgttatcccagcacttggaaaacaggggaatcatgaggccagcttgggctgtagggcaagatcacagccaactcaattgaataaattgaatagtgagaccttgttgctcaaacaaatgaacacagtataccataatttgcctagtttgagggttgacactttgtagagagctaccaaaagtcctgtgtacaaactagttgtgttcctgttcgaaccccctagtcaaatacttagcatagtgtgttaagcaactagagtgggtagtcatactgaatattattccatcctgctgtctatctgtggagtgtgtggtattttaaaaatattttaaaaatgctctgagatttttgatgagatgagtcaattataaacagtcatccctcccattttcactccccctttcaaatattgtctgtcaggctcgtgctatttgctagtcataggaacattttttaaatgttaatttttctctgttatatggtgtgatgtttggatatcttttggtttttatcagcatgaaaaatagtgagtgcattctaatgagaacaatactataacccaaaatattagttttagtcaattctgattttcgttatgaatctcttttccctttctttttctttgaagatgggggtctccctacagagtctaagctcattcaaacccgtgttcttccctcctcagtctcagaaatctatgaatgccaccatgcctagctagcttcactatgaatttggtatggaatgctcttttgtttcgcaatactatgaaaaccattaatcctgtactgaaagactagctagatttccttgacagcatactgcacaggcctataagtttgatttgactctccatctatttaaatacgagacactgttctgaatggtaggactgaaatctgcatttaagagagagatgatttagtggttttaatgacgtactagtatggaccacaggtgaggaaacttgatttcataacatgagtgacattgttaagcatttattcttacttgtatttttttagttagttatggtctggtagaattctttgatgaaatctaaattattaagatcatatgtaagtttgcacaattgttgatatttttacccaaacatacaactttttttaacaaaatgagatctgtatttttccttattaaaagctccttctccctctccttctcccgcccccctcctctgtgtagccctggctctcctagaactcactctgtagaccaggctggcctcagactcagagatctgccttgcctctgcctcctgagtgctggggttaaagacacgggccaccatctctcagcaaaagcttcttattaaaagtggatctaaaaaaacagtaggaattctcataggaggtgaaaggatgctacactcctttaaaaaaaattgagtgttttggctggagataagaactcaaaagattctttttcatgtttacttttatatacggaggtttaagcctaattactactaaatattatgtagctgcctcagcctgagccatgatatcaattaaataagggcttccaaagagcaaatggttatacgtagatgggctcctggaccactgcattcttgtaagccgattacatttctttaaactgtgactgaagtgtgaatcattctctttttctccttagataacgtgttcttaacagactggagactgggtgcgattattcgggtcaggaagtctgatggtggtgatatgaccgttgttcgacgtggcatcagcagcataatgcacgtgaaagcgtacgatgctgacctccagaccggtgaggggcattgccaagtattctccatccggacatagttatttgacttggtggttcctttctctttaactgtatcttcaacataattcctgacagtgctacattcctatcagccatatagttgaacacagcaggactctggtttcttggaaatacacaccttagaactttcctgcccttaaaccgaatgctgtctttggtgggctgattcccaactttgtagtgttggctctggtttttttttttttttttaatgtttcccttcatacgttgaaggttggatctgcttgtttctgcatttccaggaactaactactgcagtcagaccacccatcccaacggcgactgcagccatttctgcttcccagttccaaacttccagcgggtgtgtggctgcccctatggaatgaagcttcagagggaccaaatgacttgtgagggagacccagcccgagagccccccacacagcagtgtggctcctcttcctttccctgcaacaatggcaagtgtgtgcccagtatcttccgctgtgatggagtggatgattgccatgacaacagtgatgagcatcagtgtggggcacttagtaagtatctgtgctggggttttggggaggtgaatagaacagaagactggccatccataagcaataatcaaagcatgagctatctatgagtatgggccctgcgtttgatcagcagcaatggtgagaatagtattacagaataggtccttacaactgtagcctttgaagacatcacgtcctgtgtgtgttttatccctcttttcggagtgaaatgaatggaaggcggaatgggtctgtaattctacactttttgatggtattctagtctataaagtttcagtcctaacgattaccattgcagaaggcctaaatatcccattaaaaaatgaaaataattgagatctttagaagcctctattaaaatgatgccagtagtaacctgtggtttttgagtgaaagaagagttatttgagccgggcgtggtggcacacgcctttaatcccagcacttgggaggcagaggcaggtggatttctgagttcgaggccagcctggtctacagagtgagttccaggacagccaggctacacagagaaactctgttatttgaaaagttgtacattttcctgaaattgtcataggagggaagtaaaggtgagcccaggattatacagactagagatttagtcttgggaagattcccatacctttcaaagtctaatttaagataattatataataatcatagttttctcttgatggtcaaaaaatggatatacatgtatgtgtatgcatatatatatgtatatatatatacatgcatacatacatatatgcatataatatacacacatatagtatgcatatattatgcttggtacttaccaaacctaaaccattctcacatttcgtctaattttgtgtgatagtatattgaaaggtgagcagatctttgcttctacaggaacaacctcataaatgtttagaaccaagcattttcatgactgccttgtggctttttgtagataacacctgctcatcttcggcttttacttgtgtccacggtggacagtgcatccctggccagtggcgctgtgacaaacagaatgactgtctagatggcagtgatgagcaaaactgccccactcgttcaccgtcgtctacttgcccgcccacctccttcacctgcgacaatcacatgtgtatccccaaagagtgggtctgtgacacagacaatgattgttcggatggatcagatgaaaagaactgtcgtgagtgttgagctgacttctctgggttggttagccttgtatgcatgtaggtttgagtagcctctaagactaaggttttttcctctaagactctcacacagttcgatccttgtcaacctctgaatatcagtagtctgagacatgtggagagtttttcctaaaggtactgagctttatcacagcacaacacagctgtcagacatccagatagaaaccgtaaacaaaggaaaatgaacaaaggacctgagctggatgcagtggtgcacatctgttgtccctgctcactgttgctctaaaggaaggggaggactgaggtcgaccaatggaggatgacgtcaacctgtgcgatcagatgcatgtgcacccatgcatgtctctaacatccatttatgatcatgcatatatgctgcacacatgtacgcatgtttttctttttttcaaagcctttaatgaaaaaaaaaaagatttaccttgtaagcatccagacatctggctgtttattttcctttttttcgcccccttccctgtctttcttttttatcttttcatttaatacagagcaaggacataggctctttttatctccctggttcttattctttagcatggttatttgtaacaatggtttaagatggacacagagttctctagactaaattcttatactggttgcaagtcttggcaattcattttccttctggggggagttgggcctttttaatttttgcaatctagcagtgtgattttcactgactttatggaggggataggcagcctgcatgcatgcattggtgcttcttggcatgtggtgagctgaccatgtcactcagattaggtagagtcacagacccgtgagatacatccctgggctgcttcctcgatgaatggcttctgcttccaaagatttaattccaaatcctcactttgggttctcccactgcgctggctttgacgtggccgctggtctgaaggagtctgtacacatagcactgagttaagtctgttaacagaaaataaacttgactttgtttttgtttgccattagaagcttcggggacctgccaccctacccagtttcgctgccctgaccaccggtgtatcagcccactgtatgtctgtgatggggacaaggactgtgttgatggctcggatgaggcaggctgtggtaagtggacagctttgcttttctcttactgtgtgctctgcttatcttggagttaatgtcatacacttctcttcttttgtttccagtgttaaactgcacaagctctcagttcaagtgtgctgacgggagttcttgcattaatagcaggtaccgctgtgatggggtgtacgattgcaaggacaactctgatgaggcgggctgtcgtaagtgccacacacacagtgtacttcagacaaagggatcccttatcttagtattggatattaccatatagtttttttaaattcaaataaagcacaaagtgttcttatgagaataaaagattgacaagaattaataaatattacataatgatttgcatctggtgttatataaatggacatatcaaacagttaattccttagatatcacatcccaaggacatacaaaaatatggttcttaaaattacatttatttgcttgcatgtatttgcgtgcacacttgcggatgcatgcaagtcacagtacatatatggaagtcacaagacaactttgggggagtcagttctttttatccattatgtgaattttaaaccctttcaccattttgccagccttatctagatgcagtttcactgaaatctcagttgggaagccaaattgtggactagaaatggtataggcctatatgggatcgattcattcattcaagctgtaggtttgtccatagagagattataaaagggctatggtaactgaagcagatagctttgtatgcgactcaggtaaacttctatgaagggttagaaagcgaataaactccttctaattccaagatctaaggagaactccatgtaattctgatggatcctgctctgtcatagtcccagactagggactatgatatgatttttcatctgcttgaacagtgacattttagacaatcccaaggaataagaaaggaagtatgtaaattcattaatgggggaggggagaaacaggatgaatttctgacttgtacttttacacaagagtgcatagcttgttgttggatccactgatctcctgtaaatatgtccatgtaccacaatgtacaggaatttagtattggatccattttaatcattattataagcctactgtttgtccagaataaattcctgaatctatatcccaataggatcatacattcaaccacaagtgtgttactcacgtgcctttgttccctctagcgaccaggcctcctggtatgtgccacccagatgagtttcagtgccagggagatggtacctgcatccctaacacctgggagtgtgatgggcacccggactgtatccagggctcggatgaacacaacggctgtgttcctaagacctgctccccgtctcatttcctctgtgacaatggaaactgcatctacaactcgtgggtctgtgatggggacaatgattgcagggacatgagtgatgagaaggactgtcctacccagccttttcactgtcctagctcacagtggcagtgcccaggctacagcatctgtgtcaatctgagcgccctgtgtgacggcgtctttgactgtcccaatgggaccgatgagtccccgctttgcagtaagttccctgatcacagtttgctggacacaaatttattctgaacagtagatggctgtaccccagcactgtcacagaccccatatagtattttgggaaggggatttttagttcctctgtgactttatatccctgtaggagtaactataaattccaataaatgatgactgcataacacttctcattaatatctctttacttgtgtctgtggcttctcttctctttatgtcactgttcaggatatcatatcaaatcaagtataactctcttagtaatgtgtccataaactttactaacttgaagattttctaattttaatcggaacttgtcatagaaccgatgaaacccagggggttgtgtttgcagtgattaaaatgctccgattggcatgtaatcctaactactgtcctctctctctttcctctttattaacgctcactctcagatgaaccacagcaaggtatgactgtgaatattctagacctttatgatttcacatgtgtcatgtgtatgctgacacggtactaattactgtgacctccccttctagtgcgtgttctgtgttttggctctttacccataagttacggtgctcctggcaatagggagtatttcatacccagtatatgacctggctttgggctgcttctgccattgccacgatggccctaagagtaaggaatgatgggtgtgtttagcaaattgtgtcctctccagttgatcacttccagcttttcctgcaaaacatttctagttaggctggagaagttcagagggagcacattagatttctctgcttcatcggtgacagtttggtttcttgatgccagcattaatctctcaaggttctctaacagccataaatggagctatatgggagggtggttgtatcctatagcttcaggcaattcagagaagacaagttgaacagctcacccaagagattggggctcttaattaactctcattaaagtaggcatgtaactacattggagtgagtaaaaaaagcaaggatgtctgacttttcaccccgtgactctttcctgtagatcaagacagctgcttacattttaatggtggctgtactcaccggtgcatacaagggccctttggagccacctgcgtgtgtccaataggataccaacttgccaatgataccaagacctgtgaagatgtaaatgagtgtgatattccaggcttttgcagccagcactgtgtcaacatgagagggtccttccggtgcgcttgtgacccagaatatacattggaaagtgatgggcggacttgcaaagtcacaggtaattattaagcttgaaagggaactaactccaggaaatttaatagcctctctcagtgtaagactgattgtctagtcagtctgactagacaacttattcaatgccttttgacccatatgaaagtgaatacgctagatatcagaatgttgattcagccgctctcaaaatgattcaacagaggagggtttgaaagtttcctgattgcaggacaccatggtttatgccttttatcccagcacttgggaggtagcaccagattaattagcctgggctttatagtgagttcaaggccagcctaggctacaaaaataccaaagctttgcttcaagaataccaatgtcaaacaaggagcctttcttttcaaggaggctggatgaaacagtctaagggacagactgttttttaaaaaaaatatttaattatttattttacatacatgagtacactgtacactgtacactgtacagatggttgtgagccttcatgtggtgttgttgcgaattgaattttaggacctctgcttgctctggtcaacccactcactctagtcgactttgctctctcagtccctgctcgcttagtcccaaagatttatttattattatacataagtacactgtagctatcttcagatgtcccagaagagggcatcacatctcattatggatggttgtaagccaccatgttgctgcttggatttgaactcagggccttcctaagagcagtcagtattcttacccgatgagccatctccccagcccaacagactgattcttattatctgaagttccacccaagatccaagaagtttgctctagtctgttctttcccttagaaaataggctaggcaaagaaaggtccttttcaggaagtagatccatcattgttattgatgcattattggtcagaactcagtcatttggttctagcagctgcagggaaggcagagaccagtctctatttgagtagccttaggccaacctaaatgtagtgtgacttaacactaaaaagaccagggggaaaggaatattcattgatggaactctctgctacacctaaaggtttgggagaaaacaaaaatactcaaaacttggttcctgccaagaatcaagcctacagtctgctaagatagaaagcaaattgcaacaagcaagtcaaggatcaatgtatgaacagctcactccatactggtacttagatgcccactgcaataatccaagagagaaagctttttcagaacataactattttacgtgccaatgagtatccatgagcaaacaaggttcccctgatcccgcttagctctgatgaggtcagggatgttcagggtgatatgtctgtagacaacgtgattatttctcccatttctctagtttggtaccacgcacttgatgttggggagactttaaaactgtatttaattgtatttttctttcagattcattgacggtttctttttctttttttcctttccctacacagcatctgaaaatctgctgttagttgtagccagtcgtgacaaaatcattatggacaatatcactgcccacacgcacaacatctattctttggtccaggatgtttcttttgtggttgctctggattttgattcagtcactggtcgtgtcttttggagtgacttattggagggtaaaacctggagtgcctttcaaaacggaaccgacaagagagtggtaagtgctattctctatctacggtcctttcatattttctgttgttgctcaccaagagaaggtcttgccctccctcgtcctgggcagcacatcatattcaagaggtctggatgttcctgcgtgtgtgtgtgtgtgtgtgtgtgtgtgtgtgtgtgtgtgtgtgtgctctcccagactctccatgagtctgaattctatgctatgtaatgcagatactttgtgaatctttcataggtcagagagagagactcaaggaattgctttactgagctttaattgacttaaaattttccacacatctctctgagtttgtttggtgaattagttttttattttatgtgtcggagtgcatgccacatgtgtgtgtgtggtttctagtagaggccagaagatgatgtttggttcccagtcataagctgccccgtgagtgccaggaaacaaacttgggttctctgcaagggccttttaattacagagccatctcttcagccccctaagtttgtttattaatttttaatagataaagcggttactcattggtagagccccttggcaagtgtaaaagcttttaaaatcacaatgaaacctgctgctaatacagccatctcacattatttaatgctatgaatgctttttatatttatccctaaaagcactgctgttggcttgctggttagttacacttattctttctaatgttaacatcttatcctttcgtctgtaggtccatgacagtggtctctctttgacagaaatgattgcagtagactggataggtcgcaacatttactggacagactatactcttgaaacaatcgaagtctctaaaattgatggaagtcacaggacagtactgatcagcaaaaatgtcacaaaacctaggggactcgcattagatcctagaatggggtaagagagacatttactaggtattgaatacatgcaggtattgaatatatggtaggtttctaattaatgcatgtaataataatgtcccttagagccacacttagctgtggttttgatacaacaaaatgctgtttctgcttacagttcatgttatttcctagatattccctttaagctgtatgaggaagagacatttgcctgataggtgtaagaagaaaaaagaaattcatgaatttcagaacctttgaaaaaatttcctagattttaagtaaattctgtaagttagactgtttacttttttttttttttttttttttttttttgattttttttgagacagggtttctctgtgcagtcctggctgtcctggaactcactctgtagaccaggctagaactcagaaatctgcctgcttctgcctcccaagtgctgggattataggcgatctataggatgaattagacagtttatgttcaatatcatgctgacttccccgagttactacacaccagattcagagataacgaaatctctgaagatggagaagtcaactcactacttacaattggtagggtaacaaattgcttgtggattgttggcattggggcatgtccatgccataatgtaatgcatgctttatgcacattataaagacatccagatggcctgcggttgcattatgatcacaggaagtaatgacccacgtgttgcattatattaagtgggcattacctttcctgtgtatgtcccctctctttacagtgacaatgtaatgttttggtctgactggggtcatcaccctcgcattgagcgggccagcatggatggcaccatgcgcacagtcattgtccaggaaaagatatactggccctgtggcttaagtattgactaccccaatcgcctcatctacttcatggatgcctatcttgattacattgaattctgtgattatgatggacagaaccgaaggcaggtcattgctagcgatttggtaagtttgttataattaagttcaaatttaaatcaaagtggaaatcagtatcaagagaattgagagcacatatatacaatgagagagagagagagagagagagagagagagagagagagagagagagagagagagagatcagggaagaaaatcagtgagatatcatcggccttctgttactaacaagaaaattaagatatttattccactcagtcatatctcccatgccttgtaaaagattaatgtgacttcagagatctgtggatgccattcttttgcttatatatcttttaaaatcatggtctagtaaaagtgaataaactagactcatatttgtgaatgaaaccagaacctattatgtgtttagcattttttctttttatttagtagattctatttaagttttacaaattggccaatgtacgaaatatacatagttttccaaagagtttagtttctgtgacttgaggaagcccaagaggagccttctttatggtctttgggggtaatatacacctttggtataacagattgagaggcagaaacagctctggaacaatttccattttaaaaatcgataccctagagtgccactcctagagtagaggcacttgtattagctacttcctggcatctccagtatctaactggaatttaaggagagtctgggtgtggtctcactctggttctgcttcccaggttctccaccatccgcacgctcttactctgtttgaagactctgtgttctggactgaccgcggcactcaccaggtcatgcaggccaacaagtggcacgggaggaaccaatctgttgtaatgtacagcgttccccaaccgctcggaataattgccatccatccctccaggcaaccatcttgtaagtgactaaagcagcctgcctggggaccgcatagccacttcctcttctggacatgctagtgcacaggcaatacatttcccttccacagaccactaccccatgcttctcctggcccctgcattgctctgtcttttatttactacaagaaaattggtcttttgtaagtggcgacagcatatctatcttcattatgtcgttccatccagcaatcagctctgtgacctttttatgctgccagttgttgggcctcattatgatgctgctgctcccttgtaggcgttcctctgtggccagcacaagtcaccttcatgcatggggtatgggtggacggatgatgtaaagatttgtcctcggtggtgatctttctgttgggagggcgaacacttaaacccttccataatcttctctcctcaaatctctccagtggtgtctcacagtctggccctgtttcttctgtggcttacattcaccacgctggactacatcatggtccagtgacgcaccaggcgagttcttggctttgaccttttactttcttgctttgtcttgaacatctgtcttctgtctctgttgcaatgactgccttgtgtcatttagggctctgctcaaatgtcgctttctcagagaggctgttcttaaccaccctgccccaaacgaccaccatgttccccatatccgcttatcctcatgttctgcaattgctacgcccaacgtgaacttagttctgttacctttctacaacgtacactctgtttaccctcagtgtgtagaatggtgtttggtacctagcagatgcttaatatttttttttgtgagagaaagaacgggttacctcgcatgctgtaagtagaagaaatgggttctagaagcacctgcgagcctagatggcacagagtcctcttttcaagggctggcacaggcaaggatgtggaacaactgaagattgctatctaaggaaaacttggatattgccggataagcatcaaggtcacacgaaagacgtatagcctgctttcatttcgtgaaagaagatagcttttaggtctggcaaagagacattgtatttatatcatgagtcctagataattcagtgactggtcataatctggttacagattgggttaacccaggactttgtgaaagccaaccctttctcttttgccccttagctaaggtaactgcaagcattcccctttgcaacaataggagctgtgggtaggaccatgaccttgctcactgtactgtaggcgattttgcattcaaacctgcctttctttctcccacagccccgaatccatgtgcctctgccacttgcagccatctttgcctgctttctgcacaggagcctagacattactcttgtgcttgtccctcagggtggaacctttctgatgattctgtcaactgtgtgagaggtaagggtgctctgatgataggacgtgtcacagtctgtgctaggctgtggaaacccaaaacccatttgtaactcaatctgagcatggtgtcttgcacgttgttcagtgggtatactccaaggggtgattttcactgagtgcctcagttgtcacataggttgtctatggagtgttgttaaacaacctttaacctcccgcttactcacacctgaccttcctgataagcaactttccgattctgcatttaaaaggtagacagcttaaacattttcaggtccatttcattttttaaaattctcataaaagtagtcaataatgaatgatctgtcgtaggtctgatggctccaacttcagtattgttattattattagtatcatccgataccttagcaatataagctctatctctgtgagaaatattacaagtggctatttgagcaatttaatcgtcgttatcttaacaggttgattgaagggtatgtgaggtatgatgtcaggtgctttggagattgctaagagaagatgaatggctccttcagagtgtgtacttgtgcacacctcttttaaaaaaccaccctccattgcttagaaacagacaaagtgactctgaacctattcctttctcattgaagaggagtgaatgtattttgaaactgatacaaattactagagatagcttgaaaccaaatagttaattttaacatatttctaaattaaaagtacaaatctatgggaaacctggggtttttcaaatgggaaataatagatatggatctagggcatttatagtgtttacaggctatgcaggtgaggttacttaagatgaagccccatccagacatgtgacgttgtgcagtgataatttcatgatgaaaggttttaattattggtaatagttacaacagggattgccattttctacttttcttcagagatttattacattactaatccttgctgacattctttaatttagtatgtccttgagtctttcagagaagattaatctgagcatagatattttaaatacaaagaattctttcaccagacaaagattatcagctgctcattggggactgatatcatccatactactaatgataatatttttgggggggggttcaagtcggggtttctctatatagctctggcattcactatctaggacaagctggccctgaactcatagatacctgcctgcctctgcctcctgagtgtgggtattaaatgtatgtgccactactgccagactctgatagtgattctaaagggcatcacttatcatttcacaagaaattcccctgtggttttcccatggcttgcctatggtagtggtctttagtattttctaattggtttctgaagtgtagcctgactgtcaatatatgcttattaggaaaagcagtcagtttgaagtgtttggaagttggtctggagttgtcagcttgggcagtgcgtgcttgtgtagggccttgggtttaatctcagcattgctaaaacaaaaaccaagctgacaatttaaaattctggaagaaggcataagtaagcctccataaaccaatggtggttattgatggtatgggaattattattattgtgtgtttgtgtgcatacgtgacttgtgtgcctgagcacatacatgctactgtgtgtagatgtcagaggactactacagagtcagctgtttcttcccagtgggggtttgagagttcgaatttagcacttttacccactgcgccaacttattggacttgcttttcctaatttcatagagtgaaattagaatgagaactttcgccaggtgtggtgtcgcacgccgttaatcccagcacttgggaggcagaagcaggcggatttctgagtttgaggccagcctggtctacaaagtgagctccaggacagctgagaactattttacatttgtgtaggaaatatacttcccacaatgaccaaaccaagtagatggactctagctacacactcagataggtttctgactcaggagttataaatgcaatctggggtgtttgtgtcatcgctagttatctggaggaacttttgaaggtagtatatagtctcttgtgtgaattctattcatttagttatgtggttattattaactgtgtacacagagacacacacacacacacacacacatggacatacacggacatacacacacagagacacagacacacacacacacaaacacacaactcatggtctcctgcaagcaagacaagcacactctctgacttagctacttctccatcccctgactacagatacttatttgggcaaatctttgatttcaggctttcttcctatcaagctttagctttacagtagtgataaaatgaaacacaatagtaattgtgctactttgtgaattagaatctagtaaggaaggcataaactaactaaatgatatctgagaagcaggaggcaagttactcttcaccaagtgattgttcatcccctcaacccccaccttccctgcagatcgactctcaatggttaaggttgtctatgggagggtgaagaactttcggactcagatcctgatagtttgtcaccgtgaatgaggagacagagatcgttccccactgcaggcctgtggttactcaagacacctctgttgtgtgtgtagttattgctgcagtgctgtgatatcactttgactgctgtttttacaggcgatcaacctttcttgatatccgtaagagaaaatgtaatttttggaatttcccttgatcctgaggtgaagagcaacgatgccatggtccccatatcggggatacagcatggttatgatgttgaatttgatgactcagagcagttcatctattgggttgagaatccagtaagttttggatgcgttcaatgtgtgtgatcattatttaagacaaagttccctcagggaattccagcaaggtgtttagtggagctcctgggggactttggattagaatccttgcttggggcaagtgcttctccagtacccttctgcttgagattcttcccttcttcatggaagcaatctgccacagtgggaaaaaaagccaggagaaaggaaaaagaggatgaagaactcttagtgtttgctgtctgttttgcttcgtgacttctgagccactttagaatgtgcttttaatttttatttttgagactctgtacagtgagttttttttcctgacaggtcaggtactcatctttgctcgtccttcccccccaccccccatccccacgtgtgaggagcattaagaaaacactggcagccagcagaggctgtcgggagagaagaggagggcttctgtataggggctgggctgtgtctgcgtctcagattagctcaccaccctcgtttttctttccagggtgaaattcacagagtgaagaccgatggcagcaacaggacagcgtttgctcctctgtctctgctggggtcttctttgggcctggccttagactgggtatcaagaaacatttattataccactcctgcaagtcggtccattgaggtaatgcttctgttattatgtaggttcacacattgctgttagattcctataggatatgttctcaggcatgatggctcctgtaaccaggaggtttaggcaggaggactgctaatgatttaataaataataataataataataaattaatagaacatcctattattctatgttgtttcttaccaatgatcaattccattgtaccctataaaggattctaagaaagctaattaagatcatagaagctgggcagtggtggtgcatgcctttactctcagcacttgagaggcagaatcaggcaaatttctgagtttgaagctagcctggtctacagagtgagttccaggacagccagggttatacagagaaaccctgtcttgaaaccctgccccgcccccaaaaaaaggatcatagaagaaatactatgtcagttatcaaccaagtttataactacctctcttcccagataagaatcactttatggcttctagatagtttttctagcagtgaaagacagaatagaagaatagaaacttgattctaattcctttcctctttgagataagtgctctctatatctcagctcccagaagaaattctagacgcagggtaggattgaaatcacatgaagtaagcccataccaccagcattggttttctccactctggaacaagaggaacatgtataggaatattaattcatgctggttttgaaagtgagaagggttttatgagagggatagtcagtaaaccttatcattgacatgtagccggtcagtagttagctctttggtttgtttggtcagagtcagattggtgagagtacaggccacagtggaacagtccttcatagtttacaagttcacgatgatctgatggctagtgattcacaacgactgagacatttacagtaggcacacatgccaatctgtggaatatctcaaggcaaatggaatcgactggcatgatgggattcttcatgaaggcccatctggtacaaacattttgcacaagtaactgagggtcagagaagtcaagaaattctgggtttcaatgacaggaatgaacgcagagacctagacctttctaactccatttgacagtgtcagaaggaacctctcataatctggagttcatcaacatgacgtgttactgagaatcacattgctaagccagagggcctcatagaaaagtgaatgctctctttctgggactttgttgattgctttaaacttcgcaaaggctttgagtaggtgtccagcagcaagaggtaaaatgagcagcctcggggaaccaccgagcacgcatatgtgtgcatcaagtgatgaggccacttgaactgcagaaagttacctcatttataatctgcaaccctataggtggaacaacaatatgaactaaccagtacccccagagttcatgtctctagctgcatatgtagcagaagatggcctagtcggccatcactgagaagagaggccccttggtattgcaaactttatatgccccagtacaggggaatgccagggccaagaagcgggagtgggtgggtaggggagcagggcggagggagggtatagggaacttttgggatagcatttgaaatgtatataaagaaaatatgtaataaaaaaagtaattgagctttcagtggggcatgatacagtggggaaaatccaggtcagcctggccttgtacctattttacttgcatattttattcatttagcagacattagtaaatgttttctatggattggtagcctggttggtactggatattcaaagataagcaaaacatttttttttccttttaagtagctcacatatgaaccaatactttttttttccagcatggtaagaacaataaatgtaaaatgctatttagcagtgaggtccagtggaaagcttgctaattcctattcaaatcgaccctggtaggtgacacatacctatttctagaaaaacagtcaagtatggaaaagggagagggattgaaaccctgtgaaaaaagaacaaaactaaactaagacaaaatatgtgttatggatagagacagcaatgataacctccagtcatgaactgtttgacattggacaaatgacttcttgactttgctcaataagtaaaagggagcaaattatcactgtattcaaaatgggagattacccatccaaagatctgtattggttcccctcttaggtaatataaatttaaagtattttgtgatgaacgcatagaaagcaggcagaatgcttgcttatcggtattgttcccgcatgggtgaaacacactttgttccatgttgaaaataggagtgggtgctcaagaacctgcttgccactaggggtagctgcatgcttagtcactgagaaaatgcatggtttaaaagtgaagtctacaggtggctgtgtgagagaacttgaggtaggatagaagaagccaaggagaaaggacttaatgtgacccaagaagaccgttaggtccagaaaaggtaggagattgtaacagaaagaggcaacttgaaatgagaaaggttactgtagttcaggcaggaattagagacactagacagggtgcaaaatgaaaaagaaatgtagcatctacaagcttgcatttgtgtgcttgtgtgtgtgtgcttgtgtttgtgtgtgctttgtgtgtgtgtgcttgtgtgtgtgcttgtgtgtgtgtgtggttgagggagggaaagagcgaggtaaacactaacagaagcaatctatatccagtagcaactttacagaccaaccttaagtgtaaaggaacaggataggtagtgaccttgaaggtttactcatcagttggcaagccctttgctgtcagtgcagcacgttgaagccctgttggtagccataagagaatgtcagatcccctggaagtggagttgtaggcacctgcgagccaaaatgtggatgctgagaacttagtccaagggaagagcaaccagtgctctcaaacactgagccatccccccaaccctggttgtgcttttaacattctcttttccactgagatcatttcctcccggctccagagaggaaagaggaagtgggagcagggcaattcaatgagggatcatgggtgtctcacgccatctcaatcctggacatgctttagctttagttttagatcccacctgtctttgtttccatgaaagaagttaagttctaatacatgatttttgcactgcaggtgttgacactccggggagatacgaggtatgggaaaaccctgattaccaatgatggcaccccgcttggtgttggtttcccggttggcatagctgttgatcctgcacgtgggtgagtgacaccaagtgacagtacgttcctgtctgcaccatctctgtcagtgtcctggtcctgttagatgaagtgtcctgttaacatttcaaactgtaggatatgtgacatttgaacaagttagacctcagtgaggaagagcagtcactgtgaagatcggtaactctggattatgttgaatgtgaaagatataggctatatcttcttttagaacaatgtgttctgacttatcagaccttaaaggctgagtagatgggaaattttaccatcctgttttcagtaccattgaaaatggcatgtagcccccataacagaactacagagacagtggcaggacgctggttaaatgttcccctacattgtgttgccctgatctatttcttggttcataaagcactcatctttttgcacggttctaggaaactgtattggtcagaccacgggacggacagtggggttcctgccaagattgcaagtgctaacatggatggaacatctttaaaaattctcttcactgggaacatggaacatctggaggttgtcaccctggacatccaggagcaaaagctctactgggcggtcaccagcagaggcgtggtacgagcggctttagttttcacgatctgtagtgtgaaggaacggctgtgtggttctgaacgtgctgagttctcagcagcttgaaccatggccttcctgttgccctttctcttgacgatgctcttcttactgtagtcttgtactctattcccctaactatgtgcaacacaaggaaatacagaatgacggttactctttttttcctatcaacctttggtttcaatcgggataagatatcaccagtttccacttcttacctgtcctttcagtgacatttatttaatgtttcagtgatgtcactcttttctttgagaacactctatgttctcccattgcagagtatatacacacacatacacacacacagacacatacaacatacatacacacacactacacagacacacacacacacagacatacataacatacaaacacaaagacagcacacacagacacagacacaaacatacacatacacaacatataaacacagacagcacacacacacacagacacagagacatacacagcatacaaacataacacaatacacacagacacatacaacatacatacacatacacacactacacagacacacacacacacagacatatacaacatacaaacacaaagacagcacacacacagacacagacatacagacacacagacatacacaacatataaacacagacagcacacacacacacacacacacacacacacacacacacacacacacacacagacacagagacatacacagcatacaaacacaacacacacacacacacacacacacacacacacacacacacacacggagactaggaagtgtctcagctcagcagctaaagacatggttaatacacagaaatttcctctgctgataattttaaactccaagatagagctcccttattctgtaatgagtgcactgtaaggttccatttgagacctggcttttgccgtatgcttatatagctgatcttggcaaaggaagcactcagtaatattagtgatgaattagattgtttgtatgttgaacatattctggactctttcaccagtagtggtttcaaattattgactctgatgttagccaaaatgatcatgcagtcgagtcaccagatattagcttcgtttctaataatagtaacaattactcttattagtaatagtatcatgagctacagttctggatagtaaacttagggcacttgctaactctacctaacacaaatgtagagcctctgctctcctaatatccacaatgatggtacctataggcataccttagaacaataaaaatagatcaaacttgcaacacgtgcatgagcaccttgtgtacttggatatgtatgtagcaatgagggggttcttgccacatgggatggtctcatacaagttattactggatctcccctcccttttcttacccatggtgtcctcccgaacctgtgagacctcttgtttccatctaagaaaaatagttctcctgtaatcatccaaggtccttgcttttcatcattactttgtcttatgtccagacttctactgtctcaattctgagccctctggccatgagcgacttggctttcatcctgttattgaattctttttcatgtttttataagaccactgttttttataaaactgcagttaccaatgtgatctttgcccagttgagagccctagcccagagaggcagcttcaaggttcgtctgctctagtcaccggcagcagcctggaagttcatgattctttttcgtctatgtttttagaatgtctgtcatttttggcgtataaccttgtctatgaggtagtgaataatccagtcctgtcagctatgcccaactggattgctgatgcaaagaaagtataaagaaacaggcttttggacccaagttaaaccagttacatctcccacactcctcaaaagcagtctacttgattctttctcaatggacaaaagccattttgacttcacaccatatcatgcttggccaccatgtagtaggactgtcctataattctggggggaacgcatctcctatcctgattaaagaaatcgcaggtaaagatgttacagccaatgtctgtcagctactgcatgatggtgcacgctcagacatttctatgcattcttaaatatactgtgggtgggtgggcgagatagttggctctttgtaagagggaatcagctcatgggctggtactatccatccaagacaaagatgttcgcctgttcagtgaactccagatggacccattccataacaggtctgagaaatctgaaacagagagtgccacagaaatgcaagacaatgttcatttgaacgcattcccttacctcattcactatgaatcagccaggtaacgagaattctgatctttcagattgaaagaggaaatgtggacggtacagagaggatgatcctggtgcaccacctggcccacccgtggggtcttgtggtccacggctccttcctttattattccgatgaacagtatgaggtcattgaaagagttgacaagtcctctgggagtaacaaagtcgtcttcagagataacatcccatacctgaggggtctccgggtttaccaccatcgcagtgagtacttgtcacgtgtgatgtgtagtcacgtgtcttcaccctcacatctagaagcctcttcccacactgtagttcctggtgcatgtttgtacatgtatgcagaattacttgcgagatttgacagttaagtgtctgactcatctgacatctcaaaggccagaattggcttctgagtaaacttactcctattctttcagagtttcagagacagggttcctctgtgtagccctggctgtcctagaactcactctgtagaccaggctggtattgaactcaaagatccacctgctgctgcctctcagtggctgagattaaaagtgtgccccgccactgccggctcttctcctaagttttaactctgaccctgcttttttgcataatagcacttctcagatgttatctgggttttattgtccaggtttcttgtggtaatagaacttccatgaaaggcagttgcgtcttttgttttatttactgatgtatgcctaagataaggaagagtatttgtctatgaattttaagatagaatttttattattagcaggaatacctccatccccccaattaactttagtttattgactcagagtctttgctatcagtaagaccttgaactcacagagatctgctcgcctcagacccccaagcttttatattagcaatttttagtttttagtctctaaccaaagagcaacaatgttgtttatttgctgtttttcctgcatgtgattaaagattttaaatatccttctctcatggttgaaaagcaagagaggcaaaatgccagttataaatttctgccatctttaatccttgtgtgcttttttagggaaggaaacacaacacaacacaatacaacactgctccatcttctaactgccatacactgtttcctcccattactagttaggcattcaaataaatccccatctttcagtattgattttagcctgctgatcttgttattacgtgcttcttatttttatactattcagttgactcaatttaaaaaaaatgagctagcctgccaagcacgtaagattaaagactgattttcaaattcttttagatgctgctgactcttccaatggctgtagcaacaacccaaatgcttgccagcagatctgcctgcccgtaccaggcggaatgttctcctgcgcctgtgccagtgggttcaagctcagccccgatggtcgctcctgttctccatataactctttcatagtcgtttccatgctgcctgcagttagaggctttagcttggagttgtctgatcactcagaggccatggtgccagtggctggccaaggtaagggaactcctaaataggtaaactttgcttctgtccggtgtcagctccagcttcattttatcagactgttctgaagggcagtcaaactcagagctgagccaagtcctatccctggagtttgctcacttggaactctgggtcatggctagaggatctgtattcctcatggaaccagattttgttggtttatgagaaccacaggcccagggagacagaaagcataagcatggatttttcttgaagtattgaagaatgcttgtttaggaaaactgttctgtagcgaggtgtacgcttgttatatataacatataataaaataatccacaaatattatttttttggggggtgtgtgtaaagtctcactatgtagctttggctggcctgaaacccaggctattcttgaattcagagtcctcacctgtctctgcctcccaactgtttgaattaaaggcatgtgccaccacacttgattcttaataactatatttttacagcagttatgtttgtgtactgtgaatctgtaaatatgtcttttggatatgccaaggtgtgtggctagaactttctagagttttctagtaccataaggactatgtgagactatccttgcaaggatacctgttttagaaaatcaaggcttggtggtgcttatagaacagtgcttgctccgtggtagcattaagggccatggatttgttcctcagcatcacaaggccaagccaaaccaacgagaaaaaggaaacaaactcagaagaaataaaccttgacagggagtattatgttctcgatatgggatctttttagagtatcttgtcagtaatttagctaaggtgttcacagtcagtcactgctttgtaaagaggcatttccttgggctatctattacgtttgacttgggccccagaagaacttgttccctaagctaccattgactttggcagtcaatggtgactactcatcactggtgatcctgcctgaagtgatcatacacgatcatcttgttctgtcgttctttcacatttattactaatattctgcacctatgaaatctcaacaccagctgacatgtcagtgtggacagtgggcatctcacacacaaggccacttccctagatgaagaactgcttgaagagagaatcagccttcccagggatgagcctggctaactgctcatccaacactgagccgtcagtgcgtatggacaacactcagcagactcagccccttgtagttacatatgtacatgtatgtatacatgcaatagtaagaaaggaaaagacatagaagcacatgaaaatagaatgagaacttagaagcagacgacagggaacagtagtgaggagcaggatgttgataacaggggtgcaaagttacaatggggcacgcaagtctgcatcatttaccagtgctaacagaaaggggaaggaggtaccagatcacttggctgatttttcttaaacgttctaggacgaaatgttctgcatgcggacgtggatgttgccaatggctttatttactggtgtgattttagcagctctgtgagatcctctaacggaattcgtagaatcaaacccaacgggtctaattttaccaacattgttacctacggcatcggggcgaatggaatccggggtgtggcagtggattgggtagcaggtatgtggtcctgtgcctttgtttttccatctctgtcatctgaattgctttttctagataaccaataagatcatttaagactaggctactcactcactaaatcaaaagatgggatgttttgtttgacagattaattatggaagaatcatttcgttttcgtctacttgttcaatcaagcaggaaaaaatattaaattgtgggtttgtagtttttgtcctaaggttgacagaaaattagattagaaagatccaaaaagggggctggtgagatggctcagtgggtaagagcagtgactgttcttccaaaggtcctgagttcaaatcccagcaaccacatggtggttcacaaccacccataatgagatctgatgccctcttctggtgcatctgaagacagctacagtgtacttatagtaataaataaaactttgggtctgagcaagcagggccgactggagtgagcaggggttctaaaattcaatacccaattacatgtaggctcacaaccatctgtacagctacagtgtactcacatacataaaataaatctttaaaaaaatgtgaagaggaaaggcgttcacctactttaatgtcaagcagtgcagttctagttgcagattcttaatgcaacttagttgcttcctcattaatgcatacaaaaatcatcgggtgtttctcttggttactagtatgcccaactcactattttgttaacttattcaggtttgagttatcactcattcctatgcttggagaactactacactacaagttttgtgaatatatttttaatcaaaatggatatcattgtatattattgagcttgataagcagacagtgcttaaatataagcatgcattgtaagtagtaaatctagtaagttagctaaataagattttaatggattcccaattcccaccctgaggtgcactgtttctgatggtgtgcataaatagggtcagtatggcagggccagaaggacaagtgtagcctattttctctttcataccattttactgtgacacacttacggtcattcatttgtggttttcagtggctgttgtcacgtcacaatgtcagagttaaacacttgaaggagaaaccacttatttttggctgtgtgtgttggcctatgcctgtaatctcagtgccagggagagaaggcaggagtatcagaaaagagttaaaggcatcctcagttacatagtgagctcaactcaagccagagattcaggaaaccccactcagcaagcaagcaagcaagcaagcaagcaagcaagcaagcaagcaagcaagcaagcaaacaaacaaacaaacaaggaatcaaaccccacaagcctaaaataccacctggtactattcgacaaccctggattaaagtagtacacagtatcacaccagcatcccatcactagagatgcaacgtatagaaacatcagttacatatttcacattggaataatttctctggctattttttgaggcaggctgggaaataatatgtgcatagtattgatagttcaataactgacttgacatggatcagtaattgaggatccagcagcttccactcataccacaaatccattttatagtacttcacgtgattggtatgttattctcgaatttacgttatactttaacacaaaagggaagtggattttgggtttggtggctatttataaagtcaatggataaaaaccatgtacactagttaggaagacttaggaaagatcacattaaccttacatacaaagagcatttgaggatatgtctagcaatctgaggtggttatggctgtcttctctgctcttttaggctctaattaataagctttataccatgataaagtatatttaggctctttggtaagaatgttaaagactcatgttttaagtagaagaagaaaagtacacattttagtaggaagtgggttgtaatgctagctgtgaattctaatctgaataagaaggaagctgaagatttttgagaaaatagattttaaaaagtattccctttatgtttatatgtttatttttatatgcttacattgaaatttattgtcttgaaaatacaataaatttgtttatatttggtagttctgttcccagtgtccatctggttgtctttttaaagtttcccatacttgccaatatttctccgatcatatttcaacctcatacattttattacgcatgttttccttcttggtttttcactcatcagcatccttctttttttttccctgtaggaaatctttatttcaccaatgcctttgtgtatgagacactgatagaagtgatacggatcaataccacataccgccgtgtcctcctcaaagtctcagtggatatgcccaggcatatcgttgttgaccccaagcacagatatctcttctgggccgactacgggcagaagccgaagattgaacgctcttttcttgactgtaccaatagaactgtacttgtttctgaaggcattgtcacccctcggggcctggcagtggaccatgacactggctatatttattgggttgatgattccttagatataattgccaggatccatcgtgacggaggagaatcccaagtggttcgttatggcagtcgttacccaactccttatggcatcaccgtctttggagagtcgatcatttgggtggatagaaatttgagaaaagtcttccaagccagcaagcaacctgggaatacagacccaccaacagtgataagagatagtatcaacttgctacgggatgtgaccatctttgatgagcatgtccagcccctctcaccggcagagcttaacaataacccttgtttgcaaagcaatggtgggtgttcccacttttgctttgccttacctgagttgcctacccccaaatgtggatgtgcttttgggactctggaagatgatggcaagaactgtgctacttcccgagaagatttcctcatctattccttaaataattccttgagaagtttacactttgaccctcaagaccataacctgcctttccaagcgataagtgtggaaggaatggccatcgcactggactatgaccgcagaaataatagaatcttcttcacacaaaagttaaaccctatccgtggccagatttcctatgtcaacctgtactcaggggccagctctccaactatcctgctctcaagtaagcgcacaccagggttagggtttaccttggcactagatataaggagggccacataccgaatcgtcttaatgccctttgagattctaacatcttatgagtatgtgtctttctatttgtgtgtatccagatataggggttactgatggcattgcctttgactggataaatagaagaatttattacagtgacttttcaaatcagacaataaattccatggctgaagatggatctaatcgcgctgtgatcgcccgtgtttccaaaccaagagctattgtattagatccttgccgagggtatgccaaggtcttattgatttatctgcttatttgaggatggagtggggactagaaattactttatgggcatagagaataataataatagtgtataaacttgcacagagacagagcttttggtgacttttcctggtctgacttagagcatccatttgggcaatgtagtctgaaaaagaatggaatacttctttacttttatctgtatattgatggttattacaatcaatgaatgtttccactgtaaagagtggaaaggttttaaaaagcttcctggttgtgaattaattatgccttctgtttgactaactaggtacatgtattggactgactggggtaccaatgccaaaattgaaagagccacactgggagggaacttccgggtccccattgtgaacaccagcctggtttggcccaatggactcactctggacctggagaccgaccttctctactgggcggatgctagcctgtaggtgtctctgaatcacatggatgttggacatagaaggacttgcttccatgctatgaaaatctgataaaccagagagattattgcctaaatgtagaattgaagttttaggaactattttatgctctagcttggtctatatcctaaatctatgtctaaatctccacatcactaagtgtaattataattataatggaatcactcaatttctgacgtgtaggcatcagatctgaataatgtgtctgttggtttgggctctctttttctctggcgtgcttctcagcaaattacacttgcaaactcccttttaacataattatgggatatctccaagtagctacattgtagtcatcctgattgaggagttcaagagatgaaaagattttattcattacagttgtttgtctgtatgtttgtttccctgcagatactggccttgtgatgaaatattctgattttttttcttcatactctcatttgaaccatagcaatgatgttctgtgtctttctaagtaaattcctcaaagtaaccaataacagaaaggaaataaattctttttagttttttgctatgtttcacatcaggtcccatgcattaagcaaatacttccttggattgttcctgcttctaatgttagcctggttcggatgaaatgatatatgtaggccattgtatgagcaaataagacttaccatcaccaagaaagagacgtgtcatgtctacactacttgactagccatttgaagcaggcctaaccattataattcttttttctgcttagcaatcgcttttctttctctttgcttcaggcagaaaatagagcgcagtactctcacgggctccaaccgagaagttgtcatcagcactgccttccattcctttggcttaactgtctacggccagtacatttactggacagacttttacaccaaaaaaatctaccgtgctaacaagtacgatgggtcagacctgattgcaatgaccactcgtttgcccacccagcctagtggcatctccacagttgtcaagacccagcagcagcagtgtagcaatccttgtgaccagttcaatggaggatgcagccatatctgtgctccaggtaaggggcggagcaggaagatgaaaacaagtatttagtgacaaggactgtcaccacaatgacaaggacactcggcgagggaggctgcaagggtattacctccaagaagaaaaagaaactgaaattcttgatttcaggttatttatcaagtgtactaagggttatattttgagagcattgtcttgtgggtttctgatctgttctacatggactggctttgtaaaggcagtttaagtggaagcttgttgaagggaaagagtaagatgaaaaaggtttggctttctgactggaataggattccattaacgtaatctttctgtttaggagctattgtttctagtgtgatattttagggtgaaatataaatctcactgaggacagcttcataggaatatgtctttgtgaattcttccatgggagtcattgtgctgtaggtgggcgtcgattgtttttaatagaaaaagagatcagaatatagttgaaaggtagatggtgtcttagttagggttttactgctgggaacagacaccatgaccaaggcaactcttataaggacagcatttaattggggctggcttgatgatgtccattatcatcaaggtgggaacatggcagcatccaggcagacatggtacaggaggagctgagagtcctacatcttcatctgagggctgctagcagaatactcactttcaggaagctaagatgagagtattacaaccgatacccatagtgacacaccctactccagcagggccataccttctaatagtgccacttcctgggatgagtatatacaaaccatcacagatggtgtttcatctcacagatgtcgtaaacgccattctggagaagtctaagaaaggtttctatgctcatggtttttttgcttctctctgtcccaggtccaaacggagctgagtgccagtgtccacacgaaggcagctggtatctggccaacgataacaagtactgtgtggtggacacaggtgcccgctgtaatcagttccagttcacctgccttaatgggcgttgtatctctcaggattggaaatgtgacaatgacaacgactgtggtgatggcagtgatgagctgcccacagtctgtggtgagctgtagtgtttagagctaagatgtctttgtgcgagtgtttggcacaaagcactgtgtatgaatggcttttctgttggagccaaaaagcattcactctgataacccaggctatatttctgtttaatcacctccatatagatgagtaaagtcattagattaaaatcctggcattagcatttctagtctctgtagagcttggaaatattgctcaggtagttcatctttaaaacagtggttaccagagatcctgtaagaagaagggagcaggctgtggagcatgacaatatggcactaagagccccagcgggttactgttatcattttattgcactgtttctgacagtccctgcccagtttttatgtcactggagtgagacacagtgggctttcaaggggatttgtagttgggtatctttctctaacagtgtgcttttgaatgcttttctgcatttgagataaacttgagaagtgagattatggacaaatgaagtgaatttcatggctcacttaaaatgctttctttctttaaaagcactttgcatccagtctgactttcaggcatttctgtcttagaagtgagacaaattttaaccctaggagtgttacaatgttaacgttacaaattgtaactggaaggcatcttctctccctgtcctttcttcctcccagcctttcacacgtgccgatcaacagccttcacttgtgccaatgggcgatgtgtgccataccattatcgctgtgatttctacaatgactgcggggacaacagcgatgaggcaggatgcctattcaggagctgcaacagcaccacagagttcacttgcagcaacgggaggtgtatacctcttagttatgtctgcaatggcataaacaactgccatgacaatgacacctcagatgagaaaaactgccgtaagtgtatctttaaatctttcctttggggtctgtggtcacacaggagatgaaatgtttccataaaatctattgctttctaaaaaaaaaaaaaacctactgtgtgtttgtaatagtcaattaaatgattataaaaatatatctagctaacatttgaattgcttgcttaatttgatggctctgtatatatctgctagattaaaaactcacctcatgaacatgtttctctgccaccctggaaccaacttgggcctctctttaccaccagcagcatgaactgtgctttcctgcacacttagaactgatttggacccttccctgagtctgttaactgagtcgacgctgtagatgatatacttggtagttctgttttaagtgtctatctggttgtctttttaaagctcccatcacttgccagccggacttcgcaaaatgccagactacaaacatttgtgttccccgagctttcttgtgtgatggagacaatgactgtggagatgggagcgacgagaaccccatttactgcggtgagtacgacaaagctttttcgccctctgtgggtccaggggagcgactagggcagcacagaaacatcctagctttgatattgagtctgtaaggagatgtggaaggcagttgctttaagatatgaggagagtggtgggagaagtctcttgcttcaaatatatttttctggaaacctgttagtatccaggcctttaaccctcaatctgtatttgtattatcagcagttattacttctgaatattatggccgtgatcttgagtagcttagttttattgaaacaatttcctctatgaacagaggaaatgaaaaggtctttcttaagtttaataattttgagaataattagtatgaaaaggggtatcttttaaaaattttgccaatttcttgtagctgaatttctcatcacatcctgaggaaaccacaggctatcacaaaaatttgccagagcaggactcaggtacaatattaacagcagcccaaagaaacagaatttggcttacagcataacacagggtagggcaggttggagttactgcttttctaacaagtgtttaccggcaaatccatctggcactattaaggcccaggcaagggagagccttgtagagtagaatggcaagaccccattcaggacaaaaattcattgcaatatttgtgaccacacagtagaagctaacataaagttcacaggtagtcatctctctcatctaccctaacaattctgagttacagtgagtaggtgagaattttgcttacttttgagaattatgattaacaaattgtggtgagggatagaattgagtgtaacattgttttaatagaattcacttaattaaaaaaaccaagccgggcgtgatggcgcacacctttaatcacggcacttgggaggcagaggcaggaggatctcagtgagctggaggccagcctggtcttcatactaagttccaggacaaccagggctaggaactttgtcttgacaaacaaacaaacaaacaaacaaacaaacaaacaagaaaaaaatcaagacttattttgcacagttttacagtacaatgtcattttttgatatgttaaaatctaatcagagttgatagattattgggacagaatcttcatcttttgcctaggttgtccttgaactcagaatgcaaggagcttcctgtctcggacttgttgaacagccaagagtgttcacctgcctgggcgctctttggaatttctagcaaatagaacttacaccttgtatttatggagtcttgaataaaaattcaggagaactgggaaatattcccctcttgtatcttatgcacctgcagccccatagtaacttacagacaaggccttttccccatggcagcaattaaccagttcagagatacaggcagatgggtagcagatgggagtctgttggtgttttaatcttgtgcctgtcctccagcctcacacacatgccgcagcaatgagttccagtgcgtctccccccaccggtgtatcccaagctattggttctgtgatggggaagccgactgtgtggatagctcggatgagcctgacacttgtggtaagagtcagcaaccgtgggaagcttagggtgcagttagagaggccggggctcctcccacacatcaaatgcaggagccacactgctggctacttactctccttgttcctgctcccagaagggatgccagaaccatgcagtaggtgctcatgagcggctagtgcaggcaatgagggcagctggggagaatatgggggctattagttgatgttgatatattgagatggtaatgcatccagtggatcatctggcttgcagctcaattctagctgattctcagttagagtttaggaattttgtctgagccttttaagacagtaggaggatccaagagtgactggattcttcatatagggctcagagcaggcacaccttattttatttctttttctactaatgtttggtaggccctcatcgaggcccatgttccttttttgtattcaaagcttgctttttactgtcacaaatcctcatatgcatcgatgcatattcactgaaattaattgtactcatttccgaggtgcttttttaacccgtcataaaatccttgctatgtagtatctagaaaagtatggttacagactagtgacttgactgtatagatgaatgttgtcacagatcatccatggctactttcttgttttgtgctggaatggcaataccaagtaggcatggcagaccatggagctacaaggccacctcagtattctctactgagttgagaaaagcctactcatccttatgtacattcttcatactcctctttagtgatgtataatattcctaagattggtatattattaagcatttttctcttgtattattgtactatgtaacatcgtatataaaacccttgtctgggttgttcattagtatagttttagaattaaattcatgctagtttccattgagttctatgaagtttaattctatggctgattgctagcagttcttggccaagttttacttttgcttttgtatcctcactgtaacactgataaacgcgtagaaaatcaagggtacctagagtttgagaatctgcagagagaggagataataagtgttaggtaagtttataactttgaaattattctaatgtgttcttgtgtttaaaacctaaaaataagaattttcatagtcatagtagtaacagcaagtagtagttgtggactgcattacacactgtagtaacccaagtgtggccatatatcttataatctgcactttggatcacagtttttccctgagtctctatgcagctcactgtcagccttctctatgtgtctgagacgatgttataccccaccctatactgctgcaccgcagacctatcacatttgtaaaatcatttgtgaaatcatctcaaaggttctgacagccgtaaggtttcatgtattcctgatgtgtatgtgagtaaacttctcactgacataaaccacgcttgaatgtccttgctggagacatcccactcttttcatgagacttcctctcttgtcagggcattctctaaacagctgctcagccaatcagttccactgtgataacggcaggtgcatctcaagtagctgggtctgtgatggtgataatgactgcggagacatgagtgacgaggaccagcgacatcactgtggtaagtgaaggccgataattcctctgtagagtcacattccagggaaactcagagccgattatcatggttggagggcccagttgtcagaaactcctgttgagtgaatgcacactaacagaatgctaccattatttcctgctgttggacaccattgcttacattttaccacgaggcaaagtggccggagctcattctccttcatacctggctaatgggaattctgtagtaggtgacaggaactcagttgctcatttctgacaatggtgtggcagccaatcaccctaggagctgtgatggggttgggtagttgtggtattcatcagtgagttcattactgagtaccactgtttcctcttttttcaaacaacgtattttgatcatattctttccccttcagctcctccccattccaacccacccttaacgaagatgctatgtgcaatggatactctaatggagtgtgagcggctatgtcagtattccacggcaggctccatgcccgagagtagtcagccaatacaaatgaactcaatggaatttttgtgggtttttgtttcattttgcttggttgggactttttgtcttggccttttgtctattgactctttaaattttttgtttcttgtctttttttttttttttttttttttctgtttgagagaaagagaaaacaaagttatgggtttgggaggtgaggaggatccaatagaggagctcagataggggaaggtatgatcaaaatgttgtatggaaaattttcttgagactgtttttttttttttattggtgacattttaattttattcagtcccgttacttcttaaaatttgattgagccaggcagtggtggcacacggctttttttttttttaattacgtattttcctcaatgacatttccaatgctatcccaaaagtcccccataccctcccccccacttccctacccacccactctcatttttttggccctggtgttcccctgtactggggcatataaaatttgtgtgtctgatggacctctctttccagtgatggccaactaggtcatcttttgatacatatgtcgctagagtcaagtgctccggggtactggttagttcataatgttgttgcacctacagggttgcagatctctttagctccttggatactttctctagctcctccatgggggggggggctgtgatccatccaatagctgactgtgagcatccacttatgtgtttgctaggcccctgcctagtctcacaagagacagctatatctgggtccttccagcaaaatcttgctagtgtatgcagtggtgtcagcttttggaagctgattatggggtggatccctagataaggcagtctctagatggtccatccttttgtcgcagctccaaactttgtctctgtaactccttccatgggtgttttgttcccaattctaagaaggggcacagtgtccacactttggtcttcattcttctagagtttcatgcatttggcaaattgtaaatgataggaaatgtggttacttttataacacgagtactacattgtttttattgccagcaaaacctggagttgctacctgaggggctttagttagcattgtgtcacctttccctcttaacatagtaagggcagaggttcctggtgcttgtgtttggtagtgaactcacttgctgtggccagagctctacatctgctctgtcattgatgacttacacgaactattttctcccgttttctcttacgtcttgtttgcgagaggattgaataagacatgaatggttccgaatcagtatctcactttcttccccgttgcctttctggcaactctgacctctcctagcattcctcttcacttgtgtggtgcttgcaatctgtattcaaatctgtatgcctcaactttttagaggagaaaggtctcttccgggtctctgactctgagatgcccagttaaccactgtgaactcagttttctcacacattaaattggcaccaagatagtaatcgcattttgtacgtatatgattatacagtggaatatgaggcatggtgtgagaatataagatatttgttcaatccttcggaagatggaggaaaggattggaggagccagggggatcaaggacaccataagaatccccaagagtcaaacaacctggcctcataggggcttcatagagattgagtggtccatcagggagcctgcatgggtctaacctaggctctctgcatatatgttacagttgtgtagcttggtcttcttgtgggattcttaacagtgggagctgagactatctctgactcttctgtctgcttttgggacccctgaactcctcttgggttggctcatccagctttaatattaagggaggagcccagtcttattgcaacttgatatgacatgtttgactgatatccctgggaggtcttccctgttttgaagggaaatggagaaggagggggtggggagggggagggagagagggagaggagcgagggaaaactgcagttagggtgtgctatatgagagagtaaataaattgtaaaaaggcatttgttcaaattttaaaaatggaagtcatttcctgaagccttatgggaaaaaattttatgtaaatctcacagaagagtaagtagagtctttatgccgaggttttgcttctgtaaaatccagaatcaaacagttgagacaggtctcaagaactctaagagcctttgcgggtgtttatagtcctaccttgcccatatgattagcgagagggttaaagatgataagattgtgaagagagcatttccgggctctgagggattcttgtctgccttggtttcagagcttcagaactgttccagtactgagtttacctgtataaacagcagacctccaaacaggaggtgcattccacaacactgggtctgtgacggcgacgcagactgcgcggatgccctcgacgagctgcagaactgcaccatgagagcgtgctctacgggagagttcagctgtgcaaatggacggtgtatcaggcagtcattcaggtgaactgggattcaaacacatccctctacaccccaaatattcacgggggcggggatgactcacacattaggcacaatggtcacatgatccaggtcagaaaaaagtgttttaatatgtaacatgttaatacacgttttataccgatgtggttatttatgtgtttttatgggtgacgtggtccaagaagatcccagggttcatgaaagccataatgtggccttccacagagaggcagagaaggagttaacttgacattagttggtgtgtctccttgtcttccacttgggggcaggcatggctctaagaactgtttctgtatttgctctctgctataagaagaacagctctgtaagtacacttggctcagggtcaaggcaactaatgctgagtgttaggtgagaaggccaaagcttttgaaaataaggattcctatgtagaatatttaaagttcttgacactgtctcaaacagattccgccccacagtatgctgctttggggaatcttgtgatttcctgtggtgtggtttctcaccgctttctccaaatgggtctcttaaaatgaattttgtttttgtagtgtccagcctcttaccactgtatgtagtaaatttttggctatagaggaataaagggactaatagaagcctcaatcaaaataaagcaacctggaaagaagtttgctgatgggagaaagtactcgatgttgtagacattccttagatgtaggcactaggcatttggttatgtggacctgaaacagaggtacaggacccactcgggggttaaaaagcacaggggctctttcgggcaccaggaactatcaggattccacggctagagtaggagattgaaaggtcagagcagcagaggcctgaggcagatgccccattgatagatattgagataggtctggaatgcaggatggccaagatttttgtatgatggtatcctgaagaggaaaaaacagttatgtgctataaaagttgaaacattgagagtgggtcttagcatgtagtgcagtgaatggcagtgagtaaggacagatgtatcccagaaagtgtatttacagttgttatttgggcagtcaaagtgagtcatctgcctgtctggttaagagttctgttctagtttcagtaagtagtcaattccattgctgttagatgtgaatatctgaaaacccagggctttgttttgattagattgggttgtctctgcctccctctctatggtcccttctacctgactcctgttccccttcctttctaccgtctctctgctcccacaccctgtactttcaggttcttactgactctggtcatttttctctttttctcccttctttttctgctgtcctggcattttcttactcctcatatttcttttttctttctgaatttctcttggcagtgctacagcagaaaaaaaaaaaaaaaaaaaaaaaaaaaaaaccaaagcaaaacaaaagaaaactgttctctggaaacctggactatagggcccagatcctatattatctctgcaacatcagaatcctatatatctaagtaaataaaacctccagcctggcggagtgtgtgctcccccatttgacactgtgggacaaggggataattttcttcttgacacattgtggtggtgcttgctgagactgggttacggcaggagtgctcgctggggtaatgggatgcactcgtgccagaaacctggtgatttgctcgctgtgtaagctagttaaggggggacactagtgtctcagatcatttgggaattatttgattttctggaaaatcaagtgggctaagtctgttttctttgaccaaggatttcttcataaatctatgcttatgccttaggttgaaatcatattggcagtaccctagcttgtggatggcagctctagttagcaggcatggtcagtacacagctgtagaactgactagattcatcttgggtgccttaatacctcatgaccctcagtccttagctcctgggccttcttccatcatttaatgaattatcatatattagcattgtttatatttatcctgaattcttttatatgcatgataacctgtcaccatgatcctgttcagtaagcgtggcttttcatgggatctttgaccatgagtatgactcatggtagatcatgaaactgtgtcttacttaggacctgggaatgataggtatcagagctaagactacaacatgcaaatttgccatcacttaatgataatctgctgcttttaatcttcctattgccataactaactcacatatgaaaaatcccagtagaattatatgaagaggtctgctgacgcaaatattaccccagtggagagatgggtgttttaaaaagacactatccaacaacagttctataggacacagagttcatgctgaagacttgtatacaatgtgtctgtctgcatagttccactgtccataaagctattccatgagttacaagtttatgaatcatgttatttggcctataaaactgtgggtgaatgaatctatgtttacatttattatgcagccaccagcaacaggggaattcatgcagatggccaaatggattgttccagagttgggttaatgcatattttggaggtagagagcgtaaggtacagtaatcttgttaaaatggtctccgtggtcctttgtctcgtaacacaggtgtgataggcgcaacgactgtggggactacagtgatgagaggggctgctcgtacccaccctgccgagatgatcaatttacttgtcagaacgggcaatgtatcactaagctctatgtctgtgatgaggacaatgactgtggagatgggtcggatgaacaggagcacctatgtcacaccccagaacccacgtgcccccctcatcagttccggtgtgacaacgggcactgcatcgagatggggactgtctgtaaccatgtggatgactgctcagacaacagtgatgagaaaggctgtggtgagtacaggagggggaggaactgacctctctattgctgccttatgaacagatagaggtaggttggcataccagggagagcaacattcagggtgtcctttaggagaattactcaacaaggcatgcagaaagaagagagcatggaggttctcccagggtccccagagtgagttcttggcttgcttttcatatttatctttgggagactggaacatttagtctccttttcccactgacaaccaagtgtaaggaggcagctgaagcggatatgaattgtgcccgtttgaatttcacactaccaatgggccatgctctctgtgcagcttactcttgcttgttcttttctgcatggtggcattcctggggggtggggtgggggaatcaaatggtttaaaagcagcccaccactggtaattgagtgttctcactaaatacatttgccaaattgactcaaagtgtgtgtgtgtgtgcacacgtgtgtgcatgtgcagagaaatctagaatgaaaatactatggaaatttgtggaattataatattataagttattccctgaagcacacaaaattatttaagttttcatcaatatttaaaaatatattacattgtaaaatggcatgttttatttagatgacacacatgagtatagtacgataaagtttttaatgaagatagagttccattgctgtttatgtaatattttgtttctgtttttatttcacatatttattaattttgctatttggggactgggactcactttgtagctctggctggcctggaactcactatgtaggtaatggagaactgtctgcctctgcctcctaagtgctgggatttaagacagacaaccatgccctgaccttttctgagaccggatcttactgtgtagttcagtcattccttgtctccttcagtctttcaagtcctggggttacaggctcacactgccatacctggtactctgtaggaaccaaatcctttgtgatacatcactcaattttaatgttcagcttgaaaaggaaagtctctcttacaggcctatttaacatccaaactcacagccagcaggattgctagtaatctagtacacgttattctttttgcaaacaataaaaccagcagatggctagagaatgaattgtttagggttatgtggtaagttaacagttgaagtagatttggttggatcatggttttgcatctgccattcattaagaagtctatattctcctgctttagggtgggcttggccacttgttacagtgtcagtgctgtgagggacctatcttcgggcacatcccaacccatacgacagatgtatataccacactggtagcttgtgattagtcagggcacgagtgtcgcaccactgaagtgggatgtgttacaagtgaacacactagaccacctcttgccttgtttcttcttccgccattttgtgactaagcttactgagaaatgggcacagtagtttgtgactaatgtcccagctacttgggaaattttagctgagtgttcaagactatttctgcttaaaagtactagtcacattaattgttaagatctggggtaaagggttaagctgggtagagtgtgctggatatccctatacctttgtgcaggtgactgaagaaccagtaaaaatctatggctgctattgacacgtattatactgttcatatgcatatatacatgtctatacaatttgagtatttaaacatttcagtcatgctgtaaactttgaaaaggaaatttactttgttgcacagaaattaacagccttcttagatgagagactttaaacttagtttttctccagttttaaatatgtcttatttaaggtagtttgattgtaaaagcttaataaggaattctctaaataatgggaggaaaaagattgagctggggaggaagttgaaaatttactgacttttgaatgatcaatgtggcctctttgaagatcccagtggcctctcccgttatgatttgctaagaactggcaccgtatggtaggggtgttgattttgagtgtaattatgggcctatggctgatattttaggttctctagtaactgtcttttgcctgcaggcattaatgagtgccaggattcttcaatcagtcattgtgaccacaactgtacagataccataaccagtttctactgttcctgtcttcctgggtacaaactcatgtctgacaaacgtacttgcgtggatattgacgagtgcaaggagacaccccagctctgtagccagaagtgtgagaatgtcataggctcctacatttgtaagtgtgcccctggctacatccgtgagccagatgggaagagctgccggcagaatagcaacattgagccctacctcgtcttcagcaaccgttattatataagaaacttaactatagatggcacgtcatactctctgattttgcaaggattgggcaatgttgtggccctggactttgatagagtagaggagaggctgtattggatcgatgcagagaaacaaattatcgagaggatgtttttgaataagacaaaccaggagaccatcataagccacaggttaagacgtgctgaaagtctggctgtagactgggtcagcaggtaagaacacaacctctggtacgggctcttgtttttcttcctggtttggacagtgtttctttgttgtggaccagcatatgcatgtagaagggacactgggttggcagaagtggaccattgtgccttggcttcacagagtttcaggggattctggttccacttacccaatgagccatctttccaaccatggcgatttgtaaaaccattagaaattctgagtttttcagggcaatagggaattgcttcttttagcttaggtatgtagaaccatttgataacctttcctgtttccctgtgtcctcttttgtttgaggaaggtaccatggaacagatgtatgtacgaatcttagggcactgggcatataaacaaagggtccatcatggtaaccactgtctttccattgcagaaaactctattggttggatgccatcctagattgcctgtttgtctctgaccttgaaggtcgacaacgcaaaatgctagcccagcactgtgtggatgcaaacaataccttctgttttgaaaatcccaggggaattgtccttcatcctcaaagagggtatgagtcctctgtaatcttgggccttttctttcatgtatttcatcacttgttcatgtaactacttatggatcaatatcttgctgggatctgtctctgtttttctgcttggtgaatgtgttagtgcaatgagcagcattcatttctcattcaaaggatatctaacagatggactcttgtctttatcttttcatcttctgagtcacatttgagttgtatgcatgggagattgtggtatttctttagtggatccctatatcaaagccactgaaatacacaagggttcattttgaggactgttggtcaccatccttattgttatgaatattttgccaggcctctttcctttctgagacactctgagatgggaacttcatttctttagatggagaacagctgtatcttttggttttggggtctgaactctctgtgcttgctcccataggtatgtctactgggcagattggggtgatcatgcatacattgcaagaattggcatggatggaaccaataagactgtgattatctctaccaagatcgaatggcccaatgccatcaccattgactacaccaatgatctcttgtactgggcagatgctcacctgggttacatcgagtaagtaccttgggggagaaaagatgaactaagtaactaattacaaactaacagggttgtgctttcagaggattcatctcaacaatcgtgtattcatcttccaactggcccgtggactcagaatcactctgagctcccttctcttttctaagacaggagctcatgtatcccatattggcctcaagctttctgtgtggctagggatgacttttagttccttactttactttactacctacaggaagatgcatggagctctatagaaataagcagaaagagaatggttagagtttatggctagtttatggttagttaaggcaggttatcaggagcctgtcaaattgactcagcaattcagagatgttctcttcttgcagaaaacctgggctcatatggaatggctcacaatactctgatacttcatctctaggggatctgatgcctctggcctctgaagacacacacacacacacacacacacacacacacacacacacacatctagaaaactagaatgatgcttatctcaggaaatcaaaagtgctcaatgggcggagccagcataaaacattattaacccataatacctaaaccacagctatgaactggtgattctgtcaatctctgtggctattacagtttttgagtatagcttttaaactttgatgtcatttgccatttctttagagacccaggggtgtagaattttcctgattgatggctttacacactgatcctggaggacatttagaggagaggggttactaacgtgcttttctttctaccaccaggttctctgatttggagggtcaccatcgacacacagtgtatgacggaacactgccccacccctttgctctcaccatttttgaagacactgttttttggacagattggaatacacggacagttgaaaagggaaacaaatatgatggatcagggcgagtcgtgctggtgaacacaacccacaaaccctttgacatccacgtgttacatccataccggcagccgattagtgagtaactggtggactttgggacagttgcttttgggaacatgatttgaaggaactcattgacacttgttaatgttttctttgaaacagcttttgagaactaagaggaattcatttccctacttataaatcacatttatattctgcagtgctgggctagaacccaggtccttgtgcctgtgagatgagcactctgccaacgagctgtgttttaagttcttagttttaggctaggtatgtagctaagggtggccttgaactgacaagtgacctcctcctaagtgaatgacaggtattcccatagctagtattttggtgagaggactgttgtattttaaggtgagttaaatttcaactgattccatccctaagtactttgaaaaataacattctataactctatcagtatgcacctttaacaatcatcccttaataacaaataaaatttagaagaaaattgtagtcattataaaatagttattatatctctgctcatggcagcttggtttgagtcacaaaaatgttattattctcctcttctgagaaaataatggtggagggaagagcatactccactctgagtttttaattctgcttcatgcaattaaagttaattaatcttttcgaaataatgtgggagagatttgaagtatacttttggggacgcagattggcttttcggggtctgctttgttgtaatgtcttgttaaacacatctttttttttctaattttttatgctttaactagctcagtgcctgggcacttctaaacctcctcacagccagcacattctcctctccagcgttcctgacttaacacttaaatatatattttatcttgatgccctgactccttctgggcggctcccttatctttgctcctcaagctgcttctggggctgctttccttcttgttcctacatttctgccattgtgccctcctgttccttcctgacgtggcccatcctattcccttcttctggctgagatcctttctttcctctccccttgtttcttcttccaggaacctagaaatcctctccctctccctctccctctccctctccctctccctctccctctccctctccctctccctctccctctccctctccctctccctctccctctccctctccctctccctctccctctccctctccctctccctctccctctccctctctctctctcttgccattagctgttgactctttattgatcaatcaaaagtcaattggggacagggacctttggcatttggacatgcagagtattcccattttgggggctgaatcaagacaaagcattaaagccaattcccaacatctcaccgtttctgtgtaaatagaaaaaaagactcttctctcagacataaaatgagcataaccctagcaattatgtaaattacaaagtatggtatacaattaacgtcttgcccatcatatttgtcagttagataaagcactataccatctatatacctgagttatgttcctattttagcttgcattactatctgaaaaccatttttttttcaaatctatgtcatctctttcaatgctaaacaactttgattatgagagactataactagtcttcaaccctgtcagaaatatgagaatgaattattacctgaatatgtaggaagcatatagcttccaaacatagcttccaaaacttaaacaaataagagacatctgactacctggacagttccctaatttcttataatgttggagcatctgtcttcagccttgtggcccagaaccatctgacagaccttgaaatgaagcaggaactatgaaggactagtttgttctgtcttggcagagctaaactgtcaactatcctgtgttgtatgtcctttcctggacagtatgttttgtctgaagatgaatagggcagttcttgtccaatggctaccttgccataactggagcaactctatatggaggttttgatgcttaaattcttctttgaagtcgaataaggaagctgtcaggaacagatatgcctcattgtcaaatgatctttagtaatgacataacattaaatgccacagtctgtggctctctgatgtttttgaagactatctatgtaaagtatatctgaactgttaaaccttaactactcttagccatttctatttgagtaatactgaaaatgctttattataattagaacagattctaatataaccatgaggttactatctggcctttaacttgtgttacttaatcatcctacatgctattacagtgtctaatagcagttattagaaggactgagtctaagccttgtatttttaaatgagttgcaaattttgtatcaatataagagatttatatcaatgaaaaccttaattctatatcaatatataaattctggaccaatttttcatcacccctattcagcaggaagaagttgtggagagttgtcattccaatctcttggatttggatgtctggttatggttattttacaaattatagataggttgtcattttaagggataatttaggagtagcataattttgaacagggaggaaatagatgggatggattactaaattcattcttgaacaaagtattgtgtagccataatccttcattggtagaaacctctataatggatgcaaaattgaagttataatttctaacatctgacaaacttagaagtaaagaaaaatgagaactgccaccataatggtattcagtatctctttctggatgttaatagtcttcatttggtcttcctggaacttaagttaatctttgtctctaagggaagaccaaaaaacttaagacactgcacatgcacaggctattcatgcatggctctggcatgcaaacttttgttgttccaatcaatccttaggatgcaggagacttgatgtatgagtgtctgctgggaatcacaactcatatttaaaatctgggatagaatgcaagcagtattatactttattttccctggacttggagaaacatcaaaaccactatctgcattatttaaatgttggcataatgataaaactgacagcattctcttagttaagttggtatgctgctaattggcatttgacactcaaggcaaatgacaacaaatgcgtgctttcttcttctattccatagtgagcaatccctgtgctaccaacaacggtggctgttctcacctgtgcctcatcaaagcaggagggagaggattcacctgcgagtgtcccgatgacttccagaccgttcagcttcgagacaggacactctgtatgcccatgtgctccagcacgcagttcctgtgtggcaacaatgaaaagtgaggctcccgctccccttttcaaattgccttgcctgcccttgggcatacattgaccttcgagactctagagagttggacagagattttcttttctgattttttttttttgagatgaattcttgctgtgtagttcatactggcctacacgtcattctgtagcccatgcaggcctgaaactcacagcaatcctcctgtttcagctttctgaacgctaagagtatgggtttccattaactgagattttggttaactagtttggctcataagtgggatcaaactttctgtctaggtaagatctttcttgagtaaaaggaatttgttatccaaagagataatgaagtagagttgacaaagacttttttccattctgtggactgtctgaagaagaaattgtgccccacccgcccatttctttctatttgttaaagcttgatttttggtccaggatggcttcaataatggagaagacgccatgtgactttaccatctgtcatgtcataaacactcaataatccttagaacctcccagctttccaaaaaaaaaaaaaagtctccctgcattttggtagataatcatgtactttctaaaaatgtaattctatttgtctcctctccaccatcgcttgggattcagcatctaattcacttctccttgtgaacattgctaggtcaatggccctccatgcgtttctacaggttttactctctttgtgcaggtgtatccctatctggtggaaatgtgatggacagaaagactgctctgatggttctgatgaatcagacctgtgtccacaccgcttctgccgtctgggacagttccagtgccgagatggcaactgcacgagcccccaggctttgtgcaatgctcgccaggattgtgccgatggctctgatgaagaccgtgttctctgtggtacgttggcttcctttctatacccttctttgtctgtttctgtagctgattttgtagaagcaacccaaaatctcattcaaaaattttggagaaaagttagggccaaccctgtatgcattctgatagaggatttaaatttgaacctttaaggtcaataataagttatctagatggctggttttcttctatgtgctggttgcagaatcctccttgagctgacattgaaaaggaatctttctttctcttcattttaagtgaagactgtgttttctcttttattaatacggttccccaactacaaactaaaaacagagtgtcaaaagtagcaataatcacaaactttggagacaattaaatgatagaaaacagagttggaaggtgtgtttagcatctggcccccaattctgtgtgaagaaaagggcatgaactcacaagtctgataaaagcctattagttattctaaataagaataagtcttcacgcagtcgtcaatgttaccaggaactaccctagagtgtaaaacccagtgaaaggaagttaaaatggctttctctggaccccacccgtggtgctcccattcttgacagtttcgcaacttgtaaccaaacgccctgtttgcagaacatcaccggtgtgaagccaatgagtggcagtgtgccaacaagcgttgcatccctgagtactggcagtgtgactccgtggacgactgcctggataattcagatgaagacccttcgcactgtgccagccggacctgcaggcccggccagttcaagtgtaacaatggacgctgcatcccgcagagctggaagtgtgacgtagacaatgactgtggagactattccgacgagcccatccatgaatgcagtgagttccctggggtgggcccatgcaaacaaccaaggccagtagacaagcagatggggacgcgtccttctaccccagtgtaagagaaggaaatatcctttcttgtctttccttacaaactctatcactacaacatagagcagagttgagtggtttctatttgtaaccagaccttggccacacctcccatgccaggcactgagctgtccacccatgcagagcacgatagggaacactcacgtgatccatatgggaaacactgaggtcaggaaggtaaggcctctgcattgcaggtaaataaagtgaggctcaggttaagttcatggtcatattaccacagaaccagcattgcaactcaaggattttacttcaaaccaggtacatgccctgccttagtcaggcttttgttgctgtgaagagacactgtgaccatagcagctctcataaggaaagtatttaattggggattgcttacagtttcaggggcacacggcagcatacaggacatggtgcttgagaagtagcttatcgttccatatctggatcctcaggtcgcgggaagagagagtgacactgggccaggcttgaacttctgatgccttaaagcctaccaccatgacacgcttcctctaacaaggccacacctacttcaaggccacacctccttacagtggtactctttatgggcctttgggagtcattttcattcaaactacatatcccttccagtctaaagtacatcacaaccctaatgaatgagactgagataacaaaagaagttagggctctaatgttctgctcattgaacacatcacacctatcacacctaatggaggggtctgtttaatggttacgtggtaattgttagttccaggcaccaagtcctctgtataaccacagtgaggagccttctggtgctgtttccagcaagactggtacttccactctcatttcttgatttcttccttttcagtgactgctgcttacaactgtgacaaccacacagaattcagctgcaaaactaattaccgctgcatcccgcagtgggcagtgtgcaatggttttgacgactgcagggacaacagtgacgagcaaggctgtggtaggaagggctctggggtctggggaggggcaagagaatgtcagtgtcaagcactgctctcataaggatagatgtcccatctctttacctctggaaaggagcttggggtcattggggggacttaattcatgtcatcttaaatgacatctggtcccaaagcagatgagttagagacaatatcattaagatgttaggatccttgctgacaggagtctgatatagagttatttcctctcctgagaggctctgccagtgcctgacaaatacagaagtggatgctcataggccatccattggattgagcacaggatccccaatgaaggagctaaagaaaggacccaaggagctgaaggagtttgcagccccataggaggaacaacaatatgaactaacaagtacccccagagctcctagggactaaaccatcaaccaaaaagtacacatggtgaaactcatggctccagcttcatatgtagtagaggatggcctagttggttatcaatgagaggagaggtccttggtcctgtgaagagtctatgctccattgtatgggaatgctagggccaggaagtaggagtgagtggattggtgagcagggggaggggataggggaagggagttttctgaggggaaaccaggaaagggagtaacatttgaaatgtaaatcaagaaaatatctaataaaaaaaagatgttaggagcatgtttaatttcttccaaatgtacagtccttattcatacatgacatgtctaaacagcttgtctgatctcacagatggtggtaggtacaatatggcacagaagaggtatttccaaatctggatgtattatttcatgaccatcatcttctaagtgtctttgtgactttcctaatcatctagtaggcagctatagtcactctggcaacatggaaaaaatgtaggcaaaaaaagggacaaatttaatggaaattgtcaaaataaagtatatactgtctcttgaaaccaaagcatctgaatgtatagtttagagaggaaaaaaagataatgggttatcttaatgacactagttctaaaaaactaaaggtggcgtaatagaatgttcttatgactccattttaagcctctgaaaaagttttagcatcttgttgccaattaaaaacttgatattatattttacttttagagtagtttctataaaaggtaataatggctagtcacatgcctttctttaatccctgaggcagaggcaggcaaggcagtcaaaagatactcttcctcccgcaaggtaataaatttactttcaaaatagaggatgggttagggttagctaacagaggacatcccagtgtctgggttcttcaagaatatggaaacgtaattctcagactctatcaacatgagacggggaccctagtttacgaagtcttgaccatgattgtgctttgtagaatcggtgccgtgtcacccttctggggatttccggtgtggaaatcaccactgcatccctctccgctggaaatgtgacggcattgatgactgtggagacaactcagatgaggaaagttgtggtgagtgtgcttaggattttgtgaccccatgagctgcagggcctgggatgtctgtctatataattcatccattcctcctcagagggtgggatgtcagtttgttgggcctttttctctgggatacggaagtatatattttcctgaaatgctaatcaggcaagctttgggagaaggtatctgtgaaggggatatttaatcaagtctacaatcaagtctactttggtatgttacacacacacacacacacacacacacacacacacacacacacacacacacacacacacacagagatgatgttttggtagcaggtgtaatgacttagcaatggaacctgaacctgaggggaggaagccagagaacttgattgagcatgccaaactcagtatttagttttgaatgggaaggcatgtttagaaaatacgccccgtcatcatttatcgtcactggctcatggtatgttttcaatttcaagtttctttttaattatatccttttcaactttagttatgtttcagaagtcctcagccttggctagaggcattccagagaatcggggtcttgattacacctagcagtgtcaatcacctaagacttgttacacaagagtgctctaggaggtacttctcagccctgtgggtgtcagaaagaggaaggtcacaagcccaaggcctccttggatcatagtgtgagtttaaggctagcctgagaaacatagtgagaccacatatacacatgatgtctgtgtgtgtgtgcatatatgtatgtatatgtatattatatatgtgtgtatagatctagtccaagaatgtaaaaacagtgttaaaacacttgtccttcatggatgatgtcctaggttcacttcccactactagtacatgagcaaaaagataataaatttcacattgaatactgtcattgggtagcaagagttttgcaaaactctttatggatttgaaattgaggcagttgtttgtatggtgttccccaccccccccttttttttttctggacaaggtctcactatgtagctcaggctgtctttgaattcagtatgtagaccagcctggcctctgcttcccaagtattgggattaaaggctgtgctaccatgtccagcgaggcataagattttgttttagaatgtgactggatcacaggacagaattaggtacccatgggcccaggccagctccccaggtaggattcctggtgcacactgatggcttggtccctctccttttcagttcctcgggagtgcacagagagcgagtttcgatgtgctgatcagcaatgcatcccctctcgatgggtctgtgaccaagaaaatgactgtggagacaactcggatgaacgggactgtggtaactatcagggcacacagaatcttatactgtgatgctgtggagactttgtcaaccagtgttgataagttctttagtgtgcaatgacatagaatttttgtcatgttaaagttccacttaacatgataccatttgcattttccattttttatgtttaacttacaatagtctgatcagagtgataggaagataagaagggtacctgtgaccctgggatagaacacagagccttgggacagacactctaaaactaattaaatggtgggtatgggtgacatcatatacccttgaaactattatttctgaggaggaatttgaggaggaatttaagagctgaggttaccctacagggccataggagtattcatctccgtatgctgaatggagaaattgaattatgagtttgtctattttactgacggtagcgagagttcactatgagtcagccatggggtatggataggaaaggagcagtagcctctgtgagcccagttccatgagctcttccaagacttatgatcttttctcttcagagatgaagacgtgccatcctgaacattttcagtgtacgagtggacactgtgtgcccaaggcgttggcatgcgatgggagagcagactgtctggatgcttctgatgagtccgcttgccgtaagtgcctgctcacttgaggtcctgtgtgtttcagtgcataggaagggcaatttagacccaacccacttcttagtttaaaagcctaagtatgttctcttcagccttctcatgacgttgagtttgcctgagtcattatttcccagtggacttaggatccctagttgtttgtagtggtcgtgcagtagttatctacagtagacttttgatgatgcagctgccgctttctgaagttcagggagacaatcaaagatgatgggaaagacagttttgatacatgtggtaagtggcgattggccagagagacacagtatagtgttctctctgtgatgatttgtgtcactgaaaactgggttcagagaactgtcttgcccttaagacataaacaccccctgtctttttggttttccaagacagggtttctctgtgtaactgtggttgtcctggaactcactctgtagaccaggctggcctcgaactcagagaaccacctgtcactgcctcccgagtgctagtattaagtgtgcgccactacacccggccaaagacatttatatccctttttatagataagccacaacaacagggtaatgaataatgaagagtcacaatagcaggtgttgagggagacccaacttcaggtttctgatggttgtaaacttcgatataggtgctaggaatggaacctgggtgctctggaagagcagcaagaactcttaatctctgagccatctctccagctcccgataaccactattttaaaatctccagagctttttggattcattcctggttaagagctattgatttccataaagtgagtaaaactgtatatgtctatctcattaatgttttgtatgtgtcccctccttaccaacagcgactcgctttcccaatggtacctactgcccagctgccatgttcgaatgtaaaaaccacgtgtgcatccagtcattttggatatgtgatggggaaaatgactgtgtcgacggttctgatgaggagattcacctgtgctgtaagagggcgagggaggggctgaaaggacagttccttgcttggccatatatatcagtgttcattctatgcggcgtgtgagcgtggagggcagatgtgtaatcttgaggcctgattgatgggcaatcaatcctggtgatttcatttagtcctgttgcttcagttctccagctggagcagctggaggttaagagccaagattttaaacatgtaggctgtagcaaacatggaaacccgaagtgcacaggtcctgaggtgggaaggaagaggaggagggggaggaggaggaagaggaggaggaagaagaagaagaagaggcataaattgtagctctcctctccatccttgaagtaccccctccttgtccccttggagctcttgtgtaaaacccgatgatttgatttttgaaaccacttccctttatgtaataattcaggaccattataaatactttttttgtttgtggtgtggacaggccagaatcataacacattttctggcttggtttaagcttacggaggcagaatctgtaagggtgggtttttttttttttttttttttttataagattagaaaagactattgtatgggtatttcatctgcaagtatgtctgtataacgaactatactgaacttaactgaagccagaagagggcatcggatctccgggaactggagttacagatggatgtaagctcccttgtagatgttaggaatggagcttgggtgatctggaacagcaacgagttgtcttaatctctgagcctctgtccatctccccaaaactacgttttaaaagctccagtgctttttagattcgtccccggttaagaactattgattttcaccaagtgaatgaagctgcagttgttttggatcactggtgagaggctagtgtagtaattctcacagtgtctccctcgggctgggaatcactggtggaaaacatgagaaatgtaaatttgcttggcttgggtggcccaggctcctgttcaggaagacaccttccaagcgattcagaagggagttgcagtttcagaagggacccagggacatttctgcctgaaatcttccgatggctcgagtgaagtggctctaattcaacaatgcttccaaagtcctatcacttccattctcttcctgcaccgtcctactcattctctgtgcagagatgggattactgagtgtgatgtcagagttcctctttcagtgactgttgtattttcacaatggccttccagtgctgccctgtgactcaaaatttcagaagcacttaggaagttatttctttctgtaaggcaaaatctgtcatagcaaataaaattaaatgttagagaggtgaggacacacacatacacacacacacatacaccattccacatactcacacaaatgttccatgttctttcctaatgtctgtaccagccattcacagcaaataattcaaatagtagtttccctaacagtattttcaagaatcagccctgggggtcgactcctcctttcctctaaaggagcctaattacaagggtcatcttttgatatctgtctttgatgggaagtccaaataattcaagtcctccatttagaagaacaacacagatttatgagttattcattgaattacatatatggatgtctcagtttcatttgttgttgttgttgcaaaaaaagcaacttgaagacaggttcaggttccagtccacgatggcagggggttcacatcaccaagagcttgaagtaattggttatcgtatacccagagccataagaagagaccaatgagtgtgtgtatgctagtgcttggctcactttcccacttacacaatccattaacactaaccatcatgggagttccctgacatgttggtacatgcagagaggactgtgtctccagtgcctgggtgtgacccttctgttcttcccagctgcataagtcgctgctagacaggatgaaatgaagacttcgtgttatggatatttaaagatcacaatcagaaggacgaaactgtggtctcctggctgtcaggatgactcctatataatctcaatggcttttccaactccatgacttaacacatatgtcctccttgttctgtgccctagccacagagatttttatatagcttcttctgtatgtaaagtctgttcctgtccgactcaagttccatgagtataaagactgtgtctctcttgcacctctctatatctaggatctacctagcacttgcaacagtgatgtaatgtgtatctgagactcaggacatgtttgttgattaattgaatgagcaagtgaatgaatgaatgagtgatgagtgaatgaagtgagcctggcactgggatagcctggaggttttagacattgtcacttctacttttaatttggagcttccttttttatttcccagtcaatgttccatgtgagtcaccacagcgtttccggtgtgataacagtcgctgtatttatggccaccagctgtgcaatggtgtggatgactgtggagatggaagcgatgagaaagaagaacactgtaagcagaatgggaaaaggagaaggcagaaaccagggtccttagctgtttgtgagatcttcctcggggtttccaatggtcctggagaggcttgctttgtgcctgtagtggtgaatcacagacagtgtgaactcgtacattgctcacacaccagcctgccctatccttcctatctcccctgaggaagatgttgatgactctttgcttaggctaagtttaaataagatactttcatgctttttagaaaaatgagagaaaagaccaactgcttgagtcatactccacaaagttaattgtatttgttgtcaaggatgaggacttcacaacctacagtcgctaattgctaatctggcatgtgaatgtatatttcttctaatgctcagctgaaaagatcatgttaaataaggtgcctccgtgttaacatagctaacccggtatccttcttggatgtggaaatccattttgcagaggagaaaaatgaagtgatatctttaaaaagtatattattttactatttttttatgtatttgggtatcttgcctgcatgtatgcctgcatctcatgtatccctggtgcccaacccaagactagaagagggtatcaggtcacctagaactggagttagagttgtgagctgctttgttggtgctgagaattgaatccaggttctcaaagagtgctcctaaccacagatccatctcgccatccttagattagttcaagagaaaaacctgaaactggctgtatttcacatttaaatatcagaaatcatacttttgtttaaaagttactctattgagtactctactcagtgttttgcaagtttgcttagaaagaaaccactgagaaaatgggaaaagctagtttttccaataaaagcatgacagaaattttatttcattctacttggaatgaaaaaattagactctttgcaatcaccagtaacagttctgggctaggatgccacattgacctgagaaaaacctgagttttactagagtcagtacttaacagcacctcggcatgctctaaggcatggagataccagaccaggaatatattcagcccgtgcagatattgtgaaggccccacttgaatcagaagggatttgggtagatccggatgcctctctgtgaggaacatctcttcctcttgtgcttcctagactctggccctcctctttagccctatagccttgttggctttcctctccatatgatgagccctccttagggggtggacagctgtctaatgtcactcacttgtagtaggttggaggccaagactcctttcaagaaaaaaaataaagattttgattaatgatgcacagtaaaacacaatgtactgcatcttaaccctctgtaaactgtaagtgcatcgaggtcattaccttaaagagaatgatatttactacgatggaatcagttgtttagtattctgctgataccaaagctataatggtctaaaggaattctataggtagatacatccatttttaagagtgtgcttttgaacaagagataggaaagaaagaacacatagacttggaaacatttttatattcctagccatatgttaatgagctgatgagtatatcttttatttgaagcattatgaattagcttctttcgttcaccaatctgagtgattatctttaaaatcattattgtttttaagatgtcaattcttgaatttctttcctggtcaatttttcttaaaaagatttatttatttattttatgcacgtgagtacactgttgctctcttcagacacaccagaagaggggatcagatcccgttatagatagttgtgagccaccatgtggttgctgggaattgaactcaggacctctggaagagcagtcagtgctcttaaccactgagccatctctctagaccctatctattagatggcattgttctggacctattcttctcactgtcaaaatatcacacctagaaaagcatgtacaggctataattttcctgaatcatattttaattcacacttaaatttcatgatgaaacaaagagttatggccttggcattttcagccacgcactgctctcaggaacgtagaaggaatttgaactgctttcctctattcagttctacagtagacaacctcactgagtgatgctcctccgagaaagctcttttacctgtctcctttcctgttttctcatacacctttgtagcagttcacagccatttttccaccattaggggaaaaaaaggacattttgtcaaaccttggtgtcatttggcctgtgtatcctagatagagccttttaacccacaaattctccctacttggggctcccatgtggtcagcttgtcccatactgcaaagggttttgcccttattttcttgcattcctgttgttaatataacaaccagtcctccactgaccttccctcttaagcacctttgctgagtaaggacgggctgggcactctaacacactcttttctaacctctttgcctagaataccaagtgccgtatcacgtgatctgccttccctcctcaccactgctttgccatagcatatgaataaccttgatctcctgactgctaagctgatgccaagtattttcagcttttgatttggaaagatcctacttctctcatcattccatattactcagagtaattaattttgcagccaccaacgagtctccgagtcttaacacaacaaagagttctttctcgtgtgtataaagggccgtgcggctggctcagcgtccatcatggtactagccaccggacacacctgactgccaaggttataaccccagcgtaggagacagtgtgaaggcacatgggctttggattgctttagtccaagggtgacatatgtcacttccaatacacagcccaatgactagaactagtcactagctgcaagggagccagggaaaagtggggaaacgtgtatttatctgtgagtggacaagtgaagcattctgctttgatgaggaagagttttgactttacctcgttcttaaattgcaggtagaaaaccaacacacaaaccttgcacagacaccgaatacaagtgcagcaatgggaactgcgtctcgcagcactatgtgtgtgataatgtggacgactgtggagacctttctgatgaaactggttgcagtaagtgaacagttccttttatatttcactatgacaaaataaccagactctcaaatgacccagatgggcctcaaacactgtgtcgtcaaggatcacctacaagttctaattctcctgcctccacccccaagtgctaggattagaggtgtgtaccatcatgtgtggctctttcttttcctctaagtaggaggaagactttgggttggaagagattaacataaccaagggatggatttggttcatttggaatggttgaggctatattagtagctcatacctttggtatcccttcctagctcgtatgcacactatctaattgttactgccccaatgggtggctgggattgtctacctccataccgatgctctcgaagtttaagtcactcgctgaggagcaaagagagtaacagaagcagaaattaagtatctatggaactccaggcaaggagagtggcctccggtgccctcaggcacctgttgtgctatttttgacacagtctgacctctttcaatcagccaactagctactgtgtgtatgtgtacccaggcatgccatagtctatgtgcctctgtgtgtgtacagcagagtacaattgtatggtatggttctttcctttcatctttccataggctctagacatggaactcaggtcgtcccagtggcctctgagggagctctttaaacactgagagcgtgtaactggttatgtgttttcaactccttgggtattacatgactgccgcctgcattgcccccaccatacataccccaggcatccagaagactttttgatagttactaactgatcacactgacttggcttgccactaatctcaccctttcagagggacttggagtgcttgtcaaaatgaagtgactttattaagctttggatacaatttggtaagccaggtggcagatctctacacagagactggtatgtaaacagctttaggaggctcaagattttccaagtttgacttgggctaactgaggctttctcttgttgcctgtgcctgtatttagagcaatactttctattcaagtggactttcactgaaagatggtttagttaaaggaaataagcagtgtagcattaacttctttttagatgtgatacggaattcagatatgggcttgtcattcgacagaggtgtagaattctttttctttatcttcctctttattttatttcaaaacagggtctcactatgtagccctgggtgtcctggagttcactatgtagaccatagtgtctttgaactcacagaggtccacctgcctctccttcccacgcactgggattaaaggcatgctcaactaggtgtaaaattatttataatgccactgctggggtccccaggcccatcaccttctttcatcttggtccctcactacctccccatctcttccttcctttacattccatatcattgaatacaatgagacagatagggcttctaaaaaaattaagatgcgcatcatgaccctttggaatacagactgaaatcattgcttatgcatcacgtgtatgtgacacacgcatccctcgaatgtgagtgtgctcagagcacccaaacccagttcagtcatgggatgacatgtaaattttcctagcaccattcaatcataaaggaaattataaagctgaagtcaggctacagataacatttctgtaattgtaaaggtagagtaacttgctatttctgtgatatttctattcctttttttcttcttctttttttttttacatatatataagctggaagctagagagactgtcttataaacagagagccatatgcttatgtttgtagaagctggttgctaggcaactgctctgacactaagctgcatgcctagccttaatgtcactgttccgtggattaaggtgatggctagatgttcctggtcttcaaatgaaagaagttgtatggaaattttccattctaaatgttatcatagatctgctcctgttaaggtctcttactttggaagattaatgattcactcaagggagatctttctgcattccggacctcttaatcacaaagtccagtggtagagttaagagaatagttcactgtagagatactatggcattggaaagaggatcacaacaagcttgccaatatatgaaaaaattcctagagacactgaaaccttctcgagaagaattagaaaacttggggaggtttatttatttttaaatagatcgatattggcagctcagacttctaagttttcatgactgtaattttcaggcagtggtaaactgagtggcattctcctactcttgaaactcaatgttcttagtctatcctaaatatatagatgaatagctttattatgccataagaaatagaagtttcctttagctaaaataataacaagcctgtgactgaaacacgtttcatctgaaaggtagacgaggcttaactcctgaggcaaaagctgctcaccacttccttatctagccccagcttcttcagcttctccgaacgacctgagtttgggagtagatgacagaggatgaaagaaagctggcaatgacaggaattggtgacttgtagagattgccagggacaagatcatcaggcaagaaagagaaaagtagaatttggacagactccaaactgtgaggaatctatcctggataatctagacccagaaaattagggataagaatagctatttagcaggctccaacacaaacaaactattgatcatcttttgctttattataaaggcaataaagtctagagatgttaataagtagaggctgggtgtagctcaatatccatgttgtagagttacacgcatgtttagcatgtgcaaaagcccaaggttgaaggctcaaggttcaatccccagcaccagaagaaatgaatttctctgaatccgaaaaccaagaaaggtttactcttttttgtacattaatttctacatttaatacactattttaagcaatgtaacaatcttttttccatttgtttttagatatttcccatagcaaagtatcatttgaagccttggatcttcataacaacccttaatataaataatcaaaactcctcatttctgagatatatgctttcttttatattttaacatgtctcaaaatgaagtacatcttacaaattataacgtgtcataatacaacttatcattttctgtatcactaatggtgtatcagtggtaacttagagatttaagatagtacagtatttcttcttccttaatgttgaaaatataattacacttaaaaaaaaactatcagtgctataatccttaatcacaaatcttagtgcataattttatcccttcctaggggaaactcattaataaagtaacagtaaaaaagatgtgaatgttatttgtattgattattttctgtgttgctggtgatggagctcagggccttctgaatgctgggtaaattccttaccactaaatgacaatggcggtcaaacaggagtattgttaaagtagtttaagatatatacatattctaagatttctgttatatatattaatttaaggctttatatatgaactagacaaattccttgacagacacaaagagtaaactgtatcgaaaaatataaaaggaaacctgaacttatataagaatgtgtagttgttgagaattcagagtcagtctttgttataagcattttgtgtatgtaaagagcataatatgactgcatattactacaccttgatagctaccctttcaattaattagttaatacttggcaaaattataactgtaattttgttctaacctacctgtctgtctgtctgtctgtctgtctgtctgcctctctctcacacacacacacagagtttgtctgtctgtctgtctgtctgcctgtctgtctgtctcacacacagagtttgtctgtctgtctgtctgtctctctcacacacacacacagagtttgtgtgtgtataaaatatacataactatctatctacctaattgcattagatgattgagcaagaacatgcaatgttagctgtggaatctctggtttcataatttctgactctggttttggacactgtgtctgaggttgagcctggtagtgctgtatatggtgggaaatggcctcaaggaccattgcacatttgtgtagagaacatccaggccttttacagacagaacaaaggtcccctctcatttcaagcttctggaaaaggatcgcctgaaggtgccgcatagttggtgaggtatctgtgtgcttgtggctgacctgttttacccttcacttatgacgttgagattttgttttccagatctaggagaaaatagaacatgtgctgaaaaaatatgtgaacagaactgcacccagttaagcaatggaggatttatctgctcctgtcgacctgggttcaaacctagtactttggacaaaaattcatgtcaaggtagaacatttttccttccattgttatttagagaactttgctttttttgttgtttgttttaggttttccacctattgccttttagctaagccacttaatgggttaacctcctggtgttgtcattttggtacacagtgtcaataatggaggttttggtggtaatgactgcttaaaaccaccagaagtcaaaaagctcaatgtctttgtcaaaacccatgtgtttattacctacccacttaggcaaggcacaaaataagttctgtggcatgggctcagaaggtagctcatcaagacgagaaatgactgcgattttaggtatcttttatcatgtatattactgtgtctaattcatatgtcgttctgtaataagttcttggcaatactagggactgaacctagcaatctaccataaagttatttttccaacccatcagagacgatttaaagaattcttatggttagttaagcagatcagttgttacaccaaatcggtgactcttcttgaagctgtttagttatcagaagggaagcaatgccaaatatcgaccatgcagatgttttttagcaaggaaacatttgcgtgaagtcatgcagctttagttaaaatagccctctgaccactactgaccagcttgggggctttaggctcagtagctgtccattgaagttttctttttattgtggaaagacttcaacatattttggtctcatgtacactcttcttggttctcattgcttgggaagtctaattctgaatgagacagaatatgtgttgcattcttggtctttattttgcctgcagacatcaatgaatgtgaggagtttggcatttgcccccaaagctgccgaaacagcaaaggaagttatgaatgtttctgtgtcgatggcttcaagtctatgagtacccactatggagaacggtgtgcagctgatggtacgatgggttcatgtttggaacaagtcacctctgggggacatcagtactggcataccagaaaattaatttccacatttcatagtctctgctacttcttccttccttccttccttccttccttccttccttccttccttccttccttccttccttccttccttcccttccctccttcctcctcctcttcctcctctccttcctcctcttcctcctctccttcttcctctccttcctccttttcctcctctccttcctcctcctctttcttttttttatctttatctggagacagggtttccctgtgtagccctggctgtcctgaaactcactctgtagaccaggctggcctcgaactcagaaatccgcctgcctctgcctcccgagtgctgggattaaaggcgtttgccaccatgcccagcttggttctagactttaagaaatgtatcgagaacatgtgttcagaaggtctaccctacacatagcatacgctgggtgtttaaggtgcatgtttgtcaagcatttgagagtgaacagaaacgagagtgaggtcatttgaacagctggtcctgcaattaagcagcaaattaaaaaataaagtttaaatcttttaactaagggaatagctgaaataaattagaatattcatctaaagcataatgtcaagtctgaggaaatatatgcaatgaacttttaaaagtcacttaaattacatttgattgacattttgcaagtaaattaaaatttaaaaattttagagaagtattttgggatgagtcaccgttgaaagagtttaaaaaacaaaacaaaacctaaaaatccaagaacaagcaggcttgcctctcattagctagcagttaaattgggctgtggaggtgattatctgttaagacaatcacaaaacctgtcattcaagagccagtgcagatagctccctgggatgctttcagcaggactttgaaaactgtacttcttcgtgagtctccatgtctatctagttcttatcagtaggtggaggaaacacttgtggtaaaaatgggcttttttttttaggtggtcttgtctaaactgccgttggggacaagtaaataaacaaatatataaattaattttaaaacataaaactgatgcttacatctggattttgagttcaaaggtagccagctgtgagggtcagattcctctaaaagtatctcatcctctccctcctcctcatccctgcccacaagggaaacacctatagtgcatttaatgcctacttcttaaacatcttagtggcattcagagagacaaagcagccctttgtttgtttacaggaagccctcctctcttgctcctgcctgagaacgtccgcatccggaagtacaatatctcctctgagaagttctcagagtatctggaagaagaggaacatatccaagccattgactacgactgggaccccgagggcataggcctcagtgagtatgagactcacaaccattggtcattgcattggttttcttgattcttggatggtgactttgtggggattgccatttcatatcgagtggagtcttgttgcctgattggaagtgcaggctcctgcccagcgtgcccctggattttcacagtgtacgtgggcccccgtcaggttttcttgatttcccactgaagcttctccccacctctccttgtattttaaacccccctgtctgcacacactgctgcccttcctttctaccatggcatcggggcagatttctgagcaccgacgtcactgctgtgacattctgccagagtcccacaaaagcccaccatgaggcaatagcattttatacgcgcttctagacacatgctacatgccttttgccgctagttgttcgaatgactcgtctaattgtgtgccctttggagactgaacctaactcatctctacatacgcagctcctgacctggtatatcctgtagacaatatatgcggtgggcactaaaagatcttggagaaatgaaaagtgaacagtgcttgtcactgggcatgatcttctgcccttctgtcctgttttctggagttatgacatcaagcaatcgttacaattctttagatcttaatttttttaggcagtaaagtgttaataatggtctcattcttatctacctgagaggtttttttttggggggggggtaaatatgacaacacatgaaatgtttatgatctactaatgatgatgccaatgtgaaacttattatggtattttcacatttatttatgcaatgcaatatttttcttttcaactctaagtttatttcaagaatgatacctgtttaggaaagaagtgtttgcccaatgcactctgaatttcagtcttagtctttgtgtgctcagattaacctcagtgtttggtgggtagggggaaggagaattagaagttaaaagtttcctgaactactaggcccctgtcttgggcgggtggcacaatctttgtatgtatgtatgtatgtatgtatgtatgtatgtatgtatgtatacatgcatgtttgtttgtttattttattagatattttctttatttttgtatgtttatttatatattatatatttataataactttccagccttttggttacggtcaagtataaaataccccttgtatcttgttgtagcagaggaagttatacattgaatctttctagttcaagtatggtgtgtattgaggtttgatataagggagttaattgcattatgaaagtgaggaggtagagagatcactcactgcatgactctattagacccaatagacccactcttactgtgcactcctccctaggtgttgtatactacactgtgctgtcacagggctctcaattcggtgcaatcaaacgtgcctaccttcccgactttgaatctggtagcaacaatcccgtccgtgaagttgacctgggcctgaaatatttaatgcagccagatggattagccgtggactgggttggaaggtaagtctgtcactcatctctcttgcccatttcattgtcatgaaaaagtgctgcttccccatggtgcatgtgttataatggtgagctcagcagctagaccagatcagccctgcatgggcctgctctgaccacagccatcacccctgcttgcctctgtaggcaatacaaacactgtccttttctatattcagtgcataccacaagattctatgttagatgtgagagctctgtgttccaagactaactttgagtatggccgtgttcttcttcaagtgtattactttgggattaaaacatcgcatctggtaattatttgagaaaaagaacaagccacagtttttagtatccaagctagctgataccggctggaaagttaatagagcctttactcttgttctgctctgttggagcgtctagttggctcatagtttggatgaccccttgcttagaaccctccataaaatcttgctcacactgatgcctggtatgtaagtgttaccaacaacccctttcccggaaagagtcctatatgggtcagtcactggtgggagagtgtcttagccttgaaaatgaagcaagactgggaagcctcagtgcctacctgcctgcctagatggagaatagggagtcatttgaagtacaaattcatttttccctttaaccatcttgtcctgggagacttgagcttctccaaagaagttaattgagtccccagcgtgcctggaggctaacagaaggctcaccctcagcatgttctgccaggaagccaggccttagagaaccattacagaaccctctatctgttaactcacctgcaaagtaaaggtagcatccctccttctcatcagcagatgtgggagctgacactgcagaagttcattttgtttgccagagaatgagcttgcagccttagacatggaaatagggcaaggctagccttgctggagtttttcttttggaatgttatttccactcatctttgggactgatgctcaattcttctgattacacttgggctcattgccaaggggtgtgggtgggggtgagggggtgggggggtggggaagagacccatgggcagtaaggatgaatgccttaatctgcctatggaagcatgtgactcataaaaattgagatgggcggtcaatctacttgctgtatcctctgcaagcactgataaagcgtctgagtgtttgttgccctggctagaactcacaaatcaaatcttcttacattcacatttctttttaagtgattggtcccagcttttctattgtttaactctgtccctctacattcaggcatatttactggtcagatgctaagagtcaacggattgaggtagctacccttgacggaaggtaccggaagtggctgatcaccacccaactggatcaaccagccgccattgctgtgaatcctaagctagggtaagtatttgaagacatgctcccagtcaatgtatagtttctactggagaaattccactttgggatatacatgaaaatccatctgcttacacgaatcctttttctgcactttcatttagatgcattcagaagtatcttgctgattggaattcagctggcaatttggtttaatttactggcaataaaattttatttccaaagtatgaaacatatgcaaaaggcatgttcatacacatacattacttacttatagaaatgctgcaattggtagctgagagagaactagtttggtcttttcctcttgatttttgacattttcatggatatttagcaagtactttgcctatttggacaggactagtgtcctgtatttgtgtttcaaacactgagttattattactttgattttattgtctcccctatgtgaaatcacggcccttgggcactcagcagtgatgcttaaaaagaacatctaaccctgagaagatctaagtcttaccatggacttgaccatagcatcaaactatgcttcttgtgtataacatatcttggaaataaagcgacatctttatagaaacagtgttactcacactcaggaaagcagttggttgtgccgtcagatgctaatgcttccggtgccacaaagcgaggaagctccaccagataagttgcttcaattaggacatttttcgttacaggctcatgttctggactgaccagggaaagcagcctaaaattgagtctgcctggatgaatggggagcaccgcagtgttctggcttctgcgaaccttggctggccaaatggtctttccatagattacctgaatggtgatcgaatctattggagtgactccaaagaagatgttattgaaagcataaaatacgatgggactgacaggagactcatcataaacgatggttagcagttagctaggatttgcatatcagtaatgttctaatgtatttctgcagtgtcttaggataggggatagggtttatgtaatcccgcagatttgtttccatcagcacccagctgctgtattgaatccaaactaattcacaacaataatcctttttatatttttactgatcaaatcaagaaagaactaaggtttctgctaggctcctctgagattgtgttttccatatgttaagtcaggtgtgttcttactaatatgcataaactgcttctagacttattcattttccacgtgctagcctgttctcactttccatgtgcttgcctgtccttgtgctcaactagaaacatgtagaatggagtattttgttacagacatctaataatcgagtacctaccagtacctttctcctaactggccggtatgctcttacattcaaagtgggagatggggaggggctttagttcatcacatggtgataaatcagcagcttaaagtcagcccatttatacggactcagtttaatttatcttgaactctcgaggtaacacctccagaaagtctgcccaaaatatgctagataattacttggagccaaatgccaatgggcacagttagtagtgctgggtattgtgtctcattagctctcttttgtctctccactattgctatgcagcaatgaagcccttcagtctggacatctttgaagaccagctctactgggtagctaaggaaaagggagaagtgtggagacaaaataaatttgggaaagggaacaaagagaaattgctggtggtgaacccctggctcactcaagtccgcatcttccatcaactgagatacaaccagtcaggtaaataccagccttgggaagagatggtcctcgtggaccagacaccttatttaggaatacaccgtctatagtgttagtggatgataagggttatgatgggggggtgggtctgggtgggtgcttaaacattttgaatgtagaaagagaacattgtaggatgaatgaagttattatctcaaacgtgctagattgccattcactctggacactccttaaattttagcatggatcagactggcagaccctgttaaacatggcttgctgtgctctctacctgttgggtgttcaaagttctcagtcatcttgtgcattatgatggttcagggaaatgtgaaaccagttccctggtcttttgctactctgcagcttgagcacaggcatcatcaggcgtagatcagttacaatgcagatgcttagacttcacttgaacttctaaagcagaatctgaattgatgcagatgtcatatcacactaaaatgtgaagaactctactccagaaagctgacaaaatagtcaactggggcagattttagatgtggcttttgtaacgtgtcttattgtctgatgtctatgcctcaactaaggtcatcttttggatggtggtaaataaagaacacagaatgtgagcctgaagaaggatccggaaaacatgagtctaatttagcccttggatccttcacaatttgtgtggaagtatatttcaagtgattttaaaacatgaagagttttaaaatggttgtagttgggatccatcccaatgtaatgttttgagtggctcccacctcattctgtcaaatcagttataagtaccctttttatctagaaagaaactgaagcccacagtaaaattctttccagaaggttttatagaaagctcacccaggataggcactgggtagacttgatgctatgacccacccagatttgggcagtgacgtcttgttataagacttgggatccagccaggcagtggtggcgcacacctttaatcccagcacttaggaggcagaggcaggcagatttctgagttcaaggccagcctggtctacagagtgagtttcaggatagccagggatacacagagaaacactgttttgaaacaaacaaacaaacaaaacaaacaaacaaaaagacttgggatccattgatctcttgagccattattacttatcactaatagatgttaagattaggcctgcaccaagcaggtactcactcactttccaacagcagagatgaatagcaacagtggagactgtgactagcactttggtagggtggcacagatggtagcgtaggtgagtgtgggtctccaggtggcctagaggtcctggatgctgcttggctgtgccaatgccgggcagagccacatcagttagtaggcatactttggctgaggtacccagtctcctgtcaggacctaactgttctcatctcttttccagtgtccaacccttgcaagcaggtctgtagccacctctgcctgctgagaccaggaggctacagctgtgcctgtccccaaggctccgacttcgtaactggcagcaccgttgagtgtgatgcaggtgagaatactcactgcctgggaagcctggggcctccaggggctggatgatgtgaccttcgcagattcaacttgggggtagctaggaaaggggatgagggaaccacgaagagctgtgtgaggctctgggtgcagtcatgttgctatttatgctataaagacgtttcaaagagacggttttctgtgagggtcttcctcctttttttcctcccagtcacggagaattttccttttcccagaattcacgcaaggtgcagaactatttcctgaggtgggaggagcttgcatagagcagggaggggcttgaggacagtcctgcttttctctcatgcacatttcagaattttaaactgtcaaaggactgtctgtgttttgaaagctggctatgtgactaagaaatgaggtccggaataagggagcagtggtttggttctcacacaatcctctgcattagctcttctcggcaagacccgcttttcagtagcccttctaaacagttaatacgacaacgtggggataacaactgcccctagccaacatcctctgcttaatgagcaatcagaaagtcatcctgcagtttaccctgctgcccgttttatggctaacattctgggggagggggtgggggtcttcctaaagactaagctggtagggaaatgcagaggcaggaatagtttctattactgggggcacaagcgtttaagcaaggattcatcccattggagaatgtgatcagggtggaaatactgcttttcttatctcttctcctactccgtgtgtgcctggagaactgttgacaagattttggtgtttttttttttggggggggctggagagatggcttagtggttaagagcactaactgcttgtctactacacttcccccaacccccaccccgccgtgattcacaatcaccagtccaactggacaactccagtccaagggggatctcacaacttctggcttctgaggatgctacactctgtaataggaggataccacacttctgtggtgcacagacacacatgcaggcaaacacaaacactttataagattttcatttgaaagaactttatccaaagtaagctcacgagtggtaacagtggggccttgatgtggtctattgttaattaactcatcagttagtttcagtgctatttattgaatgtccactctgtactaggtatgaatgaaagtaccagagataatggaaatgagcaagcagacagatcccttctctcattgagcttactagctagttgtacaataaaccaagaaacctatgaatatgtaacaacacaggtggttacatatggtttccttggctagcccctctgataaagggaacattgagtagagacctgtagagcccagagagtagacaaactcctcaaatagaatgcacatgctcaaccagggagaatgctagggccgagccaggagcaggaatccagaggagggtcctcatcaagtaaggatatctcttgctagctgtccctcgggtgcttgtgtgtctgtctgtgtctgtgggtcaacctcttgccttctcccatgctgatgctccggagtcttgggttgtagtttcaacctgtgttgcaattaaactcttggatctaatggttcccagaagagaatctggagacataatgtatgtcctggcttaagcatcccctcattgtttagaggaggagagtgctatgaagtttctctctgcaagcatgtataattccccaagatcttatcaccgtttaggaagttcatttgccttagggagcaggggctaccttggcaaggtcagctggcctgaccctctgcattccccatctcagtcctgggggggttttgcatgatgcaatgctctgctgcggtgtgtggctgactaacccatgcatggcttttcctttctgcagccagtgaactccccatcaccatgccttccccatgcaggtgcatgcacggaggaagttgctattttgatgagaatgacctccccaaatgcaagtaagtgtgactctcggtcccagctgttgaccttgatctttaagggaacctgagatctcagtatagctgggaaaaacaagtactagaggctcatccaattccccatttcccatctaaccagcttctcctcctttgggggaatctgcgggaggcgaggcatcacttcccaaatcataactggcataaccctcacctgaagatctggctcaaatgcctatgtgcattctcaggggtactgcatttctaacaactcttgggaatgctgtggtcatgttgaagagtgaggagttagagagaggacagcagtatgtctccacatgccaccacccacctcgcctgggaggatggcttaggatatgagagagcaactgacaggagagatgctttaatacaaagatcatgactagtctggggtgaagaagcctgagggaaaccatcattgcagagcaagatgaattgtctcttcctccttgaaagtggttggaggatggcacactgccaccgtgtctgcactccctttctaaggaagaaatgcatggagcagaggagccagtaggcttatgccatgagactgacctaagtactacaccactgctagtggctttctagaatgagtgcagaataagcagatgtggagcagtctgcactgcctgctcctcatgcatcagggctgcattgcctgctccttatgcagcactggatcagggctctctctgcctccaaagataaccacgtctccttctgattccaggtgttctagcggctacagtggagagtactgtgagattgggctctcgagaggcatccctccagggacgagtaagtgtcagaaatatggtgacctgcaccagtcgcagccccccatcttccttttcaccccatctttgaagggccactggtgagcccctctagcgcttccttgtttgtcaaggtgctgatgctggctttccgcttcttccctctgcagcaatggctcttctgttgacattcgcgatggtcatcattgttggggctctggtactcgttggattctttcactacaggaaaactggctcccttttaccctctctgcccaagctgccaaggtcagtttcattagaaggcatgtaataagcctgtgtacgatgaatttttttagaagattgatagctcacctgttctcatgatctcagggtagtcttcatttctttgctcattttctttctttattttatatatgtgatgagtacactgtagctgtcttcagacacaccagaagagggcatcagatcccattacaggtggttgtgagcagttgccatgcagttgctgggaattgaactcaagacctctggaagagcagtcagtgcttttaactgctgagccatctctacagcccctttttgcttacttttatgaggcaagatttatttttcatgtgtcctccaccttgctctgggaccacacgtatgagccaccatgtccctcagttgtgagaactgagagcattcactgtcaatcacttcttcatggagtttcccctgaagcttgtgctgcagaccgtattttatcacgtagggcaggagagggcagagctagctgtgggttgcttggctttcttctagtgacccctagttcttgttccgatcttgtttgggcatgtgctttcatgtgcacttggggagagaattgcacatagaagactcagtaatatggaaggaaagtaatcactacaaaaacaaaacaaaacaaaacaaaacaaaaagaaacaaaaaaaaccgtaataacaacacaacacatggctttgtttcatttcagcttaagcagccttgccaaaccctctgaaaatggaaacggggtgactttcagatcaggggctgatgtgaacatggacatcggtgtgtctccttttggccctgagacaattattgacagatccatggcaatggtgagcacagcctccgtgggatcagttgaaggctttcacttacgctaattgatggaagaaactcttcttacaagaaataaagctgaccttggggacactagcatggatacagtctgtgctctgtaggcctttgaaggaaaatggctctaccatgtaacagttattcaaggataggcaaggagctgactttttctcgctccgtgtatagaacagggacttgtctacctcttatgagagccaggtggcacagtctgggatgggtctaggacagctttgacctcatgggggctttctgtaatctagaaacctatttccagtgctttgtctccacctccagtcacctctgcctggaagaacagtgttctccatgctgccttatttccctgtatcttcttccactacctccctcttcttcagtattccagcccaagtgcattaagtccattaaagggccagagggattcagctataggaagaggatttgtgctttctggagcagatgccttagttcattttttactagaagaaacaatagtttgttacttagatgcccctgggtctctgaggctactttctcccgcctaccctctctaagacctcatattttgggtggctttgtgaaggtgtctggtgtacatccaggtatgagggagatgcctttctgtctgaagtagatcaatgggtatgacctctctctctcctcccgccagaatgaacaattcgtcatggaggtaggcaagcagcctgtgatatttgaaaacccaatgtatgcagccaaagacagtacttccaaagtgggcctggcagtgcaggtgagatgtctgtcccacgatctgtttttagccatcgtggttgctgggtctttctgtgttgcagaatgcaggcctctaacctgccctcctaatgggaggaagcacagtggcctgcatctcagcttcaccatccacagtcacgaagctgcgcccggatacagccctgggaatagtcagagccctgtgtcgtggcagagatgtgaggcttagcagccatgctggggggtgttcactgttctcagtcattcctagtcacccgtgccagagcaaggggtatgagtctattagagatcctggagacatagggccctatgacagaaacagggaactatgtcataaatgaatggctgagagacggtattatgaggctgcttatctgagagggctaaagtgagagggacggcctgttctgaagagtatagaggtctgaagttaagatttgctccgaaggcttattactctgtacctgtaagagaagctggaaggagaggcaggtgctttccattagcctggactaatggctcagcgctggttcccgatccatcagcttttggcctgtccttcctttgtctatgcagctacaggaaagagctatcagtgtttgctagtgatttccgattcaacatatagtatattttaatatgaagtgatagaaatatttttcaaaatgagctctttcttaagagcaaaaagatttgaatcttgaaagagtctcgtctgctctttgataatgtatcgtgggatagagatgacatcttgtctggtatttttcacatgaaataaagtgaggccatgcatacaaacaaaatggagaatgtaaaatacaaggagtatactgacttccttgtaatatctattcagggtgatatgggtttaaagaatagctgcgtaattatgtgaatttgacaaaaaatagaaaagtattaaggctgtttgcttactgttttttaaaattcatcctcttttaggtagtcctcaaatttgctcattttattccttttgctatttatttatttatttatttatctttggagacatagtctcactgtgtaccccaggctggcctcaaacttacagatatttgtttgcctctgccactgcttggattagtgttgtagctacacacctgaccacactcatttttttccttaatattcaaagaggattctgtgcactgcgtctgtgtggctgttacttggtgttgttacttagctagcacttggttgccagtatgcaactggaacacctgttattacaaattatggtcaaggtgggaatgaagggtgtagacaatgtagcaggggttacatcaatgagtgtgtggcaatgaggggtgtcctcgcctaccacatttgatatcttaggtgacttagtggttgttgcacttatttggggaaggtggaagtggcatttagtttacagctgctagtgtcacttatcagattgaaaaggtacgtgactgtgtctgtgggggataaggtggcaaacagaacccagatctacttattcacatattcatttcttctttcaaaaccgtgtagggaccgtcagtaagctcacaggtgactgtaccagaaaatgtggaaaaccagaactatggaaggtccatagatccttctgagatagttccagagccaaagccagcctcccctggagctgatgaaactcaggtaatgataattgactcatgaaaagaaatttgcaaagaacttggacatttctgagttgatgctaatccacggaagactacgtacatacaaatgaaaacaaaattgtagatttagtatgtcttcatgaaaaggacatagaatctgggacattcacacaacatgcacagtaatgtgctgaggatacatataaaagagaatgcacctttccaagttgctcttagtgccttactaccattaccaatgccgaccaccaggtggcacaattttattaccttgtcctctgtgtccagctacacctaattgtccatccaaccatcccacaagcattgctgtattaccgtgccaaggaaactagtccaggagacaaaagtcctgcttgatgaatctttctttatcatatatgctatatcttcacatatcctagaatatttgggatgcagtttaacaagcacctttgaaatgaaattgtataaaatggacagtgtgctgctagctttaaagaacgtgcgtttagctatcccagatctacatgctggattctagacactcattttacccctgagaactgtagtccttaccagttcccttcacaaggggatccatgggcaaattggaaatgatagcacttccggataaaaaacactgtgagacatttaaatgttcctggtccttgtgcagagaaactcagtggtgtgttctttaattcagtgtggctgagagaaaaaaaaatcacctcttacatgtacacatgcatagacatgcaaacacacacacacacacacacacacatacatacacaaacacacacacacacacacacacacatacacaaacacaaacacacacacatacacaaacacacacacacaaacacacacaccatagagaggaagattttggttcactgtttttctagggactttttttctccttaagctacatttaaaagtggacattgaagatttgttttccacagccaccagaatacttgaaatatcaaatgttcagtccctaggtctggctgtactccaaggcagtgtctggtttacttctttattcttaacatttctttccagtcaattctcgatcttagggacctttcttagaggtagcttggtctgtaaggagaggcaatgtggcaagaagctgttccctccccccactccaggtcccagaaacagaacgggcatgggggtttgttgggaatgcgagtcaaccttcgccaattgcagcatagctccatgcctccgtctgtgctgcccactggttcttgcactgatccaggccgagaccttccaagttctgctccccagcgtctgtccagagatcctgtatctgtgacccccggacactaaattgtcacttggctcagcagaatcacttgcttaggtcaccgaggacacgaacttccaaaggagtctctcaagcttagatttcttagtaaatatacagagaatactcagaattcagaccccgtcactcaaacctgtcatttcccacaagttgcatggacacacattggatctcctttagagacgaggacggccatattcctcttgttagcaattacttagttgcatggagctattgcagaccaagacaatgacttaaggtgttggccttctctacttaacttcacatttccaaacatatggctctgacttccttctcctttttcctctgtttggtgacacagagagtggatgtgtgggttgggtgagtggtcttgcctttcttccgtagtcatgtgctcctggtaccaaatttcccacccatcctgcaaaacacatgggttacttgatcttccatagggggaacttgttaaccaggtggccaacactacaaccactccataaggtggggccaactcactggtgtgtgagtgactggggttttctctttgggttcttcagtacataggcctctctgctagtctaccacactttagctatttgtcctgctgtgactcagtgtgtcatacaggaggaacaaaaaaaacctgcatcaaaggattattgagatgaaaacaaccccacaaaccttaaagcaattcccgatgcacagcaaacactcagtaaatgtcagttgttgcagatgatggtgatagtgatggtgatagtggtggtggtggtggtgatgatagaggatgtgtcgaagtgagagggatattctggccaagacatagttttggaaataagagacataatttgggttttccttgagcttctaggctgctctagaagtctgcctctgtcttagtgtcttgtatactctgtatctgactggctagatggcagtcttctagatggcatgagtccagattctccatctgcacattttacattgaggaaagattttgaagttgttacataaaaacacctgagagtcttagctactgtacagggacagttgaataatatactacttaacccacacccttaagttaatatgctttcaatagagtttaaaaacctaggaaaagacacctataaagaaaacaaaatagaaaactccattactgaaaaccgtccatctcctctttctgtttagggcacaaaatggaatatcttcaaacgaaaacccaagcagacaacgaacttcgaaaatccaatctatgcagaggtaacttttaatccctgttctaagtacagacattcattgtttggctaggttgggcacacattgaggttattctggacaaactgaccaaggttagtccttatacagaactgtttatgatcatgccgggaacataaagccatgtcatccatgtcttgttgtggttgcagatggacactgagcaaaaggaagctgtggctgtggctccccctccatctccttctcttcctgctaaagcttcaaaaagaagttcgactccaggctacactgccacagaagacacctttaaagacaccgcaaaccttgtgaaggaagactctgatgtatagccttgccaactctctagggaacatttagacactcacttttgcacatatattttttacagacaaatgaaaaagaagttaacattcaatactttataaaaaaatatatttttctctgtttgcctataattgaaggtgtgtcgtgtgtcttttttactgatgccatttcctatttttacaattatcatgaggtactgtgtatatcttgcactgatgttgtcaggaggtgatgctgtgaatatattgtacttgtgtaaatttcagaaggattataacatctctgcctctgctaatgagagtgcctgctgagtggggtcgctgagctgaagaataaatgatctggtgaggaaaggagttggcttagggctttgggtctctctagagaagagatagtactcatgtttcctttgaaacaatctaggaagaaagccctttaagcttcatttgtgggtccgtttttacatgtcagcacttaatcaataatcaatattcaacattacgtgtcaacctgattagtaagtgtaccaataggggccagtgttggcttcatacactgtagacgcttctgaccacacagaaggtacacaaagtgattcagttggacccttccacgtgcctctgtcttctaaccccagctgtgaccctaattgccaagtcaacatctgtatctgccatgtcacgtcccacactgagtttctgtttcattgaatgagctcttgcttgacagaccttaaatcaacccttgcctggcatctcaggtgtcacctcccttagtgactggaattctggagctgactgactaaaaccaaacctacttcataaagtagggtgccaaacagataccagttaatcgaaacctcagctgggtgtttggctctgggtgcaaactgttattgtattgactatttatttcctcagttgacgacgaaaagaaagggaaaacattcttactgagcctttttcacgtctttgcctaaagctgtacgtttgtgtcaggatgtactgtatgtcccggctcttctgagcagttgctgaattctctatcacaggaaccatggcacgagcgtacattttctatagcaagtagcattcccggtttctctgtgctaatattgcacgtgtgttaacgaatgaatggaagggtgggagagtggatgaatgaaatatactactgattattttattctcaagtcctcgaaatattttgttgctcatattttgagtaccgattgtaattactttgattagaaaagaaaaagctactggaaatgatgctgctggaaatttctaataaatgtgtattttatcagatggata

SEQ ID NO: 26 - DNA, 33092 bp, Homo sapiens
  source 1..33092: mol_type = genomic DNA
agttccgacccacagcctggcacccttcggcgagcgctgtttgtttagggctcggtgagtccaatcaggagcccaggctgcagttttccggcagagcagtaagaggcgcctcctctctcctttttattcaccagcagcgcggcgcagaccccggactcgcgctcgcccgctggcgccctcggcttctctccgcgcctgggagcaccctccgccgcggccgttctccatgcgcagcgcccgcccgaggttcggctgcttcctcctcgcgcgatctccccgctttcctcccctccacccctactcgtcgcgggcccctggcctccggctctccggccctctccaggccgcggtcggctccgacggtgtttccctccttccctccgggcgggctgaggcggctcccaggctcccgggacaccgcggaccaacttctagtctctttttctctcctcgaagcgcttatctgcgcgcagccttatctccgagttatctcggcgcaaaggggcgggagccggtagttaggcaggcagagaaacttctttcttgctatctagccaggtctgtgtgtgggcattaattttagtgtggtaatctccgatgagccgaggcgatttggaagagcagcctggaggaggccagcccggctgcatttcacctccctcccccactcgctccgagtctccctgtcattcttcctgctctcccatttggggtcgcctcggctctggggcggtctcacgctcccccctccccagcccgttgcgttccccctccttttctctgctctccgctccaccccgctacgtccgattccggaacggtccggcgtttctgctgctggagatgaccgcggggtgggccgggtggcccggccggcgtgagcgcgcacgctggtggctgcaggcgcgggccgtgtctaaggtgtgcggcgccgcggggacgccggtggggctggcgattcccgccccacaagctctccgcattgcctctgctgggaaggacccagactgctgcccccgccctggcgtcccactttccctgggccgagttgcatttctctctggggctcgcgttcgggctggtcagcgcagtccgggaagctctgggagagccaatataggagaacgcggcggtttcgttttcggggacaggttgccttccttacgcgaagggttttcccgtggggaaccctcaccccgaggcatttcgggagaggggcatccgcagagaggcgggatgcggcggtgccgacacgcacagctacttaaattcttttgtgtgtcatcagcccgggggagacactttagggcggaaggaaagcctcagccagcttctgcagatcacccctgggatctggcgcgcgcacggagaaaggatgcggccgagggggtgggcggggaggacgcggggaccggagcggtgcctttgagggagggctggtatcccagcccttccagggccctgtggcggctgcgcaggctcccttcccctcccttattgatctccacgcccggggcagaaataggatctttgagaagtctcaaatgggatctttgagaagtcagatcccatttgaactagaaaaaggagtggaggcgaggtagcgtgcagcctacgctcttgttaacccgtcgatctcctaccatacccgtctcccccaccccacctcaggagctagacgtcagcttggagcggcgccggaccgtggatggccttgactgacggcggctggtgcttgccgaagcgcttcggggccgcgggtgcggacgccagcgactccagagcctttccagcgcgggagccctccacgccgccttcccccatctcttcctcgtcctcctcctgctcccggggcggagagcggggccccggcggcgccagcaactgcgggacgcctcagctcgacacggaggcggcggccggacccccggcccgctcgctgctgctcagttcctacgcttcgcatcccttcggggctccccacggaccttcggcgcctggggtcgcgggccccgggggcaacctgtcgagctgggaggacttgctgctgttcactgacctcgaccaagccgcgaccgccagcaagctgctgtggtccagccgcggcgccaagctgagccccttcgcacccgagcagccggaggagatgtaccagaccctcgccgctctctccagccagggtccggccgcctacgacggcgcgcccggcggcttcgtgcactctgcggccgcggcggcagcagccgcggcggcggccagctccccggtctacgtgcccaccacccgcgtgggttccatgctgcccggcctaccgtaccacctgcaggggtcgggcagtgggccagccaaccacgcgggcggcgcgggcgcgcaccccggctggcctcaggcctcggccgacagccctccatacggcagcggaggcggcgcggctggcggcggggccgcggggcctggcggcgctggctcagccgcggcgcacgtctcggcgcgcttcccctactctcccagcccgcccatggccaacggcgccgcgcgggagccgggaggctacgcggcggcgggcagtgggggcgcgggaggcgtgagcggcggcggcagtagcctggcggccatgggcggccgcgagccccagtacagctcgctgtcggccgcgcggccgctgaacgggacgtaccaccaccaccaccaccaccaccaccaccatccgagcccctactcgccctacgtgggggcgccactgacgcctgcctggcccgccggacccttcgagaccccggtgctgcacagcctgcagagccgcgccggagccccgctcccggtgccccggggtcccagtgcaggtaagggtcgcgcctcaggttcggggtgcgggtccaaagcgctggggcgcacgggggacgtggagcagctgctccactcgggccctgttttcaggactttctcgtccgggtgcgcggaggtcggcctggtcccaggaaggatttgcaggcctgtggctgggtaacccagagtccggtagcgctgaggcgagttgtgccaagacttgagtctgttgtgccaagttcctttccacggatgagactaaatgcacatctgtaccttcgtgccttggggaagctcagggccttgatgagtagtgaatggcatctgctattggggaaaaacgaggctgggagggaactaacagcgcttgagccccatcgcagaccctactttgggtgagtggaagaaattccacgatgggagtaagtttgggagagtggcgggcacttgatccacccccaaacagacacacaagcacatgcaggctcacccagtttaactctccaaagggtgcgtgtttgtgttttcctagagaagggtatttagaagagcacaacagaagaacctagatgttcctagggaagctagttggcgtctcctctcccacaagggagagagggaaagaagagagggcacctggagtggtcagacttgtgacttcatggtgaaggagagctggtggataggcccttgggcttggcatcagctgggccttggtctggggctgctgctcacatggccaggctgcaactcagggatcctggagctggggcacctattctcccttcgaagtttagcccgccaatttttcagtttccaatttgactcattttttcctgtatctgggagccattagggggtaaaccgtgaaaacgctattgtcaaaaatacctggaaatacctcgttttgaaaagtgttttgtttactccagcacaggagtgtgggagccctgttaggctgtttttctcagatgcaacattctgcgtccttggtgctttcaactggcttatcttaccttatatttcacctgtttgataatctttctaaggaaacaacatctttttttattgtagtttgtttgaggggaggtgtgggggaggccccttgagtcacagaggtggcagagtggaggaaggcacattactccaaacagtcctaccccggtgtcttgtgtatcccaggtctgtgcttctcgtgggagcctcgacgctacctttaggacagcaagtcagtcctaggggccaggattccttaggataaaatgggacattcccaaccttgtccgcaaaagacacgctggaaatgcaagtggtctgaaagagagggaaccaatttgaacagctctctgatagcctgagttctttctgtcttcttccaagcgctgcaagacttggtctcaaaattccctctttttagttttgctctgtcgcccagtctggagtgcagtggctcactgtaatctctgtctcccgggttcaagcgattctcctgcctcagcctcccgtgtagctgggattacaggcgcgcgccgccacacctagctaatttttgtatttttagtagtttttgccacgttggtcaggctgtttttgaactcttgacttcaggcgatccattcgcctcagcctcccaaagtactgggattataggcgtgagccaccgcgcccagcgaaattccctctttttgcttctgctgcaaagctggccctggagaccatttttcccctgtgtgtggaatgggatcgggggaccctgttgagatttgcactgttggcttgggacttgagagtcagggctctcatccttacctctgcatagggacccgtgtttggctcccaggagcagagagatggagaggctgggaatctctaaggaggtaatggttgggtgtgaagcttattttgtcagtcggggagttccgtagggaatgtgcaagggtgttgtgagttgggtgaggggtagtatctgcagattgagccagcgcctgcagctctgcctatttcttgacacaccttagcctgatctccaggttcctttcctccaatcttccagcatttcatatggctgagagagtcttttgatgtttacagtaactggtcctgtatgagaaatccttttagaggcagtatggggcagttgtgggcaagttaatatgtttctttttgttttaaatttagcctacacttttcctaattttttcatcttctgggcacaccacagttagaggaattttctgtagacccagaagatttgttatttttttaagtatttttttaagtatgtttaaaaaaatgggaagggatttgggaacacccagcttttgcatagagtctgttaggaaatcaggaagtgactgggaccaagccagtattggggtgaagggtggggagcgagtgaccctaactttgcttgtcctcacaggtattctgaggccagcttcctagctagatttcctgtttcttagatttttttttttttttaaacaaaccgtttttggaggcagacactttaaacaccagagctaaaacctgagtgctgaacttgatcaacccgcacaatttggaggcttctggaaacccacactatgcacctctcgctgactgggtagatggggtgagcttactttggggtgagctcagagtcctcacactcctttatttcctgggtcctacaccctcctaagcgcctgcagaactgtgagtccctgtgtcttggtaccacacacagaaagacaggtggtggtgcccttctcccctgaatctatcactccccaagggcaccgcaaacagccatgttaggagagaaatggtgagttgaaaagggggaacttggtgagcaagcccccagcttttatatcttacagcttttataaagacagcatttttttttcctttttagtcacttacaggattatagctgcctggtgggtttgggaaagaggtagggagggaatgagagagattttattcaactaaaaataagcaagcttcctaggttgtatttatccaaagtggacttttaattaaattttgtctttgggttttcagatgactaaatagttctacctggggagttcacactgtcttctaataggattcttattgttcccagtcataggactgggttttccagggaatgccccactcctctatccagaggggctctgataggtaacattttaaagtcaacaacaaagacaaataccttgtttaacttcagtgtccttgaagacctgagcattttactgattaccgtagtcaatagtggcttttagggcggagaagaataaacctttgtgatgtgttgtaagttgcagtatccccatgacaactttgaactcgggttgtgtaggatgccagtttctttaaaacttaataagaaatgagaaaagagacttgttttgtaaatagtattaatggaattaaagtttttatgctaaagtcatatttaaatatcgttaccacacagttgatagtagacacaagcaataaactgcaaggggatgagaaagaaccaaaaggttcaccagcacataatcttaagctaaaactctgaagtgtaatgtttatttactttaaaaagtgattcaggaatgcttcttcaataatgcagaactaggacatttaaaccttctataatctaaagaaccttaaatggcggtctatacttttttttggtctatacttacaataagtacctttctcatttttagagacatttattcttccatatttaaccttcttgagaagtaataaatgttacatttactcttaattaggatttgtttttattagcaggtttaggttattgtgaattctgaaaactaaccaaagaataataataataaaattatgtaaaataaacacattttaaatcgattgctaactcaaaatgatcactgggaaggtcttggtaattttctcaatcagtaaggtatcaaccttttataaaaattttgcagatagaagcagttggacccacttctaaatcgggattttagcatttgatctttgtggcatgaaaataaaactctgtgcttaacgttagtgcatttttcccctgaaaagatgagagtaatcttctcatttctagtttctaactaacgtaggtgcctaagaatagtacttttaatttcacttgtgtatctttaattggagaagaggcacatatggacgggtggcagatgtagaaaatactttttaaaattacttgagataaaagttaatgaggcagcctcgctgtgtccccggatatttgtgggttgcagcggggctcagtggtcagtatttctgtgtggcttgctcgggtttggcaacgacgtactgtaatgatgatggatttcagtctttaaaagctccgggacagcctgagagtaggggtcaggggactcaagccgacctccccaccgctcatctcggactctgacgtcctctgcttccagcactgtctctttcccggagtctctactggggcgctccgggtgtgcagaagtattggacaaatggtcagtggagcaatagtgacgaaataaccctgctcctggctttgcggccaaggagaaaagctcagccgggaagggcacgggcagggaagccgggcaccggggctgggggccggggtccccggggtgacgcggggagggacgggtccggcgcgcccactcccgccctcacgcaccgctgtcgccgcagacctgctggaggacctgtccgagagccgcgagtgcgtgaactgcggctccatccagacgccgctgtggcggcgggacggcaccggccactacctgtgcaacgcctgcgggctctacagcaagatgaacggcctcagccggcccctcatcaagccgcagaagcgcgtggtgagtgtgacccgccctgcccctggctcgcggccggccccgggctctcctggcccggccggccccgccctggctcggcctgccttgggcgtccccctcccaggggacaggtgcggccgctgcggtcccaccctagcggggacccagcggtaccatcctgtcccggctgttccaacgcccacccgctggcgcccaagtagaagttaccccgaaactggcctctgggaagccaagatagcctttccccatgtttacgcgcaggggatgacgtccgtaaatgacaaaaacaaaaacaaacaaaaaaggaaggtgcaaaatgttaccatgttttaagcaaaaaaagaaaaaataatctatatatctctaggtgtacttgccaaagcaccgtaataattctggtaagataggcaagaaattggtgatggtaacccgaggagaaaaacagtagacctaccgaggccgggcgaaggaagacttttttcactgtgtatggtttagattttatgcttgaaaaaccatgctcacttataccattcgtcccccaaatagaatatgccagaaatccacccactcacgcctcctcacagccacattcttttgggtgccgtttactttgtcctttccaccttcttggtcacttctacctcttatcctcaggtgtatccccaaataccatatcttggattgcccttgagcctggtgaaaatttatttgctctaacttttgttatttcaaaatcagagaactttgtagaacttgagtaaaagtgtggtttgtatgttcttaagttgagcattttccccaattcgcacacgttttactgtttttttgttttttttttttttttttttttttttgagacggagtttcactcttgttgcccaggctggagtgcaatggcgcgatctcggctcaccgcagcctccgcctccagggttcaagcgattctcctgcctcagcctcccgagtagctgggattacaggcatgtgccaccacgcccggctcatttttttgtatttttagtagagacagggtttctccatgtaggtcaggctggtctcgaactcccgatctcatgtgatcccgcccgcctcggcctcccgaagtgctaggattacaggcgtgagccaccgcgcccggccaccatgttttaaagtaagggaatcctgatttcagggattaatctcgtattgtcattgttatgtgtgcttcctagccggagagagtatttaccgctgtaatagagaaaataaaggaaagctttcaccagtcccactctaaggttaacatttgtttagcgaagtactcataatctaataaccctttaaagctaaatatgttacagttagatgccagacgtcttaagtatcccagtaatttatttgttatactctaattagcaggaacaaatgctacacatgttgtttgtgttaaatagattagagtgaaattgcatcacaatgtaagtctgacaccttaaagagaagcaattagttttatggttggttttgttttaatgcatttaaaataaagtggccgaggttaatttaatgagtgtatgtgccttaaactcgttacaacctcccacagcttaaaattttctttaaagggtacccttaactgcagtgtgtgactgtgggtttcatgttttcttaaatgcatcatattaaagaagaaaaagtagtaactggaaaatatcccacagaagttccttgttttcatataatagacaacacatgaacaatgaaaccgatttatttttctggaaaggcacattgagctgagtactaactgaactttcaaaggtaacattttctagagattgagcaaaaatttggtggaatagtagtcatttaggttccagttgcattataaatttgatctagtaacatttagatagtgccatttgttttgtgcatgtaccagtaaaaataacttagaaggaaaaaaaagaacagtttttagcatttctgaatcgttagctttctttgtgcttagcaggtgtcttggccataaccaaggtcagcaaatatgctttgtaaatgggttataaatgataccaattgaagggtgtgtcactatcaattaggtctccttgtgggcttcttatttatggttttgatggatctggcttagttctcagaagcagaatgttgaactcaagtttgtttagccagcactatagaaccaatcactgtgaatttgaacttgcaatacattgcaaaataagagatttatggtgtaacttgaattccttgtcagtgaggaatatgactgagatcacttgttacaaggaacttttataacccattcacctgcatttcacatgtttatgaggactggcttcacttatgatctgcagttgacagtcataaagtcctttgttataatggcaaattctgataacaagtttgcttcacattggctccaaattccactggaaactgtcataaatggctggtttataaagtgaaccttcctgtcccttgtttactgatttcacatttatgaagagaaaggaatcctttcctaaaaaattattttcttttaaccacaaagaaagaaaaaagaaaagcctggatgtgtaaagttttgttaatatgttgtcatcattttagcaaagcagtttcccaggtagctctcctgtgagccaagcatactcatttcaactaaaggcaaattgattcttagcactgacttcctagaaatgttgtagtgctaaaaggtttgccagtgtctctgtttataacttctctgtagagtgatgctaagtaatgcaacaggatgtaaaccataaatgcagattttaatttcatcttttaaatttcccagcaaaggttttggaagtctctgtcctgtaatctgtgaatattcgatacatactcaatttacatttctctcttcttcattctttacaattgatcttaacttcccaaattttgtaattttcaacttggtttggtcctgaatctttctctgatttttttttttaactatggaaggcttcacgaatttgggtgtcattcttgcgctggggccatgctaatcttctctgtatccttccaattttagtatatgtgttgctgaagcaagcatccattttttttttaactgaagctatgtcacaatttttaaagtaatttacagcatttgaaaggaaatttaagcttggcaacttaaaaacgagttttatattttgccattctgggtaagaagttatgttagcttattataattaacatgtagtaatctagaggtaataaattccctttaaggctgttatgggcataaagaaaacatggaaatgggagtgacagtggcagacaggtggccttttacctttcctggtaataccaattaaccctttgcatgaacgaaagttgagaataatactgatagggcaaatactgatattagtatcactgcatctaagacagtggcagcattaagattatgccataaaatttgctcgtatcctttgtaaaatagataaaacaaaaatgcaggcagcaggcaatcatgatggtaattatggaatgtattcaaatatatttcttttttttttttaaaaaaaacttttacccctcttctgaaagccatttctaataatgtactttcaaagtttccattaacgtactttcaaagtttctggtttactcctttacatatatctgagaaatagacctggtgatctccggttttcaggggaagtggagactgcccagagccatttagcacattagcaagtggcttgtgattgcatttcacgacctaaatcttagacctgtgactatagtgcacggccaattgctgtccacggtggggggtgggcggcagggaggtggggcactttcatgttaatgtctacttgtgttgttacttctggtgtgttttgagtataactctatttggccaacttttagaaaatcttttaattcccctaaaaaagataccagtagtatctgggaaactctaaattggagaagaaaccagggatgaaactctccttgatatgatgctggtaaaagctttgcatgaagttattggccaactatatgactgctcccgggtattcttgaattcacggagacaggctagctggagaagtaaatcaaatctatagggtccagcatactatgcaaacctcaaatttcttggcccagaaaagtcagtataagtacactgcaattttttttctcaaggaccatttcatttataataaaacagatacatacttgttgatgacagggacaaaataccttaatgtatgtatgtaatatatatatatgtcacttatatttttccacttatgttcttgtactgtttctagccttcatcacggcggcttggattgtcctgtgccaactgtcacaccacaactaccaccttatggcgcagaaacgccgagggtgaacccgtgtgcaatgcttgtggactctacatgaaactccatggggtatgccatgtattctgctcacttgtatatacatttagtatctggtttgtatgtgatatcagttacaaagaatcagcaaatgaaagatactcaagtgaaaaatttgaatgcatataatttattactgaatatgtttaatatattcagtgtacatactgaatatatttattgaattgaaggtgcttttaattataatatgaaatattaccttatgcaccagtaggaaacaaaaaatgctaccagttgaactattgcaaacgttcatttaagacacattccagttttagaaatgtgaaaatgtgaaaagtgtgtattttagaattggtaatatggtagtaactgtttttaaaaatgcacaattaaggaaatcaataaaaaatgcacaatcactagtctatatctcttaaaaattttgaatgtaatcagacatttgtgcaaaagagtaatgcatttaatagttatagtttgaaatatttcatagttcattttaaaggattgcacaaaatataataaacaactcaatcttaaaaagaaaaataaccttgcatctgtaggaggaaggaaatacatgatctctttgaaataatacttcttcaatgaatagctactcatttcaaacaataaacgttaagttgaaggaattaaattctccttggcaaatcatctcattctttctgaaggaatctctgcatttgatgaggaaagtgtagtctttgtgcacttgggatcttgagtgtgtataaaaattggattgaaatttatgccaagttctttttttttttttttttcttgttttgagatggagtctaactcttgttgcccaggctggagtgcagtggtgctatctcggctcactgcaacctccacctcctgggttcaagcgattctcctgccttagcctcccaagtagctgggattacaggcatgcgccaacaagtctggctaatttttgtatatttagtagagacggggtttcgtcatgttggccaggctggtttcgaactcctgacctcaggtgatctgcctgcctcggcctctgaaagtgctgggattagaggcgtgagccactgcactcggccgccaaattcttttaaatgagagcttttagtgccaatgttgggtctttggtttttcttcaatataatattaaatttatggcctatgtgaaaattttttaggtgcccagaccacttgctatgaaaaaagagggaattcaaaccaggaaacgaaaacctaagaacataaataaatcaaagacttgctctggtaaatatactaaaatgacgtttgactgtaaagtatttgccaaccttaacagtagagcatatgtatatttataaggtttattttgactgttgcaggtaatagcaataattccattcccatgactccaacttccacctcttctaactcagatgattgcagcaaaaatacttcccccacaacacaacctacagcctcaggggtaagtattaaaacagcatagactcctaaattactgggctgctctctagtaaattatctcaaattttatcttatctggtagtacaataatctaaaccaacagttcagtttagttagttgatacctaagaatagtttttagaggaaattacatttaaatgtcaacaaaatgacaaacttaagtactttacaaacctcttaattaagatcggtatcatttttttatggttaaattaacccaagtaaaagcaagaagttttggtttaaagtgttttaaattgttttatttccaggtttttatcagagttgctatatatattatatgtgtatatttatgtatttccgatgtagatcataagaactatgaggccagtggtttcatagattacagtgcccataacagttaagtagcttttgtttatcctatcaattccagcctttttttctttttttatcatccacccaaagcaaagctcatcataaagtgttatatgctgctgtattcactatttcctttgcccaattgtgttcttgctgggagagcttgccttcttctaatgtaccttaattgtactggcgtttatttcagctatgacaaaacctaggagtgatttgtgccactgtggacaggagatgcctgggtcttcgtgaggatcacagacttagtttcttataaagctgtgaccaaaactcagtttgcctctagtagagagcattttcccaccctaatgtttcccaaatttacctggaatgcccttctaaaaaatactgggccttccctcagacgtcagtgagctccaaggcagggcctgcggcaagcaggactttaaaatgtgtccttgtgacccttgggactacactgagacaagattaggactaaacaccagcatttaaatgcctatttacttagtaattgttttctacatttagttttctcctgaaattatttggggtactttaaaatactacagattcctgggccccaccctggattttccaagtcagagtctctgggtgtgggacttggatatctatctgttgttgaacaagtgccccaggtgaaattggaactactgccccggaggtgtttgggaaccacagacctggtttctttccactgtatttttactggctttaacaaacaaaaattaaatatttaaaacaaaatgtttaaactgtgcttaaaattatatttgatatttttctttgtcctcctacccaaattcttttgagccttttctgtaaggaaacaaaacgtctttttagagtttcacaagggaagaagccttttagttgtttttttttttgcagactcatggtaaagaatgtttctaggctttataaaggtggactccatgctatggtgttgtgttttacaggcaggttagatgtaactgaggattgaaagtggtaaatagaacatgtttcttgggaaatgaaaagattatttaataataattattttttttttgaggctgagtcttgctgtcaccgaggctggagtgtgcagtggcgcaatctcggctcactgcaacctccacttcccggattcaagcaatcctcccacttcagcctcccgagaagctagaattacaggcatacaccaactcacctggctaatttttttttgtatagttagtagagacggggtttcaccatgttggccagggtggtctcgaactcctgtcctcaagtgatccacctacctcagcctcccaaagtgctaggattacaggcatgagtcaccgcgcctggcctaaaaatatcctttattatgccgtagtcctcaggagcaattatgtagctagaggcaaaacaatttggttttctaaagcagggagggagccgcctctctcctagctgaaatgaggactgctgccagctccaagtcacttttgttggtggtacagtccagcttaaatgtggcaaaaagactaatttgaatgataaattgcactgaggtcgatatatacccaacaatgggcttcggggacttggaaccattgtgggtggagtcttgtgattttgtgacgtaaaatttcaaaatttgctattagcaagtcctatcggttgctgtccagcgaaaggagtgaaaagccagtgaaaagggccatggtctggctagaagaagggccttgggagttccatctctggtcctaggcttattgtcccaggaactctcaccagggacagagcagatggaggtggcttgctggtcaatgcccttcagaggaaagatcagttccccaccagaggccaggaggcaaagcaacaaggatgttaaggatggggttggagagtactagtttcacaccaggtcttcagctgcaagcttccatccctgcggtagtctaggcagcctccacggggactgagaagctgggagtggctggtgtgagctgcagccagggggcatctctccgagctctccagcctctgggctgcgcagcagaaacactgactgccattaccagggcagggggtagggttgctggcctgcctaccaacctccccagttccccagggactgactcttggccttgttccgagggcacacacggctggtgcctgggcttgcagggttttatttcatggatgtctccaaaagcctctacctgctgtggccattgtggggaaacagctactcgtctgctggctgcctttggaagctgtccccctgtaagaatacctgtagtaggcttgagtggtgtccccaggttgttttcatggcgtgcctgcgtataactgtggatcccttcgcactttttgatgtcctctctgggtgggctgagccttcatgtgtatggcatggcccatgtggctgccgagtagctgtgaagagtctgctggaggagccatctgtgagcagctggtagaagcatttctaaaaggtgcctgtgttgacaaaggtgtgtcattttcccattttggtcacagtgcataatgttagagggcagctggctttgtgactgattgcctgtaggattttgtgaaatgctgtgggtgaagaaaatatcagatccacatagcaaggttgtatctggtgtttacaaagtatatgtattacatacacagcaccgaggttggcttggagtttaagcctcctaaggtaatgcgtccaccccacggatctccagtgctccctgtgactgactggtagaaattagtagtgcagggtgaccctcgtttgatggggccacggaactacaaagcaaagggcgatcttaggcaccctcccagcagaaggtggaactgggggccacatatccctccatttagagatgtaagtagcagtatcactgcctttctttaatgactgtgagttatagcaaggaagtaaaaaactgttccagaggcccacatgaaacatgctgtttactttaattccccactgaaaaatcagttgtaggagatcaccggtaggcattcccagcaggcttattgtaagtcctgggacatgacaggaacagggttctgacctgcctttcacgtggccatttaagtgatggcaccaggaccttagcatgacacagagtcctgagctctcttggccaggacgaaaggagccacaggagctgagtattgtggaaggggtctatcgtggttgtctgcttctgggagagggggctccagggctcccctcccctagcaggaatgaaggtgtgggcataattcctagtgcacggcattcttccaggataagttgtcctaatgccacgaaaatttttgtgctgctctgaagcctcatgtcttagctttatatacttgttaatctgtgccttcatgagacctgtgtctgggcaaaaaggagacattccttcagataagagtcagcaagtcgatgaccttgccaccttatgactcagtttctcttggttataggctgtgcatgtgctggaggcacagggagggcagtgtgtttctgtctgaaatcaggaggactcacggtcatacagccctgcttaaaatattgcctatttttttcttttgaaattatttttgtttattaaaaatgtatgttaaacttaaatttttgataaatggttgctttctgtggcaaaaatagtctttctttctggctaagaattttcttatccatgcagatttactaaaaaatgtatatttagttgatctaaatagatatcagtttttctttgggctgggtgcggtggctcacccctttaatcccagcactttgggaggctgaggtgggttgatcacctgaggtcaggagtttgagaccagcctgaccaacatggagaaaccccgtctctactaaaaatacaaacttagccaggcacggtggcgcatgcctgtaatcccagctactctggaggctgaggcaagagaatctcttgaacctgggagttgcaggttgcagtgagctgagattgcaccattgcaccccagcctgggcaacaagagcaaaactctgtctcagaaaaaaaaaaaaattttttttctttggcttttattctctatggattgtaagaatactaaaatcttttttttcttgaattccgtttattgactgaattgtattttatagttttttttggttgttatttaggagagaaacatggtaatgttctgtttctgcaataagatttaataagtagtccacaaatggtcctactcctcctatttctcctcctataactcaaaatttgtaaaactggaggatactttatagctcaatccccaaattttatagataaaaagtttttttcttaatttcttttgtaataggagggattaacttggagatgaaattagcaataatatctgaaaatggcagctacagaaaaaaagaaaaaaaaattagcaataagacaatgtctgagaacaaggagtcactgaacatattttgcctgcctaaaaatagtttctataaataattactttaaaaattaggccaggtgcagtggctcacgcctgtaatcccagttctttgggagactgaggctggaggatcacttgagactaggagtttgagatcagcctgggcaacatagcaagatttctgtctctatttctagtttaaaaaaaaaatgaaaaaaaagtaaaccctatttaagttaatattaaaactaccaatataatattgaaatcatcattaaacataaagtgttgaagttaaatggagagagaaatatatatgaccagcccttgctttactggtctttgttccatttgagtaaaacaaagtgccacatctggaattgtttaaaacatggaggtggtaggggtgggtagagagagacaggtatagatgtagatcttactactggtcagatttggacgtgctttaaaggagtgataactagagttggagatggctccgcagagtagaggaaattaaaattagttaggatttttgcaggggaaaaattgggatagaggtatccaggaaagaagaaggcataggaatctttggagctgaagggaaatagttagttcattgtgactggagtgtagggggtaagaagccaaaggcaggaagtgaggctggtagaacgggtggaaagtagatacttgaaaatatttcaaatcaacgatggactttatttaaatcctgcttcggtgacaaatgtgttttctgtctgtacactggagtccaacaattaggaccttcttactggagcgttctgtattttgataattgatgtaaacaaatgtagcatgctcctgcttgtcaagtttacaagcagagtttcctcctcacaattagggaggaaaaacatctgccagctgattctatgcgctgaccttctttaggcctgtactgtaatttctctgcctccagggatcctgggggcaggatggttggagtggctgcctggctacctcttctaatggaaacatattagacatggtgtattagggataggaaatgtgtttcctcacctttgtggggcattgctggtgatatataacttccacaaagagaggtggacaataggctgagagatagagacttaggttcctcgccagctgcatctgggcctggatgggtgggccttaaccactcttttggtctgtttcttgctagtaaataggcgtcatcgttcccgtcccctgtgtgcttctgggacactgtgtgcttagctagacctatttccctactgtagtcactcctgagctgcgtggtcgtttgaaggagttaagcacccataagtgcttgtggccaacagcagtgatctagagactgactcaagttaagattatttgatgtgctctataaggcctctgaagaaagcttaggcaggtaaatattttaaattgttttcatggattttatttcatatataatatttgcatcctgtggtggaaatagaaaaacaccttagtaggtcctgtagcttactatgcattttccagtgcaggggggttctttattagcagatttacactccactgtctttttcttcaagtaatggaatttttttttgatttactgtgcactatggttggtcacaaaattatagttcctgtgaaagagctgaaaggaacatttgtgaaggacttatgctgtgcttatactgttaagttgctcagaggaaagtatgaaggcgagctctgatgcaagagcctgctggggctggagcagaaaattagtgcttcatttttaacttgaatatgccacagagcttctagaggactcgagagccaaacagtggtggattggtcttcgattttctcatagtgatcttgctttgaggaagtttttccctttcctaatactcactcacttataagatagtgaacatagggaggcaggaaattagtttctatcaggtaccttttatgtgccaggtgttttagatacattttattttttactcctccttctaagtgagatgcagaaggtaaagaacagttccaaggtcacgtgtcaaattgagacgcgtggtttcacgttggccgcaggtctggctgatgcggtcagtgttgttgccactacagcgtgttagattaatatgcgatattagttcatttctttgaaatcttcagagagaagaaagaatgttttcttaaagaaattggactagtttgattaataattttagcatcacatatcctcccactgaaacaggtgggaaaactgtgagaagttatttgctcttgaccaagaatgtatttaagacagttaatgcaaattttcttatcaatgttatacttagaaatcaaatgtgtaatggtactaagaatatggcagttgggtaacattaagttaaaaaaaaagtagtaaaaattacttttgttgacatacctaatgtggttataacaaggttcttttaagagaaacacaagattgccatactgaaatccttctaatgctgcgatttaaatccatacacaaacaaatgctgttttggaacttttcagaatgttaaaattgtcttcaatgaatgtttatgaagaaattactgaaaaagcatttcttaatagtgaagtgcctgttttttttttcagtctatcgtccaaaacactcttttctaaatgagtagcaaaggggttaaaaaatcattaatctcccaaagggtctgtgagagagttatgtggttaggtattattattgcctcatttataaaccaagatccggagtgactccttaaggtcacaaaacaagccagtattgaagccgggactggaaccgacgtctcctgcctcccagtccagggctgttaccactcccagggagttgaccaatcatcacagttattaatatcccacttgccacatgctacaagccatgaacataaatattttgttggcattttatcttcatgctccctatgtgccaggctccctttctttctatgttcacagccccttctaataactcacgttcttgtctgaccacattggcctttgcgtgaaagtcacacgtcaccccggcagggaatgttcaagcatgcggatttgcatactttcattctgatctcaaggctttttctagacttcctttttttttttttttaaatctcgtgtgtgtgtgtgtgtgtgtgtgtgtgtgtgtgtgtgtgtgacagggaggatggtaagaagtagtttaaaaatgcattgtgtgctacatcaatatccaatggctttgtacattaggaaacagtaaagctttaaatagtttgtaacatatgtccacataatttatcacagaattgtggtttatttaataagtgactcattatcactatctgatagccagaatactggataaagaataagtgtgggcagaagttattcaccatttcttatagcctcatcccagaatacagctcttctttgcaaattacagattctttgcagttttctcccacccgcccccccaacgcctctataagaatatacaaaattgtcagaaaacatgaaataatgttacgggaaaacatggccaaatttaagaaatctggcttagattgctctgaaaggttattgctaaatgaatcttcgaagaaaacgaattcctttactggaacaaaagtaatttattatgcatttcatgggtgtctgccagaagagttactagcagtatgaagatccagtggatatgaattaagtacaatctgttagttctgttcatgtttagacctacctgttaattttctctgaaattttaataatttaaaaaagcatctccatagacaggtgttggcaatgtgacaattcaccactcagctacccatcacatcaggcttttttaaaggcccagtactcagaatttgtgagactgagcacaaagacattattttattgacctcatattttaagaatgatttggacaaatacataactaggcattgattctaatgtcctgttggggtcttacgagtaaacggttccaagtcaacatctgacgatgcttaaatcatgatccgacttgatggtgtgctgcctgttttggttgttggcctggcacggtttcaccagagctgggccacatgctgcagaaccatatttttattttattaaacacaagtattttacatttaaagctctcattaaatttagttgcttgattcgtggtgaagcctgaatatggtcaaaagtttattctgggggttcacggattagcagctgggaggaaacagattccagcagccaggcgctagctccagctctgtctgtgtgagtatagcaagctgccaaggttctgtaaagcctctgttttcctccttctactaaaggggaaaagtaattcctaccatctggtccttaggagtattgtgtagagtgagtgggagatgcctggagacctctttgaagtttaagaagaatagcactacttaaatacgggtcttggaagttaatagtaatcagctttatttgcgtggcattttttttcatcccaagatattagaataagatcctcactttcttaatggggaaatttagagacgtagagttattgtgttaagaaagtaaccacattttagagatttgtatttcactgatagcaaattttttattccttctgatacttagtactttcctaatgctttttgtggtttaagtgcattgtaaatgcttcttggtatgttttctgtaattaagatggagagattaagatgctcatccatctcctgaaaagtcagttttgttataaaaattaagatcataattcaccaggttttaaatcttgcctcaggattctgtcccacttaatttgaagattagaatagtgtaattcattctgattcatttagaagataagctttttctttagggtcctcattgacttcaagttgtgggacaaaccctctcccttgcaatttatatttgtacatgagtattttggtgataatcccagagtacttataaagtttggcgcctttcttcaccacaacatgcttgctgttgagtgtgcacagatacataaagcaatttgctcttttgtccagaatagattatgtgcatagaattgctttcgtcttcttgaaaagggcagcatcccttggtgtggctataaccttgcctactcaggcctagaaggggcgagaggggtatgggttggggcagagtgggggagcagccggtgaaatttccagtaaggaatttgtttgccgaattaaatatacaaaactattctgctgaatagttaggtcatcagttgaggtgacggtgactctctctctagagaaaaggtgtccatgttcctttgttttattaagctgttaagaattcgagagtttcattgtgattggttttcacatgtcctggtggagacagaatttgtgtgtgttcatgtgtctttcatgtgtcaccttctaaactattactgtcactttgtatctggtcctctgttacctccagccaaactgaaatgatcgtagtttatatagtggaagttacgatttgcaggaaagcatttcccctttgttggaatttatacaaagtttttaattcctctttggaggaaggcagctataaagcaccacaggagtctaacctagaggttacaaaagcagagaagagctttggcagtgagggacggctggcttcccctcacacaagaaaaagccgtaagcacagtctcactcagatgtgtaggaaggacggatcagaggctgggggagccgacagtctgccttgcagtgaaggaggcatgtgatcaccatcaaagtcttctgctctgggaaggatcacacagtcgtccttcagcctgcctggggcgcagtgttttctttcctcagaccgaaactgcatgaagagagattccagcaaggaagatagagcatgccccgtacactcctctctggttttcttcctcaaaggaaatttatgcatgtaatccacaagccgaagaacccatgtttttctttggaaaaggctacgccctttcagggtttccttttctcggctgtgttgccttcccatcagaagctgtctcttgccctccccattatgggatgtgcgaaatgaaggaaaacagagacactgctgggcatttgtctccatgagttgatccaatcagaaatctttgacttttcagatatgtgtccaaaaatgagtgaaggctcctcacaggaaaaaaaaaaaaaaattctaggtgatctaaagatgaactgtggctacttctcaggctagcggatattttccatgtcccaatctgtagcagcccaagctctccctgaagtcatttactcctttaagagggagttttccagcccagctgctctgcctgtctcccacctaacccggccagctttcagtgctaagcccaggctgggtctggccctgataacacattctttcaacaggaagtgcctccattttcagttgtctgtgggagggtggagggcagataagccttgaatggaaacacagagccgatttctgctccaccctccttgcactttgatcagggagagagcagggacctccgcctggcctgtgctgcctgccgaaaggagggaggatggttgagctgtgggcattccggagctctccctcccttttgttcaggaacgtttgtttaggttggtctaggttagtgaagtgcctgcttttgcagggttgtgatgtctgcgatctgaactaaagtcctttgaagggttgaattatttgtgggaaaatatatcaaccaattgaaatttatacgtgtgtttgtatgtgtgtgtattaggtccaggatcatagtatatttttctctgatttcccccctccgcccccccctcccaacacacacacatcgtgttgattctcagtaggcatctcttgactatcatcagtgagggaaagggacttaaaagatgaacaataacaggacaaagccaggcttcttaagaagagtagctgtgccaactctgaacgccttctacttttagaatattggtttagaggccaggcacggtggctcatgcctgtaatcccagtactttgggaggtcgaggcaggcggatcacttgaggtcaggagttcgagatcagcctggccaatatggtgaaaccctaactctactaaaaatacaaaaattagccgagtgtagtggtgggcgcctgtaatcccagctactctggagactgaggcaggagactcacttgaactcgggaggcggaggttgtagtgagccgagataccaccactgcactccagcctgggcgacagagtgagagaatatcggttttgagagctgaagttacgctgatgcatggagctgacgtgttgattgttttaacttgtatagaactgtgagattcacatgtgcgtggctggccaggccctggcctgtgccaggtggcagggagatgatttcaggggcggatgggggcccttctgacccgccctcctgttagtgcctcgactctggttccctcctattttttcaagccactttctgatcccatgaaggttggcttgtccctcaagtgccttgtgtttctggtactcatgtcttctattcatccccaaagttattaggttggtgcaaaagtaattgtgggttttgtcattactttcaatgccaaaaactgcaattactttggcaacaacctaaatagatttactatgcaattcaatttaagtattcaaagaaaaatattcaaagaaaggtatagatggctaatagacttggccctctcagctagtcccctgtttctcccctcctcccaggggacctttgtaatacttacacatgtgcatggataaattgcagttatgacgtgtaattcatatcttgctgtttttcacttaacatggtattacaggattttttccattttgctccatgatcttattatttttaataattgcataatagttcattgagcggatgtgccctgcttttctaaaccgttcccatattattagacattagattgtttctatagtttctactattagaagtaaccttgcaacggttggcttcctttgcggagcctttcccttcttttgaattatttccttataatacatttccagaagtgaaattatagggcgaagtagggtctaaacttctggatggctcttgacattgcagctaactgccttctgtaaggtgggtgtaccagaatttagctccgccagccatgagtgaggggactggtgttaccatgtaagtaacatcagcctttctttgcagtatttcatgtttaaatattattatatgtacacataaaataaggctaccaagcattgggcacaaatacttgccccattttttttctgacaggctcagctattgcttttaattgcaaatgagcagatttatttctaggagtgcatcactcatggaatttgaggtctgtctgccctttgatagcaggactcttggcctgccaaatagcttaacattttgtctgaaaaaaagacaggttattttcgccaattgcttttgggattgttattcaggtgtaagaataacattcagggtgttaacgtttctttaatgtgggttgttgaaaaagagtcagtgagtcaccaggtgtggtagctcgtgcctgtgatcccagcactttgggaggctgaggcaggtggatcccttgagctcaggagtttgagaacagcctaggcaacatggtgaaaccccatctttacaaaaaatacaaaaattagctgggcatggtggcacatgcttgtggtcccagttattcgagaggctgagatgggaggatctcttcagcccaggaggtggaggttgcagtgagccaagatcacacccagtgcactccagcctggatgacagagcaagaccctgtctcaaaaataaaaaataaaataaaaaagagaaagagtcatgagacttttgaatggctacagaacactttgatttatttttgcgaagaactgtcagtgacagtttgaatagggtcattctggaggtggttctctttgagctccaactgtgttccgactgcttctgcccctgcctggtgatggggtaacttgcttgggctgaaggatagaatgaggagaataaattagatccaagcctcttaaccttaacaataataattagataacaagagtagcttatactgacataatctttactgttctcagacactgttacaagggctttacatatattagccaattctttttttttttttttttgagatggagtttcacttttgttgcccagactggagtgcaatggtgcaatctcggctcactgcaacctgcctcagccttctgagtagctgggattacaagcatgctccaccttgctcggctaatttttttgtgtcagtagagatgaggtttcaccatgttggtcaggctggtctcaaactcctgacctaaggtgatccacctgcctcggcctctctaaagtgcagggattgcaggcgtgggccaccgcgcctggcctagccaatttaattcttgcaataatcttatggcataggtgcctctttttatcccactttataggtgtggaaactgaggcacacaaagctgtatgtcaggcttctggtttacctctcccacatggtctgttcactcttttgcttcatccttctgtttttcagctggcttttcttctgaacaggccaggtgaccacctctcttcatccgccctgcctcccattttgaacatccttctctcgccaataacaatagcttccctttacggaatgtttaacatggcaaggcaccttgccttcgcttttacaaacgttagctcatttaattgtcgcaaccatccctgaggtgggaaatgtgaggacccaggcacagaggaggctcaggggggactgcactcagcaggggactgaatcaggacaggacttgagagtccaagctgcttcccctccttctcatactcctgtgtgggctgcctttggttccttgcccaggagtccttgccctctgctattccttttctgactcttggtctaccttcctgtctcagccactcatttgttgttcatgataagcagccaacagtcgactttctaatgtgtatggatcctggctccccacaaagcctgggagctcctggggcagttgactatctttcaggctcctgatctagtgtctggctgtcagttgttgctttgccaatgtttctttttttcttctctttctttctttttttttttttaatttttactttttagagacagggtcttgctctgtcccttaggctggagtgcagtgatgcaatcgtagctcactgcagccttcatcacctagactcaagcaatccttccatctcggctccccaaatagctgggactacatgcccagctaacttttgtattttttgtagagacggggtctcccaatgttgcccaggctggtctcaaattcctgggcttaagtaatcctccctcctcggcttcccaaagtgttgggattaaaggcacgagccaccgtgcccagcctgcttatgcttcttgttgctggctgtggtggtggtgacagatccctctgctgtcttggcacttccctgccatttgagatgggctatttcctgggccagttcaggaaccctctccatttcagaaaataacacttgttgcggtgaagtcagatttagtcagaggcatatgctgatgtgcctgttttcgaataagaaaatcaatgcaaagttggacgtgagatgtatcattataaggaagctcactctaatagttcctttctaaataaataattcttttgtaattgaatatcatccttttgcttatttctttgagggttaaatctggatccacactggatttgcttctggtggagtctctggaattaagggctaaagttaatcactatgtttataagtataaccaagtttatggcattcagtttgttggacaggattattttagctttttcagaattgccacaagaatccatctgaagctttagacatctcactgatttttgtgaaatttgctttttaatgcacctaaaaccctcagtttaagtctttacatttgtgttatataaacaaaagtttgggtgtggggccagtgttgttgctggattttcataaaacctcatttctgctgggaaagggaaggagtggttacctgtggaggggtcgggtttggtctgtctggttgggaggaaggaagtttgggtgcttagactcagagggcttgctcgcctgaagtcctgcctcccagcctcatgcccttatggtgagggttgagagcaaaccagatcttgttggaaaacgagtagagttggacctcattcacttgcaggccgtggaggctcggcacacttcctttctgttccgcctgtgtctggtgccagagaaatgctgttttaaggatttaatgggattatgtatgtaaaaaagaaattctgtgaaaagtacacaatgtcctacctctgtcaaataacaagtatctggtaatttatagaatggagccctgaaagcttggaaggaataagagctcctgaacttttagaaggaaaaaggtgattttaaaaagtacatgattatggcgaaatttttcaaaaagcttctcaaaagcaactttattcaaactgttgtctaaacagattttagttattttggtttgattttactaaattatatgatgtttcctatttggcctttttcatgtgaatgggaggaatgggtggaacagggcaaaggtgaacttgtgcttcaagaaatcattgtggccaggcacagtggctcacgcctgtaatcccagcactctgggaggcccaggcaagcagatcacctgaggtcaggagtttgagaccagcctggccaacatggtgaaaccccgtctctactaaaaatacaaaaattagccaggtgtggtggtgcatgcctgtaatcccagctactcgggaggctgaggcaggagaatcacttgaactcaggagatggaggttgcactgagctgagatcgtgccactgtactccagcctgggagacagtgagactctgtttcaaaaaaaaaaaaaaaaaaaaaaagaaagaaatcattgccatgatcatggcagatagaggatgttagcattttctttataacgtggtctgcttcagacatggactgttcttgtaaagaattaaggtaaatgaggtagattttaaagcctgtatatgcataggtttattttccatgaagtcaatgttcaaaaatttcactgatcagggaatgttgaactgtgcagcttttctaaaaagtctaaaaagactttgccatcactggataagccttgttagagtgtgtgtgtgtgtgtgtgtgtgtgcgcgcgcacgcatgcgtgcgctctgcattttctctttggaaatgatcaggttgtgtgtgcatcattaatgcctattcacccacacagtgaggtttgtttcacagtcagagatcttagagcttggcactttttacaaataggatttcttcagttccccttccttttgtccagctttgcatcttgccagtggctcctgccctgagttctaaagtttcgaaggcttaagtggccagggtcaggtcagtggcactgtgtgcaatgcagggaaaggcccccacttgctgggggcaggggatagtaacgccggcttcatttctcctgccctgggtctgcccaggagcagctctggccctggctgcacagacccgttcattagctcccatgtatttcactaccaggattgtaaccgcttctcaccttctcgtctctcctctgtgtccccctcttctgccaggcgggtgccccggtgatgactggtgcgggagagagcaccaatcccgagaacagcgagctcaagtattcgggtcaagatgggctctacataggcgtcagtctcgcctcgccggccgaagtcacgtcctccgtgcgaccggattcctggtgcgccctggccctggcctgagcccacgccgccaggaggcagggagggctccgccgcgggcctcactccactcgtgtctgcttttgtgcagcggtccagacagtggcgactgcgctgacagaacgtgattctcgtgcctttattttgaaagagatgtttttcccaagaggcttgctgaaagagtgagagaagatggaagggaagggccagtgcaactgggcgcttgggccactccagccagcccgcctccggggcggaccctgctccacttccagaagccaggactaggacctgggccttgcctgctatggaatattgagagagattttttaaaaaagattttgcattttgtccaaaatcatgtgcttcttctgatcaattttggttgttccagaatttcttcataccttttccacatccagatttcatgtgcgttcatggagaagatcacttgaggccatttggtacacatctctggaggctgagtcggttcatgaggtctcttatcaaaaatattactcagtttgcaagactgcattgtaactttaacatacactgtgactgacgtttctcaaagttcatattgtgtggctgatctgaagtcagtcggaatttgtaaacagggtagcaaacaagatatttttcttccatgtatacaataatttttttaaaaagtgcaatttgcgttgcagcaatcagtgttaaatcatttgcataagatttaacagcattttttataatgaatgtaaacattttaacttaatggtacttaaaataatttaaaagaaaaatgttaacttagacattcttatgcttcttttacaactacatcccattttatatttccaattgttaaagaaaaatatttcaagaacaaatcttctctcaggaaaattgcctttctctatttgttaagaatttttatacaagaacaccaatataccccctttattttactgtggaatatgtgctggaaaaattgcaacaacactttactacctaacggatagcatttgtaaatactctaggtatctgtaaacactctgatgaagtctgtatagtgtgactaacccacaggcaggttggtttacattaatttttttttttgaatgggatgtcctatggaaacctatttcaccagagttttaaaaataaaaagggtattgttttgtcttctgtacagtgagttccttcccttttcaaagctttctttttatgctgtatgtgactatagatattcatataaaacaagtgcacgtgaagtttgcaaaatgctttaaggccttcctttcaaagcatagtccttttggagccgttttgtaccttttataccttggcttatttgaagttgacacatggggttagttactactctccatgtgcattggggacagtttttataagtgggaaggactcagtattattatatttgagatgataagcattttgtttgggaacaatgcttaaaaatattccagaaagttcagattttttttctttgtgaatgaaatatattctggcccacgaacagggcgatttcctttcagttttttccttttgcaacgtgccttgaagtctcaaagctcacctgaggttgcagacgttacccccaacagaagataggtagaaatgattccagtggcctctttgtattttcttcattgttgagtagatttcaggaaatcaggaggtgtttcacaatacagaatgatggcctttaactgtg

SEQ ID NO: 27 - DNA, 32850 bp, Pan troglodytes
  variation 2214..2597: note = n is a, c, g, or t
  source 1..32850: mol_type = genomic DNA
ctccagcgcccagctgctcgctgagcgcagttccgacccacagcctggcacccttcggcgagcgctgtttgtttagggctcggtgagtccaatcaggagcccaggctgcagttttccggcagagcagtaagaggcgcctcctctctcctttttattcaccagcagcgcggcgcagaccccggactcgcgctcgcccgctggcgccctcggcctctctccgcgcctgggagcaccctccgccgcggccgttctccatgcgcagcgcccgcccgaggttcggctgcttcctcctcgcgcgatctccccgctttcctcccctccacccctactcgtcgcgggcccctggcctccggctctccggccctctccaggccgcggtcggctccgacggtgtttccctcctcccctccgggcgggctgaggcggctcccaggctcccgggacaccgcggaccaacttctagtctcttttcctctcctcgaagcgcttatctgcgcgcagccttatctccgagttatctcggcgcaaaggggcgggagccggtagttaggcaggcagagaaacttctttcttgctatctagccaggtctgtgtgtgggcattaattttagtgtggtaatctccgatgagccgaggcgatttggaagagcagcctggaggaggccagcccggctgcatttcacctccctcccccactccctccgagtctccctgtcattcttcctgctctcccatttggggtcgcctcggctctggggcggtctcacgctccccccccagcccgttgcgttccccctccttttctctgctctccgctccaccccgctacgtccgattccggaacggtccggcgtttctgctgctggagatgaccgcggggtgggccgggtggcccggccggcgtgagcgcgcacgctggtggctgcaggcgcgggccgtgtctaaggtgtgcggcgccgcggggacgccggtggggctggcgattcccgccccacaagctctccgcattgcctctgctgggaaggacccagactgctgcccccgccctggcgtcccactttccctgggccgagttgcatttctctctggggctcgcgttcgggctggtcagcgcagtccgggaagctctgggagagccaatataggagaacgcggcggtttcgttttcggggacaggttgccttccttacgcgaagggttttcccgtggggaaccctcaccccgaggcatttcgggagaggggcatccgcagagaggcgggatgcggcggtgccgacacgcacagctacttaaattcttttgtgtgtcatcagcccgggggagacactttagggcggaaggaaagcctcagccagcttctgcagatcactcttgggatctggcgcgcgcacggagaaaggatgcggccgagggagtgggcggggaggacgcggggaccggagcggtgcctttgagggagggctggtatcccagcccttccagggccctgtggcggctgcgcaggctccattcccctcccttgttgatctccacgcccggggcagaaataggatctttgagaagtctcaaatgggatctttgagaagtcagatcccatttgaactagaaaaaggagtggaggcgaggtagtgtgcagcctacgctcttggtaacccgtcgatctcctaccatacccgtctcccccaccccacctcaggagctagacgtcagcttggagcggcgccggaccgtggatggccttgactgacggcggctggtgcttgccgaagcgctttggggccgcgggtgcggacgccagcgactccagagcctttccagcgcgggagccctccacgccgccttcccccatctcttcctcgtcctcctcctgctcccagggcggagagcggggccccggcggcgccagcaactgcgggacgcctcagctcgacacggaggcggcggccggacccccggcccgctcgctgctgcttaaacaaaattaaaggtgaaccatccttatccccccttcttttgatattttgctaattttaaatattttattgttcaataataggctttggaaataattattaaaaatagaatatcaacatttatcaacttagaaacagttaacatgatttattttaaataaaatgtgtggtatttaatatgtcagagagaaagataccaaaatatcagtattatgaataatattaaaactgtagcaaaaannnnnnnnnnnnnnnnnnnnnnnnnnnnnnnnnnnnnnnnnnnnnnnnnnnnnnnnnnnnnnnnnnnnnnnnnnnnnnnnnnnnnnnnnnnnnnnnnnnnnnnnnnnnnnnnnnnnnnnnnnnnnnnnnnnnnnnnnnnnnnnnnnnnnnnnnnnnnnnnnnnnnnnnnnnnnnnnnnnnnnnnnnnnnnnnnnnnnnnnnnnnnnnnnnnnnnnnnnnnnnnnnnnnnnnnnnnnnnnnnnnnnnnnnnnnnnnnnnnnnnnnnnnnnnnnnnnnnnnnnnnnnnnnnnnnnnnnnnnnnnnnnnnnnnnnnnnnnnnnnnnnnnnnnnnnnnnnnnnnnnnnnnnnnnnnnnnnnnnnnnnnnnnnnnnnnnnnnnnnnnnncggcctccgtaccacctgcaggggtcgggcagtgggccacctttcacgcgggcggcgcgggcgcgcaccccggctggcctcatgcctcggccgacagccctccatacggcggcggaggcggcgcggctggcggcggggccgcggggcctggcggcgctggctccgccgcggcgcacgtctcggcgcgcttcccctactctcccagcccgcccatggccaacggcgccgcgcgggagccgggaggctacgcggcggcgggcagtgggggcgcaggaggcgtgagcggcggcggcagtagcctggcggccatgggcggccgcgagccccagtacagctcgctgtcggccgcgcggccgctgaacgggacgtaccaccaccaccaccaccaccaccaccatccgagcccctactcgccctacgtgggggcgccactgacgcctgcctggcccgccggacccttcgagaccccggtgctgcacagcctgcagagccgcgccggagccccgctcccggtgccccggggtcccagtgcaggtaagggtcgcgcctcaggttcggggtgcgggtccaaagcgctggggcgcacgggggacgtggagcagctgctccactcgggccctgttttcaggactttctcgtccgggtgcgcggaggtcggcctggtcccaggaaggatttgcaggcctgtggctgggtaacccagagtccggtagcgctgaggcgagttgtgccaagacttgagtctgttgtgccaagttcctttccacggatgagactaaatgcacatctgtaccttcgtgccttggggaagctcagggccttgatgagtagtgaatggcatctgctattggggaaaaacgaggctgggagggaactaacagcgcttgagccccatcgcagaccctactttgggtgagtggaagaaattccacgatgggagtaagtttgggagaatggcgggcacttgatccacccccaaacagacacacaagcacatgcaggctcacccagtttaactctccaaagggtgcgtgtttgtgttttcctagagaagggtatttagaagagcacaacagaagaacctagatgttcctagggaagctagttggcgtctcctctcccacaagggagagagggaaagaagagagggcacctggagtggtcagacttgtgacttcatggtgaaggagagctggtggataggcccttgggcttggcatcagctgggccttggtctggggctgctgctcacatggccaggctgcaactcagggatcctggagctggggcacctattctcccttcgaagtttagcccgccaatttttcagtttccaatttgactcattttttcctgtgtctgggagccattagggggtaaaccgtgaaaacgctattgtcaaaaatacctggaaatacctcgttttgaaaagtgttttgtttactccagcacaggagtgtgggagccctgttaggctgtttttctcagatgcaacattctgcgtccttggtgattacaactggcttatcttaccttatatttcacctgtttgataatctttctaaggaaacaacatctttttttattgttgtttgtttgaggggaggtgtgggggaggccccttgagtcacagaggtggcagagtggaggaaggcacattactccaaacagtcctaccccggtgtcttgtgtatcccaggtctgtgcttctcgtgggagcctcgacgctacctttaggacagcaagtcagtcctaggggccaggattccttaggataaaatgggacattcccaaccttgtccgcaaaagacacgctggaaatgcaagtggtctgaaagagaggcaaccaatttgaacagctctctgatagcctgagttctttctgtcttcttccaagcgctgcaagacttggtctcaaaattccctctttttagttttgctctgtcgcccagtctggagtgcagtggctcactgtaatttctgtctcccgggttcaagcgattctcctgcctcagcctcccgtgtagctgggattacaggcgcgcgccgccacacctagctaatttttgtatttttagtagtttttgccacgttggtcaggctgtttttgaactcttgacttgaggcgatccattcggctcagcctcccaaagtactgggattataggcgtgagccaccgcgcccagcgaaattccctctttttgcttctgctgcaaagctggtcctggagaccatttttcccgtgtgtgtggaatgggatgggggaccctgttgagatttgcactgttggcttgggacttgagagtcagggctctcatccttacctctgcatagggacccatgtttggctcccaggagcagagagatggagaggctgggaatctctaaggaggtaatggttgggtgtgaagcttcttttgtcagtcggggagttctgtagggaatgtgcaagggtgttgtgagttgggtgaggggtagtatctgcagattgagccagcgcctgcagctctgcctatttcttgacacaccttagcctgatctccaggttcctttcctccaatcttccagcatttcatatggctgagagagtcttttgatgtttacagtaactggtcctgtatgagaaatccttttagaggcagtatggggcagttgtgggcaagttaatatgtttctttttgttttaaatttagcctacacttttcctaattttttcatcttctgggcacaccacagttacaggaattttctgtagacccagaagatttgttattttttaaagtattttttaaagtatgttttaaaaaatgggaagggatttgggaacacccagcttttgcatagagtctgttaggaaatcaggaagtgactgggaccaagccagtattggggtgaagggtggggagtgagtgaccctaactttgcttgtcctcacaggtattctgaggccagcttcctagctagatttcctgtttcttagatttttttttttttttaaacaaaccgtttttggagacagacactttaaacaccagagctaaaacctgagtgctgaacttgatcaacccgcacaatttggaggcttctggaaacccacactatgcacctctcgctgactgggtagatagggtgagcttactctggggtgagctcagagtcctcacactcctttatttcctgggtcctacaccctcctaagcgcctgcagaactgtgagtccctgtgtcttggtaccacacacagaaagacaggtggtggtgcccttctcccctgaatctatcactccccaagggcaccgcaaacagccatgttaggagagaaatggtgagttgaaaaggggaaacttggtgagcaagcccccagcttttatatcttatagcttttataaagacagcattttttttttcctttttagtcacttacaggattatagctgcctggtgggtttgggaaagaggtagggagggaatgagagagattttattcaactaaaaataagcaagcttcctaggttgtatttatccaaagtggacttttaattaaattttgtctttgggttttcagatgactaaatagttctacctggggagttcacactgtcttctaataggattcttattgttcccagtcataggactgggttttccagggaatgccccactcctctatccagaggggctctgataggtaacattttaaagtcaacaacaaagacaaataccttgtttaacttcagtgtccttgaagtcctgagcattttactgattaccgtagtcaatagtggcttttagggcggagaagaataaatctttgtgatgtgttataagttgcagtatccccatgacaactttgaactcgggttgtgtaggatgccagtttctttaaaacttaataagaaatgagaaaagagacttgttttgtaaatagtattaatggaattaaagtttttatgctaaagtcatatttaaatatcgttaccacacagttgatagtagacacaagcaataaactgcaaggggatgagaaagaaccaaaaggttcactagcacataatcttaagcgaaaactctgaagtgtaatgtttatttactttaaaaagtgattcaggaatgcttcttcaataatgcaaaactaggacatttaaaccttctataatctaaagaaccttaaatggtggtctatacttttttttggtctatacttacaataagtacctttctcatttttagagacatttattcttccatatttaaccttcttgagaagtaataaatgttacatttactcttaattaggatttgtttttattagcaggtttaggttattgtgaattctgaaaactaaccaaagaataataataataaaattatgtaaaataaacacattttaaatagattgcataactcaaaatgatcactgggaaggtcttggtaattttctcaatcagtaaggtatcaaccttatataaaaattttgcagatagaagcagttggacccacttctaaatcgggattttagcatttgatctttgtggcatgaaaataaaactctgtgcttaatgttagtgcatttttcccctgaaaagatgagagtaatctcatttctagtttctaactaacgtaggtgcctaagaatagtacttttaatttcacttgtgtatctttaattggagaagaggcacatatggacgggtggcagatgtagaaaatacttttttaaattacttgagataaaagtgaatgaggcagcctcgctgtgtccccggatatttgtgggttgcagcggggctcagtggtcagtatttctgtgtggcttgctcgggtttggcaacgacgtactgtaatgatgatggatttcagtctttaaaagctccgggacagcctgagagtaggggtcaggggactcaagccgacctccccaccgctcatctcggactctgacgtcctctgcttccagcactgtctctttcccggggtctctactggggcgctccgggtgtgcagaagtattggacaaatggtcagtggagcaatagtgacgaaataaccctgctcctggctttgcggccaaggagaaaagcgcagccgggaagggcacgggcagggaagccgggcaccggggctgggggccggggtccccggggtgacgcggggagggacgggtccggcgcgcctctcccgccctcacgcaccgctgtcgccgcagacctgctggaggacctgtccgagagccgcgagtgcgtgaactgcggctccatccagacgccgctgtggcggcgggacggcaccggccactacctgtgcaacgcctgcgggctctacagcaagatgaacggcctcagccgacccctcatcaagccgcagaagcgcgtggtgagtgtgacccgccctgcccctggctcgcggccggccccgggctctcctggcccggccggccccgccctggctcggcctgccttgggcgtccccctcccaggggacaggtgcggccgctgcggtcccaccctagcggggacccagcggtaccatcctgtcccagctgttccaacgcccacccgctggcgcccaagtagaggttaccccgaaactggcgtctgggaagccaagatagcctttccccatgtttacgcgcaggggatgacgttcgtaaatgacaaaaacaaaaacaaacaaaaaaggaaggtgcaaaatgttaccatgttttaagcaaaaaaagaaaaaataatctatatatctctaggtgtacttgccaaagcaccgtaataattctggtaagataggcaagaaattggtgatggtaacccgaggagaaaaacagtagacctaccgaggccgggcgaaggaagacttttttcactgtgtatggtttagattttatgcttgaaaaaccacgctcacttataccattcgtcccccaaatagaatatgccagaaatccacccactcacgcctcctcacagccacattcttttgggtgccgtttactttgtcctttccaccttcttggtcacttctacctcctatcctcaggtgtatccccaaataccatatcttggattgcccttgagcctggtgaaaatttatttgctctaacttttgttatttcaaaatcagagaactttgtagaacttgagtaaaagtgtggtttgtatgttcttaagttgagcattttccccaattcgcacacgttttactgttttttttttttttttgagacggagtttcactcttgttgcccaggctggagtgcaatggcgcgatctcggctcaccgcagcctccgcctccagggttcaagcgattctcctgcctcagcctcccgagtagctgggattacaggcatgcgccaccacgcccggctcatttttttgtatttttagtagagacagggtttctccatgtaggtcaggctggtctcgaactcccgatctcatgtgatcccgcccgcctcggcctcccgaagtgctaggattacaggcgtgagccaccgcgcccggccaccatgttttaaagtaagggaatcctgatttcagggattaatctcgtattgtcattgttatgtgtgcttcctagccagagagagtatttaccgctgtaatggttagagaaaataaaggaaagctttcaccagtcccactctaaggttaacatttgtttagcgaagtactcataatctaataaccctttaaagctaaatatgttacagttagatgccagacgtcttaagtatcccagtaatttatttgttatactctaattagcaggaacaaatgctacacatgttgtttgtgttaaatagattagagtgaaattgcatcacaatgtaagtctgacaccttaaagagaagcaattagttttatggttggttttgttttaatgcatgtaaaataaagtggccgaggttaatttaatgagtgtatgtgccttaaactcgttacaacctcccacagcttaaaattttctttaaagggtacccttaactgcagtgtgtgactgtgagtttcattttttcttaaatgcatcatattaaagaagaaaaagtagtaactggaaaatatcccacagaagttccttgttttcatataatagacaacacatgaacaatgaaaccgatttatttttctggaaaggcacattgagctgagtactaaccgaactttcaaaggtaacattttctagagattgagcaaaaatttggtggaatagtagtcatttaggttccagttgcattataaatttgatctagtaacatttagatagtgccatttgttttgtgcatgtaccagtaaaaataacttagaagaaaaaaaagaacagtttttagcatttctgaatcgttagctttctttgtgcttagcaggtgtcttggccataaccaaggtcagcaaatatgctttgtaaatgggttataaatgataccaattgaagggtgtgtcactatcaattaggtctccttgtgggcttcttatttatggttttgatggatctggcttagttctcagaagcagaatgttgaactcaagtttgtttagccagcactatagaaccaatcactgtgaatttgaacttgcaatacattgcaaaataagagatttatggtgtaacttgaattccttgtcagtgaggaatatgactgagatcacttgttacaaggaacttttataacccattcacctgcatttcacatgtttatgaggactggcttcacttatgatctgcagttgacagtcataaagtcctttgttataatggcaaattctgataaaaagtttgcttcacattggctccaaattccactggaaactgtcataaatggctggtttataaactgaaccttcctgtcccttgtttactgatttcacatttatgaagagaaaggaatcctttcctaaaaaattattttcttttaaccacaaagaaagaaaaaagaaaagcctggatgtgtaaagttttgttaatatgttgtcatcattttagcaaagcagtttcccaggtagctctcctgtgagccaagcatactcatttcaactaaaggcaaattgattcttagcactgacttcctagaaatgttgtagtgctaaaaggtttgccagtgtctctgtttataacttctctgtagagtgatgctaagtaatgcaaccggatgtaaaccataaatgcagattttaatttcatcttttaaatttcccagcaaaggttttggaagtctctgtcctgtaatctgtgaatattcgatacatactcaatttacatttctcttcttcattctttacaattgatcttaacttcccaaattttgtaattttcaacttgatttggtcctgaatctttctctgattttttttttttaactatggaaagcttcacgaatttgggtgtcattcttgcgctggggccatgctaatcttctctgtatccttccaattttagtatatgtgttgctgaagcaagcatccattttttttttaactgaagctatgtcacaatttttaaagtaatttacaacatttgaaaggaaatctaagcttggcaacttaaaaacaagttttatattttgccattctgggtaagaagttatattagcttattataattaacatgtagtaatctagaggtaataaattccctttaaggctgttatgggcataaagaaaacatggaaatgggagtgacagtggcagacaggtggccttttacctttcctggtaataccaattaaccctttgcatgaacgaaattgagaataatactgatagggcaaatatattagtatcactgcatctaagacagtggcagcattaagagtatgccataaaatttgctcgtatcctttgtaaaatagataaaacaaaaatgcaggcagcaggcaatcatgatggtaattatggaatgtattcaaatatatttcttttaaaaaaaaaaaaacttttacccctcttctgaaatccatttctaataatgtactttcaaagtttccattaacgtactttcaaagtttctggtttactcctttacatatatctgagaaatagacctggtgatctccggttttcaggggaagtggagactgcccagagccatttagcacattagcaagtggcttgtgattgcatttcacgacctaaatcttagacctgtgactatagtgcatggccaattgctgtccacggtggggggcgggcggcggggaggtggggcactttcatgttaatgtctacttgtgttgttacttctggtgtgttttgagtataactctatttggcgggcagcggggaggtggggcactttcatgttaatgtctacttgtgttgttacttctggtgtgttttgagtataactctatttggccaacttttagaaaatcttttaattcccctaaaaaagataccagtagtatctgggaaactctaaattggagaagaaaccatgggtgaaactctccttgatatgatgctggtaaaagctttgcatgaagttattggccaactatatgactgctcccgggtattcttgaattcacggagacaggctagctggagaagtaaatcaaatctatagggtccagcacactatgcaaacctcaaatttcttggcccagaaaagtcagtctaagtacactgcaattttttttctcaaggaccatttcatttataataaaacagatacatacttgttgatgacagggacaaaataccttaatgtatgtatgtaatatatatatatgtcacttatatttttccacttatgttcttgtactgtttctagccttcatcacggcggcttggattgtcctgtgccaactgtcacaccacaactaccaccttatggcgcagaaacgccgagggtgaacccgtgtgcaatgcttgtggactctacatgaaactccatggggtatgccatgtattctgctcacttgtatatacatttagtatctggtttgtatgtgatatcagttacaaagaatcagcaaatgaaagatactcaagtgaaaattttgaatgcatataatttattactgaatatgtttaatatattcagtgtacatactgaatatatttattgaattgaaggtgcttttaattataatatgaaatattaccttatgcaccagtaggaaacaaaaaatgccaccagttgaactattgcaaacgttcacttaagacacattccacttttagaaatgtgaaaatgtgaaaagtgtgtattttagaattggtaatatggtagtaaccgtttttaaaaatgcacaattaaggaaatcaatcaaaaatgcacaatcactagtctatatctcttaaaaattttgaatgtaatcagacatttgtgcaaaagagtaatgcatttaatagttatagtttgaaatatttcatagttcattttaaaggattgcacaaaatataataaacaactcaatcttaaaaagaaaaataaccttgcatctgtaggaggaaggaaatacatgatctctttgaaataatacttcttcaatgaatagctactcatttcaaacaataaacgttaagttgaaggaattaaattctccttggcaaatcatctcattctttctgaaggaatctctgcatttgatgaggaaagtgtagtctttgtgcacttgggatcttttgagtgtgtataaaaattgggttgaaatttatgccaagttcttttttttttttttttttctttttcttgttttgagatggagtctaactcttgttgcccaggctggagtgcagtggtgctatctcggctcactgcaacctccacctcctgggttcaagcgattctcctgcctcagcctcccaagtagctgggattacaggcatgcgccaacaagtctggctaatttttgtatatttagtagagacggggtttcgtcatgttggccaggctggtttcgaactcctgacctcaggtgatctgcctgcctcggcctctgaaagtgctgggattagaggcgtgagccactgcacccggccgccaaattcttttaaatgagagcttttagtgccaatgttgggtctttggtttttcttcaatataatattaaatttatggcctatgtgaaaattttttaggtgcccagaccacttgctatgaaaaaagagggaattcaaaccaggaaacgaaaacctaagaacataaataaatcaaagacttgctctggtaaatatactaaaatgacgtttgactgtaaagtatttgccaaccttaacagtagagcatatgtatatttataaggtttattttgattgttgcaggtaatagcaataattccattcccatgactccaacttccacctcttctaactcagatgattgcagcaaaaatacttcccccacaacacaacctacagcctcaggggtaagtgttaaaacagcatagactcctaaattactgggctgctctctagtaaattatctcaaattttatcttatctggtagtacaataatctaaaccaacagttcagtttagttagttgatacctaagaatagtttttagaggaaattacatttaaatgtcaacaaaatgacaaacttaagtactttacaaacctcttaattaagatcggtatcatttttttatggttaaattaacccaagtaaaagcaagaagttttggtttaaagtgttttaaattgttttatttccaggtttttatcagagttgctatatatattatatgtgtatatttatgtatttccgatgtagatcataagaactatgaggccagtggtttcatagattacagtgcccgtaacagttaagtagcttttgtttatcctatcatttccagcctttttttctttttttatcatccacccaaagcaaagctcatcataaagtgttatgtgctgctgtattcactatttcctttgcccaattgtgttcttgctgggagagcttgccttcttctaatgtaccttaattgtactggcgtttatttcagctacgacaaaacctaggagtgatttgtgccactgtggacaggagatgcctgggtcttcgtgaggattacagacttagtttcttgtaaagctgtgaccaaaactcagtttgcctctagtaaagagcattttcccaccctaatgtttcccaaatttatctggaatgcccttctaaaaaatactgggccttccctcagacctcagtgagctccaaggcagggcctgcggcaagcaggactttaaaatgtgtccttgtgacccttgggactacactgagacaagattaggactaaacaccagcatttaaatgcctatttacttagtaattgttttctacatttagttttctcctgaaattatttggggtactttaaaatactacagattcctgggccccaccctggattttccaagtcagagtctctgggtgtgggacttggatatctgtttttgaacaagtgccccaggtgaaattggaactactgccccggaggtgtttgggaaccacagacctggtttctttccactgtatttttactggctttaacaaacaaaaattaaatatttaaaacaaaatgtttaaactgtgcttaaaattatatttgatatttttctttgtcctcctacccaaattcttttgagccttttctgtaatgaaacaaaacgtcttttcagagtttcacaagggaagaagccttttagttgttttttttttgcagactcatggtaaagaatgtttctaggctttataaaggtggactccatgctatggtgttgtgttttacaggcaggttagatgtaactgaggattgaaagtggtaaatagaacatgtttcttgggaaatgaaaagattatttaaaaataatttttttttttgaggctgagtcttgctgtcaccgaggctggagtgtgcagtggcgcaatctcggctcactgcaacctccacttcccggattcaagcaatcctcccacttcagcctcccgagaagctagaattacaggcatacaccaactcacctggctaatttttttttgtattgttagtagagacggggtttcaccatgttggccagggtggtctcgaactcctgtccgcaagtgatccacctacctcagcctcccaaagtgctaggattacaggcatgagtcaccgcgcctggcctaaaaatatcctttattatgcagtagtcctcaggagcaattatgtagctagaggcaaaacaatttggttttctaaagcagggagggagccgcctctctcctagctgaaatgaggactgctgccagctccaagacacttttgttggtggtacagtccagcttaaatgtggcaaaaagactaatttgaatgataaattgcactgaagtcgatatatacccaacaatgggcttcggggacttggaaccattgtgggtggagtcttgtgattttgtgacgtaaaatttcaaaatttgctattagcaagtcctatcagttgccgtccagggaaaggagtgaaaagccagtgaaaagggccatggtctggctagaagaagggccttgggagttccatctctggtcctaggcttattgtcccaggaactctcaccagggacagagcagatggaggtggcttgctggtcaatgcccttcagaggaaagattagttccccaccagaggccaggaggcaaagcaacaaggatgttaaggatggggttggagagtactagtttcacaccaggtcttcagctgcaagcttccatccctgtggtagtctaggcagcctccacggggactgagaagctgggagtggctggtgtgagctgcagccagggggcatctctccagcctctgggctgcgctgcagaaacgctgactgccattaccagggcagggggtagggttgctgacctgcctaccaacctccccagttccccagggactgactcttggccttgttccgagggcacacggctggtgcctgggcttgcagggttttatttcatggatgtctccaaaagcctctacctgctgtggccattgtggggaaacagctactcgtctgctggctgcctttggaagctgtcctcctgtaagaatacctgtagtaggcttgagtggtgtccccaggttgttttcatggcgtgcccgcgtataactgtggatcccttcgcactttttgatgtcctctctgggtgggctgagccttcatgtgtatggcatggcccatgtggcagccgagtagctgtgaagagtctgctggaggagccatctgtgagcagctggtagaagcatttttaaaaggtggctgtgttgacaaaggtgtgtcattttcccattttggtcacagtgcataatgttagagggcagctggctttgtgactgattgcctgtaggattttgtgaaatgctgtgggtgaagaaaatatcagatccatatagcaaggttgtatctggtgtttacaaagtatatgtattacatacacagcaccgaggttggcttggagtttaagtctcctaaggtaatgcgtccaccccacggatctccagtgctccctgtgactgactggtagaaattagtagtgcagggtgaccctcgtttgatggggccacggaactacaaagcaaagggctatcttaggcaccctcccagcagaaggtggaactgggggccacatatccctccatttagagatgtaagtagcagtatcactgcctttctttaatgactgtgagttatagcaaggaagtaaaaaactgttccagaggcccacatgaaacatgctgtttactttaattccccactgaaaaatcagttgtaggagatcaccggtaggcattcccagcaggcttattttaagtcctgggacatgacaggaacagggttctgacctgcctttcacgtggccatttaagtgatggcaccaggaccttagcatgacacagagtcctgagctctcttggccaggacgaaaggagccacaggagctgagtattgtggaaggggtctatcgtggttgtctgcttctgggagagggggctccagggctcccctcccctagcaggaatgaaggtgtgggcataattcctagtgcacggcattcttccaggataagttgtcctaatgccacgaaaatttttgtgctgctctgaagcctcatgtcttagctttatatacttgttaatctgtgctttcatgagacctgtgtctgggcaaaaaggagacattccttcagataagagtcagcaagttgatgactttgccaccttatgactcagtttctcttggttataggctgtgcgtgtgctggaggcacagggagggcagtgtgtttctgtctgagatcaggagtactcacggtcatacagccctgcttaaaatattgcctatttttttcttttgaaattatttttgtttattaaaaatgtatgttaaacttaaatttttgatagatggttactttctgtggcaaaaataatctttctttctggctaagaattttcttatccatgcagatttactaaaaaatgtatatttagttgatctaaatagatatcagattttctttgggctgggtgcggtggctcacccctttaatcccagcactttgggaggctgaggcgggttgatcacctgaggtcaggagtttgagaccagcctgaccaacatggagaaaccccgtctctactaaaagtacaaacttagccaggcacggtggcgcatgcctgtaatcccagctactctggaggctgaggcaagagaatctcttgaacccaggagttgcaggtcgcagtgagctgagattgcaccattgcaccccagcctgggcaacaagagcaaaactctgtctcaggaaaaaaaaaaaaaaaattttttttttctttggcttttattctctatggattttaagaatactaaaatcttttttttcttgaattctgtttattgactgaattgtattttacagtttttttttggttgttatttaggagagaaacatggtaatgttctgtttctgcaataagatttaataagtagtccacaaatggtcctactcctcctatttctcctcctataactcaaaatttgtaaaactggaggatactttatagctcaatccccaaattttatagataaaaagtttttttcttaatttcttttgtaataggagggattaacttggagatgaaattagcaataatatctgaaaatggcagctacagaaaaaaagaaattagcaataagacaatgtctgagaacaaggagtcactgaacatattttgccgcctaaaaatagtttctataaataattactttaaaaattaggccaggtgcagtggctcacgcctgtaatcccagttctttgggagactgaggctggaggatcacttgagaccaggagtttgagatcagcctgggcaacatagcaagattcccatctctatttctatttttttaaaaaaatgaaaaaaaatgtaaaccctatttaagttaatattaaaactaccaatataatattgaaatcatcattaaacataaagtgttgaagttaaatggagagagaaatatatatgaccagcccttgctttactggtctttgttccatttgagtaaaacaaagtgccacatctggaattgtttaaaacatggaggtggtaggggtgggtggagagagacaggtatagatgtagatcttactactggtcagatttggacgtgctttaaaggagtgataactagagttggagatggctccgcagagtagaggaaattacaattagttaggatttttgcaggtgaaaaattggatagaggtatccaggaaagaagaaggcataggaatctttggagctgaagggaaatagttagttcattgtgactggagtgtagggggtaagaagccaaaggcaggaagtgaggctggtagaaccggtggaaagtagatacttgaaaatatttcaaatcaacgatggactttatttaaatcctgcttcggtgacaaatgtgttttctgtctgtacactggagtccaacaattaggaccttcttactggagcattctgtattttggtaattgatgtaaacaaatgtagcatgctcctgcttgtcaagtttacaagcagagtttcctcctcacaattagggaggaaaaacatctgccagctgattctatgcgctgaccttctttaggcctgcgctgtaatttctctgcctccagggattctgggggcaggatggttggagtggctgcctggctacctcttctaatggaaacatattagacatggtgtattagggataggaaatgtgtttcctcacctttgtggggcattgctggcgatatataacttccacaaagagaggtggacaatagactgagagatagagacttaggttcctcgccggctgcatctgggcctggatgggtgggccttaatcactcttttggtctgtttcttgctagtaaataggcgtcatcgttcccgtcccctgtgtgcttctgggacactgtgtgcttagctagacctatttccctactgtagtcactcctgagctgcgtggtcgtttgaaggagttaagcacccataagtgcttgtggccaacagcagtgatctagagactgactcaagttaagattatttgatgtgctctataaggcctctgaagaaagcttaggcaggtaaatattttaaattgttttcatagattttatttcatatataatatttgcatcctgtggtggaaatagaaaaacaccttagtaggtcctgtagcttactatgcattttccagtgcaggggggttctttattagcagatttacactccactgtctttttcttcaagtaatggaatttttttttgatttactgtgcactatggttggtcacaaaattatagttcctgtgaaagagctgaaaggaacatttgtgaaggacttatgctgtgcttatactgttaagttgctcagaggaacgtatgaaggcaagctctgatgcaagagcctgctggggctggagcagaaaattactgcttcatttttaacttgaatatgccacagagcttctagaggactcgagagccaaacagtggtggattggtcttcgattttctcatagtgatcttgctttgaggaagtttttccctttcctaatactcgctcacttataagatagtgaacatagggaggcaggaaattagtttctatcaggtaccttttatgtgccaggtgctttagatacattttattttttactcctccttctaagtgagacgcagaaggtaaagaacagttccaaggtcacgtgtcaaattgagacgcgtggtttcacgttggccgcaggtctggctgacgcggtcagtgttgttgccactacagcgtgttagattaatatgcgatattagttcatttctttgaaatcttcagagagaagaaagaatgttttcttaaagaaatttgactaatttgattaataattttagcatcatatatcctcccactgaaacaggtgggaaaacagtgtgagaagttatttgctcttgaccaagaatgtatttaagacagttaatgcagattttcttatcaatgttatacttagaaattaaatgtgtaatggtactaagaatatggcagttgggtaacattaagttaaaaaaaaagtagtaaaaattacttttgttgacatacctaatgtggttataacaaggttcttttaagagaaacacaagattgccatactgaaatccttctaatgctgcgatttaaatccatacacaaacaaatgctgttttggaatttttcggaatgttaaaattgtcttcaatgaatgtttatgaagaaattactgaaaaagcatttcttaatagtgaagtgcctgttttttttttttcagagtctatcgtccaaaacactcttttctaaatgagtagcaaaggggttaaaaaatcattaatctcccaaagggtctgtgagagagttatgtggttaggtattattattgcctcatttataaaccaagatccggagtgactccttaaggtcacaaaacaagccagtgttgaagccgggactggaaccgacgtctcctgcctcccagtccagggctgttaccactcccagggagttgaccaatcatcacagttattaatatcccacttgccacatgctacaagccatgaacataaatattttgttggcattttatcttcatgctccctatgtgccaggctccctttctttctacgttcacagccccttctaataactcacgttcttgtctgaccacattggccttcgtgtgaaagtcacacgtcaccccggcagggaatgttcaagcatgcggatttgcatactttcattctgatctcaaggctttttctagacttccttttttttttttttttttaaatctctgtgtgtgtgtgtgtgtgtgtatgacagggaggatggtaagaagtagtttaaaaatgcattgtgtgctacatcaatatccaatggctttgtacattaggaaacagtaaagctttaaatagtttgtaacatatgtccacataatttatcacagaattgtggtttatttaataagtgactcattatcactatctgatagccagaatactggataaagaataagtgtgggcagaagttattcaccatttcttatagcctcatcccagaacacagctcttctttgcaaattacagattctttgcagttttctcccacccgccccccaacgcctctataagaatatacaaaattgtcagaaaacatgaaataatgttacgggaaaacatggccaaatttaagaaatctggcttagattgctctgaaaggttattgctaaatgaatcttcgaagaaaacgaattcctttactggaacaaaagtaatttattatgcatttcatgggtgtctgccagaagagttactagcagtatgaagatccagtggatatgaattaagtacaatctgttagttctgttcatgtttagacctacctgttaattttctctgaaattttaataatttaaaaaagcatctccatagataggtgttggcaatgtgacaattcaccactcagctacccatcacatcaggcttttttaaaggcccagtactcagaatttgtgagactgagcacaaagacattattttattgacctcatattttaagaatgatttgaacaaatacataactaggcattgattctaatgtcctgttggggtcttacgagtaaacggttccaagtcaacatctgacgatgcttaaatcatgatccgacttgatggtgtgctgcctgttttggttgttggcctggcacggtttcaccagagctgggccacatgctgcagaaccatatttttattttattaaacacaagtattttacatttaaagctctcattaaatttagttgcttgattcgtggtgaagcctgaatatggtcaaaagtttattctgggggttcacggattagcagctgggaggaaacagattccagcagctaggcgctagctccagctctgtctgtgtgagtatagcaagctgccaaggttctgtaaagcctctgttttcctccttctactaaaggggaaaagtaattcctaccatctggtccttaggagtattgtgtagagtgagtgggagatgcctggagacctctttgaagtttaagaagaatagcactacttaaatacgggtcttggaagttaatagtaatcagctttatttgcgtggcattttttttcatcccaagatattagaataagatcctcactttcttagtggggaaattcagagatgtagagttattgtgttaagaaagtaaccacattttagagatttgtatttcactgatagcaaattttttattccttctgatacttagtactttcctaatgctttttgtggtttaagtgcattgtaaatgcttcttggtatgttttctgtaattaagatggagagattaagatgctcatccatctcctgaaaagtcagttttgttataaaaattaagatcattcaccaggttttaaatcttgcctcaggattctgtcccacttaatttgaagattagaatagtgtaattcattctgattcatttagaagataagctttttctttagggtcctcattgacttcaagttgtgggacaaaccctctcccttgcaatttatatttgtacatcagtattttggtgataatcccagagtacttataaagtttggcacctttcttcaccacaacatgcttgctgttgagtgtgcacagatacataaagcaatttgctcttttgtccagaatagattatgtgcatagaattgcttttgtcttcttgaaaagggcagcatcccttggtgtggctataaccttgcctactcaggcctagaaggggcgagaggggtatgggttggggcagagtaggggagcagccggtgaaatttccagtaaggaatttgtttgccgaattaaatatacaaaactattctgctgaatagttaggtcatcagttgaggtgacggtgactctctctctagagaaaaggtgtccatgttcttttgttttattaagctgttaagaattcgagagtttcattgtgattggttttcacgtgtcctggtggagacagaatttgtgtgtgttcatgtgtctttcatgtgtcaccttctaaactattactgtcactttgtgtctggtcctctgttacctccagccaaactgaaatgatcgtagtttatatagtggaagttacgatttgcaggaaagcatttcccctttgttggaatttatacaaagtttttaattcctctttggaggaaggcagctataaagcaccacaggagtctaacctagaggttacaaaagcagagaagagctttggcagtgagggacggctggcttcccctcacacaagaaaaagccgtaagcacagtctcactcagatgtgtaggaaggacggatcagaggctgggggagccgacagtctgccttgcagtgaaggaggcatgtgatcaccatcaaagtcttctgctctgggaaggatcacacagtcgtccttcagcctgcctggggcgcagtgttttctttcttcagaccgaaactgcatgaagagagattccagcaaggaagatagagcatgccctgtacactcctctctggttttcttcctcaaaggaaatttatgcatgtaatccacaagccgaagaacccatgtttttctttggaaaaggctacgccctttcagggtttccttttctcggctgtgttgccttcccatcagaagctgtctcttgccctccccattatgggatgtgcgaaatgaaggaaaacagagacactgctgggcatttgtctccatgagttgatccaatcagaaatctttgacttttcagatatgtgtccaaaaatgagtgaaggctcctcacaggaaaaaaaaaaaaaaattccaggtgatctaaagatgaactgtggctacttctcaggctagcggatattttccatgtcccaatctgtagcagcccaagctctccctgaagtcatttactcctttaagagggagttttccagcccagctgctctgcctgtctcccacctaacccggccagctttcagtgctaagcccaggctgggtctggccctgataacacattctttcaacaggaagtgcctccattttcagttgtctgtgggagggtggagggcagataagccttgaatggaaacacagagccgatttctgctccaccctccttgcactttgatcagggaggcagcagggacctccgcctggcctgtgctgcctgcccgaaaggagggaggatggttgagctgtgggcattccggcgctctccctcccttttgttcaggaacgtttgtttaggttggtctaggttagtgaagtgcctgcttttgcagggttgtgatgtctgcgatctgaactaaagtcctttgaagggttgaattatttgtgggaaaatatattaaccaattgaaatttatacgtgtgtttgtatgtgtgtgtattaggtccaggatcatagtatatttttctctgatttcccccctccgccccccccctcccaacacacacacatcgtattgattctcagtaggcatctcttgactatcatcagtgagggaaagggacttaaaagatgaacaataacaggacaaagccaggcttcttaagaagagtagctgtgccaactctgaacgccttctacttttagaatattggtttagaggccaggcacggtggctcatgcctgtaatcccagtactttgggaggtcgaggcaggcggatcacttgaggtcaggagttcgagatcagcctggccaatatggtgaaaccctaactctactaaaaatacaaaaattagccgagtgtagtggtgggcgcctgtaatcccagctactctggagactgaggcaggagactcacttgaactcgggaggcggaggttgtagtgagccgagataccaccactgcactccagcctgggcgacagagtgagagaatattggttttgagagctgaagttacgctgatgcatggagctgacgtgttgattgttttaacttgtatagaactgtgagattcacatgtgcgtggctggccaggccctggcctgtgccaggtggcagggagatgatttcaggggcggatgggggcccttctgacccgccctcctgttagtgccccgactctggttccctcctattttttcaagccactttctgattccatgaaggttggcttgtccctcaagtgccttgtgtttctggtactcatgtctcctattcatccccaaagttattaggttggtgcaaaagtaattgtgggttttgtcattactttcaatgccaaaaactgcaattactttggcaacaacctaaatagatttactatgcaattcaatttaagtattcaaagaaaaatattcaaagaaaggtatagatggctaatagacttggccctctcagctagtcccctgtttctcccctcctcccaggggacctttgtaatacttacacatgtgcatggataaattgcagttatgacgtgtaattcatatcttgctgtttttcacttaacatggtattacaggattttttccattttgctccatgatcttattatttttaataattgcataatagttcattgagcggatgtgccctgcttttctaaaccgttcccatattattagacattagattgtttccatagtttctactattagaagtaaccttgcaacggttggcttcctttgcggagcctttcccttcttttgaattatttccttataatacatttccagaagtgaaattacagggcgaagtagggtctaaacttctggatggctcttgacattgcagctaactgccttctgtaaggtgggtgtaccagaatttagctccgccagccttgagtgaggggactggtgttaccatgtaagtaacatcagcctttctttgcagtatttcatgtttaaatattattatatctacacataaaataaggctaccaagcattgggcacaaatacttgccccattttttttctgacaggctcagctattgcttttaattgcaaacgagcagatttatttttaggagtgcatcactcgtggaatttgagatctgtctgccctttgatagcaggactcttggcctgccaaatagcttaacattttgtctgaaaaaaagacaggttattttcgccaattgcttttgggattgttattcaggtgtaagaataacattcagggtgttaacgtttctttaatgtgggttgttgaaaaagagtcaatgagtcaccaggtgtggtagctcatgcctgtgatcccagcactttgagaggctgaggcaggtggatcccttgagctcaggagtttgagaacagcctaggcaacatggtgaaaccccatctttacaaaaaatacaaaaattagctgggcatggtggcacatgcttgtggtcccagttattcgagaggctgagatgggaggatctcttctgcccaggaggtggaggttgcagtgagccgagatcacacccagtgcactccagcctggatgacagagcaagaccctatctcaaaaaaaaaaaaaaaaaaaagtgaaaaagagaaagagtcatgagacttttgaatggctacagaacactttgatttatttttgtgaagaactgtcagtgacagtttgaatagggtcattctggaggtggttctctttgagctccaactgtgttcccactgcttctgcccctgcctggtgatggggtaacttgcttgggctgaaggatagaatgaggagaataaattagatccaagcctcttaaccttaacaataataattagataacaagagtagcttatactgacgtaatctttactgttctcagacactgttacaagggctttacatatattagccaattctttttttttttttttttttttgagatggagtttcacttttgttgcccagactggagtgcaatggtgcaatctcggctcactgcaacctacctcagccttctgagtagctgggattataagcatgctccaccttgctcggctaatttttttgtgtcagtagagatgaggtttcaccatgttggtcaggctggtctcaaacttctgacctaaggtgatccacctgcctcggcctctcaaagtgctgggattgcaggcatgggccaccgcgcctggcctagccaatttaattcttgcaataatcttatgacataggtgcctctttttatcccactttataggtgtggaaactgaggcacacaaagctgtatgtcaggcttctggtttacctctcccacatggtctgttcactcttttgcttcatccttctgtttttcagctggcttttcttctgaacaggccaggtgaccacctctcttcatccgtcctgcctcccattttgaacatccttctctcgccaataacaatagcttccctttacggaatgtttaacatggcaaggcaccttgccttcgcttttacaaacattagctcatttaattgtcgcaaccatccctgaggtgggaaatgtgaggacccaggcacagaggaggctcaggggggactgcactcagcaggagactgaatcaggacaggacttgagagtccaagctgcttcccctccttctcatactcctgtgtgggctgcctttggttcctcgcccaggagtccttgccctctgctattccttttctgactcttggtctaccttcctgtctcagccactcatttgttgttcatgataagcagccaacagtcgactttctaatgtatatggatcctggctccccacaaagcctgggagctcctggggcagttgactatctttcaggctcctgatctagtgtctggctgtcagttgttgctttgccaatatttctttttttcttctctttctttctttctttttttttttttaatgtttactttttagagacagggtcttgctctgtcccttaggctggagtgcagtgatgcaatcgtagctcactgcagccttcatcacctagactcaagcaatccttccatctcggctccccaaatagctgggactacatgcccagctaacttttgtattttttgtagagacagggtctcccaatgttgcccaggctggtctcaaattcctgggcttaagtaatcctccctcctcggcttcccaaagtgttgggattaaaggcacgagccaccgtgcccagcctgcttatgcttcttgttgctggctgtggtggtggtgacagatccctctgctgtcttggcacttccctgccatttgagatgggctatttcctgggccagttcaggaaccctctccatttcataaaataacacttgttgcggtgaagtcagatttagtcagaggcatatgctgatgtgcctgttttcgaataagaaaatcaatgcaaagttggacgtgagatgtatcattataaggaagctcactctaatagttcctttctaaataaataattcttttgtaattgaatatcatccttttgcttatttctttgagggttaaatctggatccacactggatttgcttctggtggagtctctggaattaagggctaaagttaatcactatgtttataagtataaccaagtttatggcattcagtttgttggacaggattattttagctttttcagaattgccacaagaatccatctgaagctttagacatctcactgattttgtgaaatttgctttttaatgcacctaaaaccctcagtttaagtctttacatttgtgttatgtaaacaaaagtttgggtgtggggccagtgttgttgctggattttcataaaacctcatttctgctgggaaagggaaggagtggttacctgtggaggggtcgggtttggtctgtctggttgggaggaaggaagtttgggtgcttagactcagagggcttgctcgcctgaagtcctgcctcccagcctcatgcccttatggtgagggttgagagcaaaccagatcttgttggaaaacgagtagagttggacctcattcacttgcaggccgtggaggctcggcacacttcctttctgttccgcctgtgtctggtgccagagaaatgctgttttaaggatttaatgggattatgtatgtaaaaaagaaattctttgaaaagtacacaatgtcctacctctgtcaaacaacaagtatctggtaatttatagaatggagccctgaaagcttggaaggaataagagctcctgaacttttagaaggaaaaaggtgattttaaaaagtacatgattatggcgaaatttttcaaaaagcttctcaaaagcaactttattcaaactgttgtctaaacagattttagttattttggtttgattttactaaattatatgatgtttcctatttggcctttttcatgtgaatgggaggaatgggtggaacagggcaaaggtgaacttgtgcttcaagaaatcattgtggccaggcacagtggctcacgcccgtaatcccagcactctgggaggcccaggcaggcagatcacctgaggtcaggagttcgagaccagcctggccaacatggtgaaaccctgtctctactaaaaatacaaaaattagccaggtgtggtggtgcatgcctgtaattccagctactcaggaggctgaggcaggagaatcacttgaacccaggagatggaggttgcactgagctgagatcgtgccactgtactccagcctgggagacagtgagactctgtttcaaaaaaaaaaaagaaagaaagaaatcattgccatgatcatggcagatagaggatgttagcattttctttataacgtggtctgcttcagacatggactgttcttgtaaagaattaaggtaaatgaggtagattttaaaacctgtatatgcataggtttattttccatgaagtcaatgttcaaaaatttcactgatcagggaatgttgaactgtgcagcttttctaaaaagtctaaaaagactttgccatcactggataagccttgttagaggtgtgtgtgtgtgtgcgcgctctgcatcttctctttggaaatgatcaggttgtgtgtgcatcattaatgcctattcacccacacagtgaggtttgtttcacagtcagagatcttagagcttggcactttttacaaataggatttcttcagttccccttccttttgtccagctttgcatcttgccagtggctcctgccctgagttctaaagtttcgaaggcttaagtggccagggtcaggtcagtggcactgtgtgcaatgcagggaaaggcccccacttgctgggggcaggggatagtaacgccggcttcatttctcctgccctgggtctgcccaggagcagctctggccctggctgcacagacccgttcattagctcccatgtatttcactaccaggattgtaaccgcttctcgccttctcgtctctcctctgtgtccccctcttctgccaggcgggtgccccggtgatgactggtgcgggagagagcaccaatcccgagaacagcgagctcaagtattcgggtcaagatgggctctacataggcgtcagtctggcctcgccggccgaagtcacgtcctccgtgcgacaggattcctggtgcgccctggccctggcctgagcccacgccgccaggaggcagggagggctccgccgcgggcctcactccactcgtgtctgcttttgtgcagcagtccagacagtggcgactgcgctgacagaacgtgattctcgtgcctttattttgaaagagatgtttttcccaagaggcttgctgaaagagtgagagaagatggaagggaagggccagtgcaactgggcgcttgggccactccagccagcccgcctccggcggggaccctgctccacttccagaagccaggactaggacctgggccttgcctgctaaggaatattgagagagatttttttaaaaagattttgcattttgtccaaaatcatgtgcttcttctgatcaattttggttgttccagaatttcttcataccttttccacatccagatttcatgtgcgttcatggagaagatcacttgaggccatttggtacacatctctggaggctgagtcggttcatgaggtctcttatcaaaaatattactcagtttgcaagactgcattgtaactttaacatacactgtgactgacgtttctcaaagttcatattgtgtggctgatctgaagtcagtcggaatttgtaaacagggtagcaaacaagatatttttcttccatgtatacaataatttttttaaaaagtgcaatttgcgttgcagcaatcagtgttaaatcatttgcataagatttaacagcattttttataatgaatgtaaacattttaacttaatggtacttaaaataatttaaaagaaaaatgttaacttagacattcttatgcttcttttacaactacatcccattttatatttccaattgttaaagaaaaatatttcaagaacaaatcttctctcaggaaaattgcctttctctatttgttaagaatttttatacaagaacaccaatataccccctttattttactgtggaatatgtgctggaaaaattgcaacaacactttactacctaacggatagcatttgtaaatactctaggtatctgtaaacactctgatgaagtctgtatagtgtgactaacccacagggaggttggtttacgttaattttttttttgaatgggatgtcctatggaaacctatttcaccagagttttaaaaataaaaagggtattgttttgtcttctgta

SEQ ID NO: 28 - DNA, 33162 bp, Mus musculus
  source 1..33162: mol_type = genomic DNA
ctccgcacccagcagcttgtagagagcagttccgacccacagcctggcacccttcggctagcgctgtttgtttagggctcggtgagtccaatcaggagcgcaggctgcagttttccggcagagcagtaagaggcgcctcctctctcctttttattcaccagcagcgactagcagaccccggactctcgctctcccgccggcgccctccgcctctctccgcgccccggagcaccctcggtcgcggccgttcttctcgcacatcgctcgaggttcggttgtttcctcctttgtttgccccctcctctcccttctcccttcgcgggcccttgggcctccagctctccagcctttcccgggctgtgatcggttccgagggtgtccggtccttcgctttagaagattgtagggactccgaggttcccgggatactccggaccagcctccacccgccccccagtgcttatctgcccacagcttatctccgagttatcacagcgccaaggggcgggagcccgtagtccagtgggcagagaaacttctttcttgctatcttgcctgggtctgtgtgtgggcattaattttagtgtggttatctccgatgagcctaagcgatttggaaaagcagcccggtggaggcctgcctggttccccaccccctccaagtctccctgtcattcttcctgctctcccctttggggtggcctcggctctggggcggtctcacccccctcccctcctgcgttttcccctccttttctctgcgctctgctccaccctactatgaccaattccagaacgatctggcctttcccctgctggggttgaccatggggtgggccaggggtggcccggcccgcctgagtacgcacgctggtggttgtaaggcggtttgtgtttaaggtgtgcggttggcctggacgtggttggacgtgaggttttgcccattggtttccggcactatttcctagatccttatgcctttcctggcatctcactttctctgggctaggtaactttttctggagctcgcgttggatatgatcagcgaggtccagggagctctgagaaaaagcggcggtttcgttttcggggacaggttgccttttctagctatttccacgtgcggaactctcttcaccgaggcatcccaagaaaggggcacctttcttaggaggcagggtgagacagcattaacacacattaaattctttcttgtcaccggctcagagttagccagtctgcggccggtttcgagatcaatcttgggatctggcgcgctttgcagaggatggatgctatggaggggtgggataggaggctcaggaacacttgtcctgggtgacggaggagggcaccctagttgtccgggatcccttggctgctgctgcacagatttcaattgctgttttgtaacccctcaagtacggggcagaagcgggatatttaaggaatgccctaaactaggagaggggtgggcgagggagtgaaacatgtagacagtctacccttttagtaagtccactttatctatcttccgtcttgttcctcactcccaccttaggaatcaaaagtcaggttggagtagcgccggacagtggatggccttgactgacggcggctggtgcctgccaaagcgtttcggggctgctgctgcggacgccggcgactccgggccctttccagcgcgggagccctcctcgccgctttcccccatctcgtcttcgtcctcctcctgctcccggggcggggatcgcggtccctgcggcgccagcaactgcaggacgccgcagctcgacgccgaggcggtggcgggacctccgggccgctcgctcttgctcagcccctacgcctcgcatcccttcgccgctgcccacggagccgcggcgcccggggtcgcaggccccgggagcgccctgtcgacttgggaggacctgttgctcttcactgacctcgatcaggccgcgaccgccagcaagctgttgtggtccagccggggcgccaaactgagccccttcgcggccgagcagccggaggaaatgtaccagaccctcgccgccctgtccagccaggggcccgccgcttacgacggcgcgcccggcggcttcgtgcactccgcagcggcggcggccgctgccgccgcggcagccagctccccggtctacgtgcccaccacgcgcgtgggctccatgctgtccggcctgccctaccttcaaggggcgggcagcgggcccagcaatcacgcgggcggagcgggtgcccacccaggctggtcccaggcctccgccgacagccccccgtatggcgggggtggcgcagccggcggcggcgcggccggacctggaggtgcgggatcggctacggcccacgcctctgcacgctttccctactcgcccagcccgcccatggccaacggcgccgcgcgagaccccgggggctacgtggctgcgggcggcacgggcgcaggcagtgtgagtggaggtggcggcagcctggcggccatgggtggccgggagcaccagtacagctcgctgtccgcagctcggccgctgaacggaacgtaccaccaccaccatcaccatcacccgacctactcgccctacatggccgcaccgctgactcctgcctggccagcaggacccttcgaaacgccggtgctccacagcttacagggccgcgcgggagctccactcccggtgccacggggccccagcacaggtaaagatcagatcgcgccgcggtgtgggggtgcgggccgggaaccctgggatgcaagccggtgtggaacagctatttacttgaggtccatctgggccagcaaagacttcttagaacaagactttctacgtggcaggctcagaggctagcagcgatgctgtgggggatattcttgtccaggaaagagggtgaatgcatatctatgacctcaggggtgaggggaggggatgtgcacgaagtgggatagggaggtccggggcgcttcgtgagtagttaagaaccaggcaattgagcaaatgtgcatttcagcttgagagatatgtggggccggctctctgcttgtatcctggtttgggtgagtggtgagtgagattccaggactgggtgcatttggaatgtcgggcgcttaatcaggtagacacgtggacatagtcagtctcttctcattcagtctgctaagttgaggagctctgtccctttctttggtatttaaataggacacccaaagccctgagacccaggcatctacaagcatccctgttcccccaagcagtgggagcaaaggggacatggtcatctgtgacatctgtggtcgataggccttcaggctatctgctgggtgggattcagggatatggcttctacttgaccaggccaggcccctcagagtttagctcacaaagttaccctccgtgccagaggctattgaagtgtaaagtgggaaagcacaaccagctaccttggaaagaccttaatttggaaagtggctctgctcttagcagaggaaggtatggtcagagcatggtttctttctctagccatcctgttttgggcctagggttcatccatatgtctctccttctcagggtttcacccatttgacaactgttcctataaggaaaaatgtagctgtctatttgagggcagtagttagtcttgaatggaggcacattgtccaaactgtccttcccatgaatctttgtgtcttattctgggagcccctccccgattaggtttagggatgtcctttcagggcccctgacctgttaccctaaatgggactgttgtttagtttgtatttagaaaacccagtggcttaaagagaagaacctgatttgatcttctcctcactagtgacacagataggtcaagagacttggtaaagaagtcagttttcccctgatgttctcaggcacctcccttccttttgtacctttactgtcagcctggaagacaggcacagcaaagaccctgttgagaacatctgatagcttgggacttgatagagccttggtaggctgtcaccctttctaccactgaaaaaccatgtttggctcccaagtgtagagaacaagagactaaaaatcttcaaggaactagaaagggtggctgggctgtgaagcttttagatatgagtaggaaaacccaaagagggtgggacagggtgcttgctgtttgagtctaccccatttctgcctgtttcttgacatcccttcgaatttcctctaattttttttctctagccttgaaccatcttatttgactgagaagatagcttgtgcagagacaattccatctttagacattgacaataatggatttgtttgagaaaggctgtcataggcaccatagaagattcttttggctttgaatttagcctatattttacttgattttttttcccccttccagtctttgggcattgcaaagttggaaaattcttctgtagactcaagcagatttttaaaccggggggttggagtgaagggatttgggaatatattttgcaggctgctaagaaaagaatcaactaaggcagaattggctaggagtgtagacccaggtttgatcacacagacatacctatttctttatcttgatttttcccttcctcatctctgccaaggtctccttgtttcccttgctaatcttgaatttgcagccatcttcctgcctctgcaattataattataatattaataatagttattatttaaaaccacatttggagcaagtggtttgagcaaacactaaggctaaaacttgagtgctgtgcacagtaagcaaccttcacagtaagaaacctgctctctgccctttccaggactgcagagtggatttgaagttgttcacactgagatgagccttggtccccctaagccttgattccctggctggcttccttttctcccactgagcagagctccactcagggaaccacacctgactggagtctctcacttcccaggaacaccacttaggacagaggtgccaacctcccagcacaaccagattttataattaaaatctattttcttttgacaatttagaattattgctgtctgactcttcttgcagggagacagaaaggaactaaagagtttttatttaattaaaaaaaaaaaaaacaacttcctagaatttcaatttttgtctctgggactccagaggactaaattctacctggggcattcacacagtcttctccagggagtctttttattgttcctatggccagggcttccagggaatgccccactctggtagaggagctctctgataggtaacattttaaagtcaacaacaaaggcaaaagcccttgtttaacttcagtgtccttgaagtcctgagtattttactgattactgtggtcaatagtggcttttagggcagagaagaataaatctttgtgatgtgttgtaagttccagtgtccccaggataactttgaactcatttgtgtggtgtgttagtttcctttatatctcaaggcataactctagaaatgaaggggactttttttttttggtaaggtaaaaattaatggtataagcattttaatgctaaaaccatatttaaatatttttaccagattactgactgtcaacacaaaggtggtgctgtctgctggcagtgtagtcttcaaataaaatgctatgcaaagtgactttaaaagtgactcaactatttcttgaagaatgtcaaattagaacattcaaactctttgtaacagaaagggttctcattttacgaagtccatatgtgatttagtctcagtttagagaatccatgtgcttttatacttaacctcctttcagagaaacaacaaatgctattatttttgttaattattttggatttttttaaaaattaagctttaggttactttcaaatcccaaatgctaaccacatgatctgaaagacggggacaaacatttaaaatagaatttagatagaaaccagaatatttctgtgttagatcctcatgacatgaaaagtaaaatgcagtcttcatgattagtaatgagcctttccctcccatagaaaatctttttcttatttattattaattgatataagtgccaagaacagcattttaatttgggttgtctttttttaattgaagaaaaggcatgtaagaaggaaatgttatgagcacagaaaatactttaaattacttgataacaaggaacgggcagcgagtcctgggaatttgagggcagcaatcagtggatattatgcgacgcctttgcgtttggcgtgttgcattttataattacgatgggcccgggttgtaaaaaccacagagaccagaggagcggtaaggggaccagagttgattccccccccccccccacctcccgcccgatcctggatcctgtcattttttaggacctctgacttccctggggtttctactagaccccccgggagacaccagagtgtgggacagtggccagcggatctagggcaaccaagcctgggggtgcgcctccagtttctgatcacctgactgggacattcgagtgtggtgtgcgcggggctggcgttctcacaggcctctggcccatctctccccacagacctgttggaggacctgtcggagagccgcgagtgcgtgaactgcggctccatccagacgccactgtggagacgagacggcaccggtcattacctgtgcaatgcatgcggtctctacagcaagatgaatggcctcagcaggcccctcatcaagccacagaagcgcgtggtaagtgtcgctgcagggtgcggactcgcagcaacaccgtcccccacccccacctcctttagcgcgtgtcagaatcccggtgagaaccaaaggccttcccaaaagacaaaaaaaaaaaaaaaaaaaaaaaaaaaagtaagaaaaaaagaaaaggaaaggaaaggaaaggaaaggaaagaaaaggaaagaaaaggaaagacgcagctgctagcagtctctcttccacttcctatacggggatcgaatggataccaggcaagccagtgctctgctcttgaactgcaccatcagcccaggtgctgcttcttaattttttaaaagcacacgcatattttaccttaaagagatattcttggccagtatacaaatggatacccaagaaattggggttgcaggtaacatctgccaagcaaaagtaggcaaaagaaggtctggccttgtgtcttctttgctggtttggagaaagcaggctccgtttcaatacctgaccagccagtgggatacctcagaaatcgctctgcttcgggtcagctgtcaggggcagcctagttctgtagtgctttgaattgctctacctctttgcgttgtttgcccttccttggagatccaggtttagctccccatccctctgccttttaaattgcgctgagtatgatgaagatttatttgctcaaacattggttattttgaaatctggctgttgcagataggtacagagtcttcccaaattgtgaatgtcactaattcaagcctttgcaatcttttaaataagtatggggaattcttactttttcccatgattaagctaatacagtcatttgttaggagatataaagtttgaaatgaaagaaaagaaaaggagagagagagagagagagagagagagagagagagaggtgtgggtgggggaggcaagttttcatgaattgcaccttaaggctaacatttgtctagccccaactaatagtattctaaatgccatttaaagtagatgctttgcaattagatgccagacatcttaaggacccaggtaatttatttaattgttattctctaattagcagaacaaacgctatacatgttgtttgtgttaaatagattagagcgaaattgcatcacggtgtaagtctgacaccttaaggagaggcaattagttttatgattgttttgtttttaatgcatttaaaataaagtagctgaggttaatttgagtggaatgtgctttaagcttgttacaactttaccccgtttagggttttctttaaagagtttccttaaattcaggatgtgattgactcaggggctttcgagatcctcctgtacttttttttttaattaaaaagaaaatattccaaggaagttcttgctttcatttatcagacaaagcatgaacaatgaaaccttactttttagagggaaagctactttcatgcagagttcaagatgagctctgaaagctaactttttcttttttcaaaactgagcaaaaacttggtgtacatgtggtaggtagtttttaggttcttgttgaattacacatttgattaactaacaaccgtatttaaaaagctcatttatttcatgcactcacaggtaaaaaataactgtcacccataagaaaaccaatttaaacgtttgtaaatcaattagttttctttccgtgtggcaggtgtcttggcagtaagcaaggtcagcccatatgctttgtgaatgggttataaatgatgccaactgtagggcgtgccgctatcaattggttctctttgtgggcttatggtttggtgaatctggcttagttctcagaaacagaatattgagccccagtttgtttagccagcagaacagaaccaatcacggtgaacttgaacttgtattacactgcaaaataagacatttatggtgtaacttgaattccttgtcagtgaggaacagaactgagatctcttgttacaaggcacttttacaacctgctcaccttcatttcacatgtttattgagactgccttcacttacaaactgcagttgacagtcataaagctctttgttataatggcaaattctgataacaattttgctccatatcggctccaaattccactggaaactgtcataaatggctcatttataaaacggatcattttgtccgtccttcactaatttcacatttatggagagaaaggagtgctcatctggaaacttgcttcccatgagtcccaaagaggggaggagggagggaagaagcctctgctgctgctgtgtaaggtttgcatgtacatatacatatacatatacatatacatatacatatacatatacatatacatatacacatacatacacacacatatttgctttagcaaagcaatttcttaagccgttctatctgccaagtgtgtacattttcaccatatcctgagaattattagccccacagagctaaagggctcgtgactgtgtccttgtttttacatcttgattgtaaaggatgctaacctaatagaacagatgtgaactataaatgaaaaatcctgtttaatcacttatatttgtctgcaaagaaattggaacctgaatctctgactcttaaatatccaatatatatgcccaacatatcttttccaattctttataattttctttagcttttggaattttgttatatatatttatatacaaacatatgtatctggtcatagcacaacttgtttttaataattttaaacaatttgtttgagaatctaaataaaaatcatattttttcttcctgggagatgactattttaacacccccaccctcctgtagtgatttagaggaaatttattcttttaagaatgttagggcagcattagatgtggcttgccctggtgatagcagttaactcaactatttatgttgaagaataattgggacaaataaaagtgtgtcgacatcatcatatacaaagcagtttattaaaaaacgttaccaaatgtgtgtgaatcttttgtaaaacagttatagcagaatttaggcaccaggatgacaataccaagagtatttctttattcagatcttgacttttttttttctcctcccctctcttctctcctctcctcccctcccctcctctcccctcccctgccctgccctcccctcccctcccctcccctcccctctcctctcctctcctctcctctcctctcctctccgccccccccccccaccttagtgctgaggttaaggacttgccctctcagacgctcactcatctttttgtggtttctgggtgatttttttccctacatgtgcctgcaaaatagatgtggccatatctaatgaccagagctatttagcacattagtggctttcattgcgcttcaggattcagactgtggtggttggctgattttcttgttaatgttctagaattttggggctgctttaagatctaattccccaacagcaatgtgtggaaacctgacttcttagagaagcagtcactctggacacaggcatgatgctgtgcatgcttagcatggtcaatgtatgattgcttccaggctgttgtgtaccatgcagtaacgggctgggggagagaattccctgtgggagcaagcacactctgcagtcctcaaggtttctagtccaggaagtctgcctaattatatttgagtgatttttttttctctgactagatgttttacgtataattaacaggaaaagtggttttgaagatagaaagttgatgtacatataaagccattaaaatatgtaaaggtcccatttctctacttaccgtcttatgtgctgtctttttagccttcatcacggcggcttggactgtcctgtgccaactgtcacaccacaaccactaccttatggcgtagaaatgctgagggtgagcctgtgtgcaatgcttgcgggctctatatgaaactccatggggtatgttgctcctgtttatccatacatacaactagcacctgaattgtaaatttttagttataagacagaatcagcaaatgaaaaaaggtgtaaaagtgtgtacatatgccttgtagcgaattcaagctgctcttaattgtaatgtgaccagtcagttcagccactaaggagccaggagataaaacccactaccaaccaatccggcactaacattctctgtgaaacatctctacattttagaaatgtgaaaatgagccaagtgtaactgtgaatgcctttaatccaagatagccagggctacacggagaaacctgtagcaagaaaaagaaagaaaagaaatgtgaagtgtatacttcaaaattgatagcaaaaaaagattattataaatcttaagttttaagaatttggcaaaagcatttgtctgaagaagttatatatgataacttctgttagagtctatacttcattaaaagattgtagaacttattgtaaatttcaatatgtttgtctggttctagctaaggtttcattctatagcctaggctaacttgaacacacagcccagagtgcagtggagtacctgtctctgagccttctaagtgctgggattttccacatgagccactggctaataatgatcagttctttaaagtaaataacctgcgttgtagggagaaggtatttgatctcttttaaataaggatattaaaagcaaagattcatacaaaaatatttgctctataattgttatttcagataataaacataaagttgaaaatattaaattgtccatgataaactatattgtttttcctgaaagaatctgtttgttggagaaaggggaaatctttatgcatttataatctctctatatgtatatatatatatatatgtgtgtgtgtatatatatatatatatacatatatatatatacatattgatagcaaaataatgattattataaatcttaagttttaagaaatttagcaaaggcatttgtctgaagaagttatatctgatagcttctgtttccacacacaagtgcatgaaatttttgccaaagtctttaattagtttaaagctagcgacgtagctcagtaatgtttccctagtgtacctgagtccttagtactgaaaagaaaagattacttatttgctgtgggcctggggattgaacctagggccacgtaagccttctgccccttgagctccacttccgggcactttattttttatttttattttggtttggtttttcgagatcccaggtactttaaaaatgagggctttcagagctaaaatcatcttttgtctaaattcccttcagtgtaatcttgcatgtaagatcggtgtgaacattttttaggtgcctcgaccacttgctatgaaaaaagaaggaattcaaaccaggaaacgaaaacctaaaaatataaataagtcaaaagcttgctccggtaagtatgataaaatgcccttttatttggaaagtgttttctctggttttgaccctggaggtaggcgggctcacggctcttctcttgcaggtaacagcagtggctctgtccctatgactcctacttcctcttcttctaattcagatgactgcaccaaaaatacttctccttctacacaagcgaccacctcaggggtaagtgtgaaagcagcttggtactccagaggggttgttctgcattaaattatcttaaattttatcttatcagcagtataataatctgaaccaacaatttagtgaattggcacctaagaatattttttcagaggaaattatatttgattgtcaacaaaaagtcaaaacttaagtactttacaaacctcttaattaaggtccagcttttttagtgcttagattagcccaaaggaaaaaaagaagtgctaaagctttagattggtctgttcgcttttctcttcattctctctctccttccttccctccctccctctctccctccttccttgcttgtttgcttgtgagagtcactatgtattcctaacctagattagtaacatgactaggtgtctatcaactgcagatttactgcctcagattcgatcaaggcaaggccctctgcagttgttcacactgctcttgctgggagacctgcagcttccagcagtcattaatcccaaagggccatttcagcaatgacatgcagtacctgtcagtttctgtcgaacgaactgtgatgggaacccactctaatgtccatccaggtcacctgacctccctcagccttcagccctgtgttccacataagtcctttcaggtccatccccagccctcgggcaggactctagaaatgagtatagcccaaatgcttccctttcagccaggattacactaggaataacacccttgtttatctagaagctgttggttgtatagttgggccatggattgtttagggtacttcaaaatacagcagatttctaagctccaccctagattttttttagtcaaaatttctgggtgtgggccctggaaacttgtgtctttgtacaatagccacagggaaactgaaagcaccacgctagaggggtctgggagcttcgataggctctatctctgctttggtcacacctcagtcacaaatccaaattaacatactaaaaacagtactctatatttgagatgatttcatgttttttttttttgtggaccaaattcctttaatgaaaatagattgaaattattaaacattattctatacatgtatgaaattgtcaaagaattaaaaacattgtagctggtatataatacatttctataaatatttttgaatggccatagtgaaagaataatgtagcagaaattttttacatttttttgagacagggtccttagtcctgtctgacatagaactctgtgtagaccaagtttcctcaaagacgttcatccgcctctgcctctgttgggattaaaggtgtgtgccatgacgctcagtcttccagctggttctgtttgttgcaaatgttaggttaaggagctttcataaatgtgaaggattgtgtgtgtgtgttgggggggtattgcatatgtgtgtgtgattacatatgtgggatattcatgtgcttattatgtatgtgtgccacatatacatatagaaacctggggacagctttgtggagtctgccagccagtacctggacccgttagcccacccctgcctcctgctctcgtggcgtggagggttgactgcagctccagttaccggaagtggtaaagccattttgttacttgttacttactcttaggtcctcagattgtgtaggtaaatggggcaaaatgatgttttattgtctctggtgtattaaggagccactgtctgtgttttgtctgtggttagccccaagttactgttggggaaggtagtgtccagttcatgtggctaaagcttagtttgaatgttaatgccataggcttcctgtgtttgcttggggaatggtgctgttgtgaatgtagtcagatttgctcttgtggttttgtgatgtaaaaattcaaaattgcttttaataaatccagcctgttgggaaaagctaaaagaggaacctaacctgaccgggtgaggaagaacagcatccttctagagaccagtaggcagagcagtaagaatttagtggggactctggagaggcctttacaaggatgcagacccgcaagatcctagctctgaaacctccgtgggacctggagagcctgtggtagctctccaggcagctggggtagagctgggtgacatcacctcccattggctctggatggggttgcttctccactctactccttaccagactcccgcagagaataccaggctgccacagagatgagcagcctttccctgcatggcaaccctaccattgatgtcctcataatctgctcctaactttctgtgaggaactaggctacctttagatattgtcccatgtgaagagtaattgctagcggcttgtcccttctctagcttgttatcgaggaggccctttcatgcctctttctggtgctttatttatctgcccatgatgaacgtctgtggtcctgtggtatggtcagtgtagcagctgcacggctgtggagagaattataaagcctgtgagcagccagcagaagtgcttttataggtggctgcactgacagaagtatgtctttttttcccatctgggtctcagtgtctactggtaagccactagctctgactgatccactgtggaatctgtgtctcactgtaattgaagaaaatatgaggttcccatacaagctggagtctggtgttacactacagtgtcttcattggctcagggcgcaaatctcactcaagaatggttcacagccactgacttccagcattgcctgtgattggtgtagtaagaaattcgaaccatgaggtgcaatgataactggactacagaatcagggaatctcaggcacagatggtggggctggagtcccacatccatccctctgctgagagatgacaaggtgacatgtctacctttccttggtggaaatcaaacactgtttcacacacaggtacagcagcccccatgttgttcttcttctccctttgggaaaccagtggtggctggctgcctggtatcatttctagctggctccttgccttgtggaccattcacactggcaccaggttcttgggttctgagccaggccccagatcccttcccagcagcaatggggtatgggaaggactcctctctgtctctgtgagcgtgtggtggtcagagcacaactttgtgaagtcgcttctctccactatgttccagaggttacactaggtggtcaggcttctgtgacaagtagttttcctgtgggccctcttactgcctattctttatatttttttcctcttattctgcagttctagggtctgagtccaggtccttgtgggtgctaggcaagtgttatacattgagtgatatcctcaacccttttaaaacatggtcagggcctcactgtgtagctctggctctcctggaactcgtgtgtagaccaggctggccttgaactcaaagagatctatccgcctctgcctcccaaatgctaggattaaagatggtcaccaccatgcatagtctttaacatgtagttaaattttggccatttactaagttgctaggttagccttgatctctgtgtgtaccctaggcaagactcctgaatgccaccattcctggctagaccagatcaatcttccttacaagcaagaagcctggaaaatcacttctgctccgaagcgacattgtgcagttttttttagttttttttttttttgttgttgttgttgttgttttttctgtcctagctttctatgctagctctgacttgtgctttaatgaatgctttgtctgggagagtaagaaagacttctggtgagtcatccagtcagaacctggtcacttgtgactcagtttctccttgtgtgaagctgtgctggtgtggggttcacaggctgaagggagaaaagaagtattttcctgcccagtgttggggggggggtgctccctaccttgcagcccgggatcgatgtgaagagaaatgcatgctagcaacagtctgccttaccatggctacgtttgttattgaaaaacacttaattgacctaattgacagcagaatttggtatttattctccatggcatataaaaatagtaaaatatgctggacgtggtggtactagttcttaatttcagtagcattcaggctgatctctgagttcaaggctatgaaacataagagttccaggtgttacggactgcgtcttaattttttttggggggggctgggcataagggaactgcagaggcaggtggatctctgtgcgtttgaggccagcctggtctataaagctagttccaggacagctagggctacacagagaaaccctatatcagaaaacctcaccaatcaacaaccaaccaatcaaaacagaacaaacaaaacaaaacaaaacaaaaaaaaaacacaaatattttttgaattccaggtattgaccaagatataaactttttgttattgttgtttaggagcaaaaggttaactctacagtttcagtcatccttagatacttaatatacatctggccagtagtcttttccctgtgatttcaaaggctaacactgtgtgtgtttctctctctgtgtgtgtatacatttgtgacacttacctgcttagagtggtagcccataactgtaatctcagaactccaaaaattgaggcaggagactctccaggttgaggccagcttgggctatgtacagagaattaatgtgtgagcataaagaatcgaggaacatattttgcctgcctaaaaatagcatcagtaactactttaggaacttgagattatgttatcagtcatcattaagcttgtaccattgcactgtggcgttggtaaatatctagtccacttctgctttgctgggtgttgagaagtgtggatgtatagaggaggaaaacaagatctcctccctggaactgctcataatatggaggtgctggtggagtggcatgcacgcagacacgtggtctttctctgccggtccgacttaagtgccaggataagcaaagcagtagagggcagagggggcttgctgctcaggccgcagctggaaagaacctatggagagcagaatgtgaagcaactcagtaatagttagttttaaaaatattttgttttatgtgtatggatgggtgttttgcctgtgtgtgtgtgtgtgtgtgtgtgtgtgtgtgtgtgctgtgtgtgcccaaggaggcctgggggtcaggaaggtgggatcctctggaagtgcagttatattgtggttcatcatgagggtgctgggactcttgggccatctctttagcccccagtcttttaagtgtcatgtaacttagcctatgaagccagtggtgactccaaactcctgagttcctagccagggagttcctggcacgtgttgggattacaggcgtgttccccttcgcctaaatagttgcctaggattctttttctcataaaaaaattagtcatttaagattttttgcataatgtattttgtgtaccccttcctcaattgagtagggtttttggagagaaaaatggggattgagagctggtgagattgttattttttttgtaaagatgaccatagcctaccctgatagatttgaattcagttccagggcacaggtggtagaggtaagagaaatctccccagagttgtcctgacttccacactaataaagtgtcattcacatgcaagcacccacaatcaataacgtaactaagaattaaaaacaaaacgtaatacaagtatccaggaaggaggaatagcagtccatggaaccaaaggctggatgtttgaatttggtgtagctggaattcagggattgaatgtttagaagccagagggaggaatgaggtttttttttttttttttttataaagaaactccaagttttaaaaaatatttcaaagccctgtcaagtcagcagtaagtaaggcccaaactatgttcatctgtaaataatgaactttagctaaccctggcttccatgacaggtgtgctttctctctgtctgttggactccaacaattaccatatttttgtatggaagtattttgataattgaaataaacaatgccagcatgctcctgcttgcctgtttcctaggcatgttttccctctctcctggaatctcaagatgtatgctgaactcacacccttacatggaggtttgtcagcctcaggcttgagggtggggagcacagggggctgccctgctgtacctaacagaaacaggagttctgctgtggtggggaacaggtttccttacttgttagttaataacacacatagaggcagaagagcatggatcccatattcgatactgtctgggtctcgatggtctaagccctgcttggatctgtttcagaattttaataggtgttgtgtttctgtttctctagcacttgtaggatgctctgtagacactggcctcccttctctgctgcaggcacctctgagctttgtggcgatttgaaagagttagcatacacccttaagtgcttattctcagcagcagtgacttagggacagacattttttaggatagaccaaaataagctttgtgaaaccttcagaagaaagtgcaccaagtgggtaggttaacacttggagttcttttcatagatgtttaagaaaagcttgtttaatttttgtgcatgagtattttacctgcatgtatgtatgtgcctggtgcttgcagaaatcaggcctgggatacccctgaactacagtcagggattgtgatggttgtgagcctccatgtaggtgctgagaatcgaacccccagctctctgcaagagcaacaagtggtcggaagccttggatcatctctctagtctgggacattgtttgcggttttttgtgacatggtcttacgtaggcgtctggactcaaacttatttgagactggccttgaacttctgatcctcctgtctgttttggtcctccaggtgctaaaattctgtatggacatttgcaacctgtggtgaaattagaaagcgtggcttttgtttttttagacgtggtttctctgtataattctggctgtcctgtaactcactctgtagaccatgctggcctcaaacttagacatctgcctgtctcctcagtgtttgggctaccaatgtgaaaatttttattagaagatttttctctattgtgttggaatcagtttgagtttaccaagatgttattgctggccctggggcagaaagttaccacttctcctaccttcttgtcccccgtggtgttggagaccacacccagggcctggaggatgctcaacaagtgcttacaaattgtgcaacaaccccaggcctgctatggttttttaaagattgttttatttatatatatggtacataaatatgttgtgagtgtattacacatatgtgtgtgctgatggaggcctgaagagggtctcggatcctccagagctacaggtggttctgagtaaattgtgggtgctgggagctgggagtcaaactagatgtggaaaagcaggaagtacttatagccactgaaccatttctctagctcgtcttctgtctgtctgtctgtctgtctgtcttcctatgatggtcaagctggccttgaatacctgggtgcagatgattcccctgtttcagtgccctacccttacccctgtagctgggaaacagcacaccatcatcaccattcgaatgttttgcatgcacctcgcagagcacctgaaaactaaacccatatattaatcctgtccttaatttttaaaaagaatggttttattttatgtgtataagagctttgcttgcatatatgtgaatatatgtatgtatgtatgtatgcatgcatgtatgtatatatgtatgcatgtatgtatgtgctggtatggaagtcacaggaatttcctaccttagcctccttaatttcaggcttgaaccactttccccaccttagactcctgctgtttctattgggaagtaatttgttgttttggctttttatgtatatgaatgttttgcctacatatatgtctgtttaccacataatctggtacccagagggcatcaaccccaagaactggatgcttgagaaccaccatatgtgtgggaataaaacatgagtcttctgcaaaagcaacaaatactcttagttactaagccatctggctctgcagcccagccttgttatcacctactttctcacttgtaagttagtgggcacagagacaaggctttaattcccacttgttgcccttgcagagtatcttttatgtgcttttatctgagtgggacacaaaagtaaggaagaggtccaagatcatgtggcaagttttatggtcaaggctttgatttggaccagggctggcttgggcaatcagtgctactactactgcagccaacactgatttcttcagacaaaagaaatgaggttttgttacatttgtctggtcctagtgagtaagttaagaaacaaataccttaccactaaaataggtgggaaactagtgaccatgtgtgttcctgtgtatagccacgtctggcctacacagctctggatgactggaaacttgttatgcagacccatatggtctcaaactcctagagatctgtctgcctctgcctcccctgaaattaagaatatgtgcttagccttaggtgtatgtgtgtatgtctgtgccaggtgtgtacgagcttatgcgtgtgagttcagatatccatggaagtcagaagaagaaagcattatttcctttggaccacaagtcaaacatttttgagcagtccaatctatatctgggaaccaaacttggttctttcagagcagtcagtatgtacctttaaccatcaagccatctctctagccctatttaaaatgtgtattacatatacaggtgtatctgcttgtgtgtatacacaggtgtgcaggtaccagcatgggtgcctgtggaggtcctgcctgggcttagagttgcaggtgtcggggagctttataacgtggtttctgggattgtacccttcatcctaatgatgtagcagcaagactcttagctgagccatctctccagcacatgggtttttaccaatgaacacatcctcttaatctaaattaaatcaatatagaaaataaaatgtattatgggaagggagatattaggcagaaattatcatgttatttgtaacattaaacttaatagtgttattgaatagtaagttgctatttgtaataattactatttcaggtttctatgacaaagtatccataagtgtgtacatatatgtgaccatggctggtgttggagttctgaggacatcttgtgaggtgcattctctctttcttcccaccacgcagatcccgtggataaactcaggtcattaggcttggtagcaagtgccttttcccatcaagcacctcaccaaccctcagttttatgaaatgatcaaacagttcccaggaggctagtgcccatttttagtttcatcgtttatattcccaagctctcttgtctaaaggacgagaaaaagagttaaaaattgttaatctcagtgttaatctcacagtggtctgagcactggggtcaggcactattattgcctcatttataaatcagggcactgagcgactccctaaggtcacagaacatgctggtgttgaatcgggactggaaccagcgtctcctagctcctcagtcagagctgttacccctacccctaccccggggagctggctaatcaactcagttattaatatcccacttgccacatgctgcaaaccatgatcataaatattttgctggcattttatcttcacattccctatgtaccagccaccctctctctttgttcacagcctttctagtaacttgtaattctatctgaaagtcaccgtagcagagaatgtttaaggattttgaatactttcattttgtgtgtgtatgtgtgtgtgtatgtgtgtgtgtgtgtgtgtgtgtgtgtgtgtgtagtaagaaaatccactatctccttaacatctcatggctttgaatacacattaggaaacagtacaatgtatgtgcccacctaagctatgacagacagaggcttacctagtaagtgactcattgctctgcagagttctagaaggcacaattagtcagaaagcaagtgcgccagcagagcttgtttgcctttttgcacagccccaaattaaagatttttttacctgttttttttttttaaatccctgcctctaaaacatgtacaaaattgtcacaaaacatgaaataatcttacgggaaaacaaagttacagacaagaaagctggcttaggatggtctgaaatgttattgctaaatgagtctttgaagaaaatgaattcccttactggaatcacagtaatttattatgtatttcatgggtgtctgccaaaagggttaccagcaaaatgaagacttaattggtccgaattaaactcagtctgacagatagccttgctcgtgtttagggttacctgctaaaaagttaatacttcaaagacaggtgtcaccggacttaacagctcaaatccagctactgtcacatccagctttagaacaatttgtgtgtctgtttgctatagaatctcctatagcccaggctggcctcagatttgctttgtagctgaggctagccaggaactcctgatttttctggtttccacctcctaagggtggtgataggaatctgccaccacacccatgtcatgtgataaacagaattccaagacagtatctggtgtttcaagaggaccaactccatggcctgctgcctgtctggtatattgattggcatggtcagctttcaccagagttataagaattttcaccagagttacaagccatttttattgtatcattttcattgtatcaaactttatttgtttgatgttgtgattaaattgagtggctggtttttagggaagcctgaatatgatcttaagttttattccagggctcacagattagcagccgggaggaaacaggttcaggcagccaagagctagctgaagctccctgtgactatagggagctggcaagacttgtcctcctccaagggaagaataattcctcccatctggtccttcggagtagtgtgtagcgcaaatgggagatgcccacggactgctttgaagctttaagaacacttaaaatagaagctcgaatagcactctgaccccccccccccaccaagagagtggaaataaatctttactttctaaaaggggaatgtgaaggagttcccgtgttatatgaaggagccgtattttcaagcttccccccaaccccccatagcatttttatagtgtgtatttccttagctcccgctgcagtggctgagtatctttctgaccttggctgtgtttttttccactgatgctcacccatctcctgagaagcacgtgaacatggtgacagtttaaaggtttggcatcggggtcctggacagtttcatttaaccactgaatagaacactccatctcaatttcacaaaccttttcttcagaaggtttccagattgactttaagttaccccacagacaagttacgcaggcagttcatgtttgccttgagctatctgccttccctaccagatgcccttcggggagcacaggtgcaagacggcttgcttctttgtccaggatggattgtggctagagaatcacttgctctccatgaaggaatctgaaccaaccctgattaggccagttttggagactagtcactttaggaatggaggagttggtggcatgctgtgatggagagtgagctccaggatggctctgctgtgacggtagtgctcatggactatgtgtaccttccacatgtcaccttcgcagcttactgagtctgagccttgtcctattctgcctccatctggatcaaaataagcctttttaagtgggcatacaggtttccactcgtactttccctttgctgcgattcatgtatgtgtttttgtctttttctttcttgcggaagggagctagagagagccagccccacgggagtctaacctagaggctacagaagcatagcatggccgaggaatgcctggcttcccctcacataggattcgtgagcacagactcactcagatgcatggagaggcagatcagtgtcttgaagctcagacccccacccagagcgtgaccacccaccctataactttcctgggcacagacaacagccccttcctgcagagaggaactgtagaagaaatgcagacactctagcagagttctgtgctgtttctttgatgtaagacccctgtagcccacccatgctggctgctgcttggtgtgtagctgatgtggcgatgaccatctgatccttctgacctccccaggcattgcaccagcaccaccatgcctggtgtatatggtgctcaggattgaacacagggtttcgtgcagcttggcaatgttctaccaactgagctatctcttcaatagcttcaactgggttttcttacaaaattaaaatttatgctatgtatggtagcatgcatcggtgatactagctcctgtgaagtgggaggcaggaggatgcacagcacagccccatttcaaatgtgtgtgtttctacatgtgcacacataatttcataagctagaaaacattatctgttttctttgcttttctttttgagatagggtctcattattagatcagtttggcctgggaactcacagatcctcctgcctttgcctccccaaaggcatgtgtcaccatgtctggtggcattctgttcttttcaaaattagaatagtggtgcgtgtgtgtgagtgtgtgcgtgcgtgcgtgcgtgcgtgtgtgtgtgtgtgtgtgtgtgcgtgcgtgcgtgtgtgtgtgtgtgtgtgtgcgcgctcgcgtgtgtgtgcgtgcatgcgtgcgtgcgtggtgtgtgtgtgtgtgtgtgtgtgtgtaagcacatgtgcagacctcccacatcctgtgaagcagaactttcaggagttgttttctctcttttccctgggtttggaaattgaacaggtttgctcagtgcatggttttacccacggagctgtctttgtgtttcttctgtctgctgtgttccgacattctgttcctagggaggctctccccagttttctatccctgggagatgtgaaggccagggcaggaaagaggagattactgctgggagccagccggtgctagacactgttctgagcacccgactgctcgaatgtatcaaatctgaatcctttaataactttaccagtgacattcagagacagagatggtttattctcaagagaagcagctgggtgatgtgagatgacctgcacgcctcacgggcaaactgggctttcctcatgttcccttctgttgtagcctggaatataccagagttgttcctggaattgcttcttcctttccaggggcattttccctgcctggctgtgctgcagtctcccacctaccctggcttgcatgctatgctaagcccaggctgagtctggtgctgataacacattctttcaacaggaagttcctccattttcagttgtctgtgggagggtggagggcagataagctgtgaatggaaacccagaacagatttctactctgccctcaatgcactttgatctgggagagagagggggtttctgcctgggttgagctgcctgtctgcccggggagggaggaaggatggttagactctcctatccctaagcactcttcttctctgctttctcctagggacatttgtttcggttctagtaagagcctttggctacatcgagaggcccaccagttgataaagtcctttgaaggacttaattagatgtgggaaaatgttaactcatggaaattctttgatttgtttgttttgacttagggtctcactttagtcctggctggcttgtaaccaaggaaacagagcaggctggagtttctaactcagagatccacttgcctcttaaaaactgggttaaaggcatgcaccacagctaaaattcttaccagatcatttttattattgttgttgcttttttgttttggattttgtgtgtgtgtgtgtgtgtgtgtgtgtgtgtgagatagtgtctcgtcatcgtccaggttggcctccaagcctgtatgcaggtgaggagaatggctttgaacccctaccctcctgctactgcagtgctgagattacagatgctcatcactgtgcccaggtctccccctcaccccttaaaaaatcctttaagacaagcccaggctaatctctgcttcagcttcctgagttctgaaattataggtatgagatactatgcctacttgtgtgtgtgtatgtgtgtgtatgtgtgtgagagagatagtcagagagacagagagacagagacagaggcagagacagacacagaaaggtgtggagagagagagagagagagagagagagagagagagagagagagagagagagagagagagaggtgtgtatgttctcagggtggggggaggagactggattttattatacagtccatgcagttttcttccttctgcctccgtttctagaatgttccaatgcttggtgaatgtgtatgtacacactggtttcaagattatgagtgctttctgatatttttctcctcagatgatccatgaataaaacctgaggagaagggatttaagatgaaaaccagtgatgagctagatttcttcaggagagttagtgactctgcaattaaaaacagctgtgggagctactctaagcaggacgcagtgctcggtagttagagtcgagttgtgttcttcccaggcttgggtttatacggggcagcatggagatggtttcagggatgtactgggcccctctggcccctgcctcccctccctctccctcatttcattaaccttatggtcccattcgatcacctgagcctttaacttatgcctctgatttgtgaagccagcagccttgattattccctgttccattagagtattcaaaagaaaacactcagaggagtaagtggcaaggaggcccagcgctctcccacgtccccactcctgacgctcggataggacacggaatccatgccctgctgggtttcacttaccactgtaggacaggatttttcccatcttgctacatgatctgattatttttaataattgcataatagttcatggagcggatgacccaggtttccagaccattccgtattggattgttcccatggtttcaactattttaaggagtccagtaatggatagcttcctttgtgccacctttcctttcttttggattatttccttctaattcatttccagagtggaattactgagttcagtggccttggacactattaattgccttttaaattacttttgtcaaaaccaaagtacagtctcatgggccacggacgaagggccggcatgtttacttgacaccagccttttgtagtgtttgttataaagaccttaaattttatttttccttctgtggtgagagagaaaacccagagtcttagtattatcccaagtatataccactggggacatctgcaggccccaggcttcttgtgttgtatttcatgtttaaataccatgttcttagctcactggcaaaaggtgcttgtattacaagtctggcatcctgagttcaatccttgaaggcatggagttggaaggagggggagaaagatgattccatgaagttattgtctgcccacatacaagctgtggcatatacacacctcattctaatcccccaatctctctctctctctctctctctctctctctctctctctctctctcacacacacacacactcattaaaaggttatgaagtcttggcacacaattctgtgtttcctaagagactcagctgttgctttaagagctgatgtttgtcaggtgcacacctgcactttgggggggttgttggctttctttaggactgtgaagcctaatattcatacagaagagttatttctcagaaacttggaattgtttttcaggtataagaacagcactaaaggcattagcagttccttggggctgaggatataactcagtgtgtggtatgcttgcttgtgtatttgcatgtatggattgtagtgcatgggaaggcctgacccttcctttgtttccatctttctagatcttgagttataggcagcccccttttacttggtgtcttagggttttattgctgggaagaaaccatgaccaaggcaattcttacaaaggaaaacatttaattggggctggcttaccgtttcagaggttcagtccattatcatcatggtaggaagcatggcagcacgcaggcaggcagtgctggagaaggagctgagagttctacacatcttgatttgaaggcagccaaagtgactgtgaccttcacagcttgagcatgagacctcaatcaaagcccacacccacagcgacatacttcttctgccaaggccacacctaatagtgccacttcctatgggctaaacattcaaacacatgagtctatgggagccatacctactcaaatcactatgctcgggttcttgggagagaactctgtgctttctctctctctctctctctctctctctctctctctctctctctctctctctctctgcctctctttgagtaacctaagctggcttctccagcttcagcctcctgagtattgtgaacagatcaaagatttcttttaaaacattttcaaaacagacaggagccaagggtcatttgaaatgattgttgaatgccttgtatttctttttacgaagagctgtcactaaaattaaaatgtatagcttttgggaggcagaggcaggcagctctctgtaaatttgaggccaacataatctaaatagtaaataatcaaccccaaatctaagtcgtcaaccccatctcaaacagacaaataaacaaatgcagagccttacccttggctctcactcacactgcttttgttcctggacaatgattgctgtcctgagctgaggatagaactagggagagaataaacagaagagagcattttaacaatgttaacttaataacagtactttctatgtgtctaatctttacttatggtctagcacttactgtagaaacttgttatacaaacatgatcgttaacaacagtgatgtcccagcaaatcatatccattttattttattttatctttaaattaaattctattttatattcagacaggcttctctgtgtagccctgactgtcctggaactctctgaagaccaggatggcccccagttcagagacccactttcctctgtctcccaagcgctggaattaaaggtgtatgccttcaccacctggcttattattttttttttttgagaaagatcttttcatttatttatttttattttatgtgtattggtgtttgcctgcatgagggtgtcagagaattggagtcacagtggagagctgccttgtgactgccccttcagaatgctcgcatagcaaggcaccattcagacatgattacagacgtgctgagtcaagtctaagccaggtaacttgtatgcagactggaagtgacccgcccagaactttggaattcaacctgtctacaccaagcaggctgatttagatcctaccccagaagcctttggcctctgagactttctgcttatcacttgtcttgtgctgtgagctggctagccttctctcctggagtcccaacaaacccagcagggtctttgttaatgattctggtgctctgggctagctctctgctgttccagctgtctgggtgatcccagaactctctgaatttctcagaagaaaaattcttgtttcagagaaatcagacacagccagagaccagcagattggctgtttctggaatgaatgggttggcaagaagtctggcgtgacagaaatcactatacagagctactgtttttgtatcactcagacttatgtacttgtaatggagtttctgaagtcaagatctaaagtcatttgccagagctccgagtgtcatactgtctgcagtggccagcttgacagcactaatgcagttatttcagtaacttcacaagaatctttatacaattttaaacatctcgacttgggcatggtggtgcacgcctttaatcccagcacttggaaggcagaggcaggtggatttctgagttcaaggccagcctggtctatagagtgagttccaaccagggctacactgagaagccctctcaaatgacaacaacaaaacagaaagaaaccaaaacaaaaaacaaagagcttgatatctcaacaactttgtgagatatcccaaccctgtttgtcctgatgcatataatgctgtcagtttgggtctttatgcttgtaatatttacattaaaatctgagtttagggatttactccctttcttcctcttttctatcttttttttttttcatatttacttttgagtttgggtgttgctaagattgatcttgcacgaactgtatctgtttgtctccctattctctccatggtcttgttttatgatctggactggtctaggacatactgtgttgctcagacttgccttggacacacagttaccttccttctctgtctcctgagtcctgggttataggcattcactcccatgcctgcctccaggtcttggactctcatcttctcagtactcaggaatccacacctctgctaccaggccaacgtcttcctgggtttttgtcaatctgattttttgttgggaaagagaaagatggggacagtggatagttgggtttggtctgttttgttggaaagtttgtgtgaggagggagcaagtcacatgaccggagaagccactcctagggcactgccttccatctttgtgcaggagtgtgaaggctggagaaaaacgcaggtcctgcttggggaaaggagtccctgggacacacagaaccccagcacaccccattcagcatagctgagtctggtgccttggggttcttcaaaataatggccagagcatcaaaatggatgtttgaggaatttaacagagtgatgtttccaagcattatttgaaaaattttaaggaatcataagctgtttcaaacaaatacccggtatggaatggagccctggaggctggggagaacttagggtgcttgagtcttgcgaggaaaaaggtatgattagagaatgaacagctgcggctgaagtttcgcggaagccttgcaagtgtgactggtcccttaaacgctaagcagatgccagttacttgggtttggtcctacagcgtttgcagtgagaaccctgacagcgtggtttgtttctgctttccactcttaagtttgacaaattggagtcggtctttcggaaccctttcctgtctacctctgctttgtgctgggtggtcactgggttccgaaggtaacaacactgttctaagaatgttgccagaaccaggaggatggcactggatgacagtggtcagcacagtgtgtgccccttgggcgaggaagagtaaggctggctttagttttgctgactatgtcatttgatccctgatgttgaggcaggaggattggaccagctaacaacatgatgtataaccatctctccccctctgttctcttcttccatcaggtaggggcatcagtgatgtctgcagtgggagaaaacgccaaccccgagaacagtgacctcaagtattcaggtcaagacggcctctacataggtgtcagtctgtcctcccctgccgaagtcacatcctccgtgcgacaggattcttggtgtgctctggccctggcctgagctggtgctaccaagaggcaaggagggctctgaaggcctcataccacttgtgtctgatattgtccagcagtccagatggcagcaaaaatgcagacataacattccttcgatgcgtgatttctgtgcctttgttttgaaagagatatatttctcaagaagcttactgaagtaagaagagatgggcttttgcaggaagggccagcaccgtgggcatgtggcctgctcctgccagcctgggctgcttcctgcctctgactctgccccataccagtgggagaaactgtgacaatgaccggggccttgtctgctaaggaagattgagagatttaagagaaaatgtttgtgtattgctccaaatcatgtgcttcttgtgatcaacctcggttatcccagaacccattcatccccgaccaccgtgcacatttcacaagcgttcgtggagaggagcactgggagccatttggtctatcctggaggcggagtgcattcctggggtctcaacaagaatattaatttgcaagattgcatcatgacagacactgactgacttatctcaacgttcatcgtaacgtggctgatctgaggtcacttggaatttgtaaacagggtagcaaacaagatatttttcttccatgtacacaataatttttttaagtgcaatttgcgttgcagcaatcagtgttaaatcatttgcataagatttaacagcatttttataatgaatgtaaacattttaacttaatggtacttaaaataatttaaaaaaaagttaactttagacatatgcttcttacactcacagcccacttctgtgttcccaattgtttaaaagaaaaaaaaaaagatttcaagaacaaatcttctctcaggaaattgccttttctccatttatgaatttttatacaagaacaccaacacagtccccgttcttttactgaggaaaaagtgctggaaattgcaacaaacctttactacctagagaatagcatttgtaaatattctaagtatctgtaacactcttgacgcctgtaccacgtgaccaacccacaggttggtttacattattattttttttaatgggatatcatatggaaacctatttcaccagagttttaaaaaataaaaagggtattgttttgtgttctgtacagtga

SEQ ID NO: 29 - DNA, 11014 bp, Homo sapiens
  source 1..11014: mol_type = genomic DNA
ggaggacacttctcagaaggggttgttttgcttttgcttatttccgtccatttccctctctgcgcgcggaccttccttttccagatggtgagagccgcggggacacccgacgccggggcaggctgatccacgatcctgggtgtgcgtaacgccgcctggggctccgtgggcgagggacgtgtggggacaggtgcaccggaaactgccagactggagagttgaggcatcggaggcgcgagaacagcactactactgcggcgagacgagcgcggcgcatcccaaagcccggccaaatgcgctcgtccctgggaggggagggaggcgcgcctggagcggggacaggtgaggccgcgcgaacgttccagcctggcgcggctgcgggatccgggcgcgctgggaaagcgaggaggaccccgcgcgggaatcagggagcatcgcaggctgccgggcagcccctcgcggaagtgcgggctggggcgggctggggcgggctggggcaggccggggcgtccagcttaccttcctccggggcttgccccgccgctttgatggaggtgcaaacatttggagaagggcgggggtgtaggggctgggccggggctcgcagggctggggccccggatttacatgaaacaggcgtgcgggagcccattgttggcccccggcctcccagacccgcccggctgggtctgatatggccgctctcggccaatgggaggctgcccggcacttcaaagcgtgcgcggcccaatccgccgagcaccccagcgctgccgccgcggctctatttatggggagggcactgaatttcggtccccagagacctacactagtagagccttggggagttcaagtggaataacttctccccacccctctgcccccgtcccctccccccaagtcttggtccgcgccctcctcccgggtctgtgccgggacccgggacccgggagccgtcgcaggtctcggtccaaggggccccttttctcggaagggcggcggccaagagcagggaaggtggatctcaggtagcgagtctgggcttcggggacggcggggaggggagccggacgggaggatgagctcccctggcaccgagagcgcgggaaagagcctgcagtaccgagtggaccacctgctgagcgccgtggagaatgagctgcaggcgggcagcgagaagggcgaccccacagagcgcgaactgcgcgtgggcctggaggagagcgagctgtggctgcgcttcaaggagctcaccaatgagatgatcgtgaccaagaacggcaggtgggtgcgcgtccggagcccgcgcgcgccgcgctctccagcgcctgggcagcctgggggacctggcaagttcccggaggtcgaaccctttttctcctggaggagggctttgtgtttgttcccgctctggttaactccctcgagtgcatttctacaagcccctcttctggggctttctccgcggaagcttggggaggaggaacgcgcacttcggtgtcccgacctcggaggcatcccgggacccgcgaggcgcgccctggtccccgcctgtccccgcgggatgtggcctcctgcactgaaacccttcgccaggtcctctcctcccctccctcccgaggccgtggagatggtgaggaggccacctggacctggcagggctcggggaagggggagcttgggagtcaccctcggacgttccccagggggctcctctgtgccccgaaataactgaggcctctgtgcccagcttctgcctccggcctacctggtcagtgtcggggtcctcctgcgcccgccccgtgttttccaggaggatgtttccggtgctgaaggtgaacgtgtctggcctggaccccaacgccatgtactccttcctgctggacttcgtggcggcggacaaccaccgctggaagtacgtgaacggggaatgggtgccggggggcaagccggagccgcaggcgcccagctgcgtctacatccaccccgactcgcccaacttcggggcccactggatgaaggctcccgtctccttcagcaaagtcaagctcaccaacaagctcaacggagggggccaggtaggtgtgaggagcccgccaggtctgggaccagcgaggagggggccgcgctgcgccttctgcacgggggttgtgggaagggacgctgcttgaacgggaggcgacgtctgccctggagaaactgccacagccttctctaataaggcctttagcgctgtttatactaagctgataacatccacgcctggcgaacggggagcgggagcactcccctttgaaggactggagcttttggggaacttccgttgtctagccctaaactctcctgggggtggaaaagatatcagccttgatggcaaagtcgcatttaaatttaaacatgcgccacagtacttactgcgtggagtcggaacaaacttgtaaagtcgtgcttttctaaagaacattctttagtcggggattgttcctggaagaccccaggttaggcaagttgcaaacaagctcagtcttttaaaaatgaccatagccttcctgaaagccttagtactttattccaccaggtgaaaggattttgtgatgagcattcattgcttttaatggtgtgtagcatctcacatcccttttccaaacaagctgtgggaatagcacatataaaccgcggagaagcctcccctggtggaaccccacttccctcaacagcagagacactttcttgggatccagaggactttctgcatcctggagaaatggatgttttgctgttttaacgcaggcctttcagtgccaccaatcctgtatctgtctccctcagatcatgctgaactccttgcataagtatgagcctcgaatccacatagtgagagttgggggtccacagcgcatgatcaccagccactgcttccctgagacccagttcatagcggtgactgcttatcagaacgaggaggtgagaaggacagaggcggatcgctttcccggtgtgctgcggtgtggtgtgctgctccgtggagattctggaggagcggggagacgcgctaacccgcactgagaggaaggcttcctgccctttcaaataatattccggaacttgaaatggaagcacaggagagaactgtttaaattaagtccccattcaaacattttccccttgaattctccatacaagtgtttaaaactagaaacaacttctcaatgctcaaaatgaaaagatccaaaaagcattcaggttaaatggtgtgagaatttcttgagaacaagacttgagtgagagaggggcatgtccttccttggaaatcttccccaaagggtgggggggcaacccctcaaatctctgcagtgtgaagactcaactagatacaagctactgcataggtgcctgtaaatctatgcctaagcccaaccccaaagtactgcaaattcgacattagttggataccttgttggtgttgacgttgaccgaaaactagaacttccaggtctctatttcctaagcagccccagactgtgttttcagccatttctgatttatacacatggaacattgttagtagtaggttaaatttattgtgaatcccactcagaacattgacattgaaaatttttcataagcatgctactctgtacaattactcagctattttcagttccaaatagaaaactgtatgtggaaagaagtctgattatatttgaatatttaaaagtggtactggcatttctcaatttcttggtgccaaattaaatcccctggctaatagggaatatactagtaaatgcaatttcttgtttttcagatcacagctcttaaaattaagtacaatccatttgcaaaagctttccttgatgcaaaggaaaggtgagagaattctaactataaatacccttgggcaaagaagtatgcagaaagatgaaatattgctgcacatactcttttctgaatttccttatttttgaaaattcgatatactttttttttttcattttgatagaagtgatcacaaagagatgatggaggaacccggagacagccagcaacctgggtactcccaatgtacggtttgttgcactctgtcatgtcattctgcgtcatcgggactagacttgctgagagctgggaagtggagatggagaagacaagggtgtttctgggtgtgcctgggatgtaagattgcctttttgccatgcgaggctcttggccctgtgatgttgaagctgtgttgcccatctaacctctgctctaatcggggctgtggatactctcctgggtgcttttgttttgccgtgaggcagctgccaccatgcctggggtggatcattgagacctagctgggtgtttggactctcctgtattaggtaggcaacaggagaatctagctcattacctcctctttgaggctttcattaatggttgaagagccatctttccaatgatgcttaggaaccaaatttttccttagccctttggttctaggaatgtctcaccagctcctgtggctctgaggatgagagagttggatttaagtctagctccctctaggactttcaggagtcagagtgcaggatagaggattatacggcagcatttgttgggagaaacgctctctctcatcctggtccgtcctctccacccggggaagggacttggagatattaaacaatgaacgcggtagcactggctggtcaagaggctggatgaatcaacagggcacactcctccttacacaggcattttctattctgtagatttttcatcatttcctaggctgattgaacaaccagaaaggcagtcacttgagtagagtgagccactgctctggccagggccggctgggcagccagggcacgtctgcacccttccttccagtgctgcctggagaattgttagtagtttggaaattgaagccacagtagttgtcccgctaggggttgctttttctcaatcaaaacaacaaagcttgaagagtgtagaagaggacgggcacggtggctcacgcctgtaatcccaacactttgggaggccaagttggatggatcatttgagatcagggagttagagaccagcctggccaatatggtgaaacctcatctctactaaaaatacaaaaattgtcaggcatgatggtgggcgcctgtaatcccagctacttgggaggctgaggcatgagaatcccttgaacctgagaggcggagattgcaataagccaagatcacaccactgcactccagcctgggtgacagaatgaaactcccagtctcagaggagaaaaaaatgagtggacaagaaattgtagttttagaggaaggaaggggagtcttggaagaactttctgattctcctggggagaatggggggagcttaaaccaggagagtgagcagtaaaagggtctacccccagctaggaaggcacctcccgtctctgtgggtggcaggaggagaaggggagggcacccttgtctaagcaccaccccacctctctcagcatctctcacctgctctctgcctgtggttacattgtattcatgctcagtggaggaaagctcacctgccttggggaatagtagatctcaaagcaatccagaggattctcaggaggaaacagcttaggttgcctgaggccaggctcctgggtttactcaggtacacacaggattggaagccttgggttacctgtggtagtgagtgtggggctgatggcctcagatgtcttgtgaggcagactgtgtcctaagtatgagacactcagggtgcttcccccatcaggggcccctgaggggaaggtgggaagtcactggcctgggctctgctctctggagtgatggagggacagtccctggcctgggctctgctctctggagtgatggagggagagtccctggcctgggctctgctctctggagtgatggagggagagtccctggcctgggctctgctctctggagtgatggagggacagtccctggcctgggctctgctctctggagagatggagggagcactaatgcaggttactcagcactgtcttttctcacagcaggggggtggcttcttcctggaaccagcaccctgtgtccacctgcaaatcctcatcctcagtttggaggtgccctctccctcccctccacgcacagctgtgacaggtacccaaccctgaggagccaccggtcctcaccctaccccagcccctatgctcatcggaacaattctccaagtgagtcctcagcctcattctgccaggggttggtgggtggctgcaagaccactttgggaaaggcattctgcaggagtctagaatctaaaaaaatggagacggttttctggaacacatacccaagcccagttttttagtagctcaagagaagatcttcaatttatgtctccgccactgccgctgctggcggaacaaccacggacacccagatcagaggcttgcatccttgcacaggcctcagagctgctgctccaggttttgaaaatgacagattcctgggcctctccacagaaccatggtcgatccttaggaggagagcccaggtttgagtcttctatgaacctctctaaagtgacaatgatgggcagccaggctcaagaattcctgactacaccagtgattctccaaatacggtgcccaggccagagcctcagcaccacccgagagtgggcacagtctcaggccccaccccagactgacaggcagcagctcttggtggggcccggcaatgtgtgcttttttttgagacggagtctcgctctgtcgcccaggctggagtgcagtcgcacgatctcggctcactgcaagctccgcctctcgggttcacgccattctcctgcctcagcctcccaaggagctgggactacaggtgcctgccaccaggcctggctaatttttttgtatttttagtagagacggggtttcaccgtgttagccaggatggtctcgatcttctgacctcgtgatccacccgcctcggcctcccaaagtgctgggattacaggcgtgagccaccacgcctggccagtgtgcttttaaaagccttccaggccattccgatgcatgctccaatattaggaacactgggatagaccataaagatcccctggcctaattctctctataacactgtatatgtctagacttaattttgtctggctccaaaagaaggaaaatagctaaagaataccataaaacaattaagcaattaaagctgatttgaaatgaaaggaccttattgggttaggaagtcactgggacttgttcaaccagaggctagactctgaggcaggaagatcttatttctaattttgcctggagtaatggtttctatcgcccattcttatgaagtaatcactggtaaaaaggcagggtaaagttatatttatttttaaagataagtaattccaagtcagtgattgtaagtaagattcaatgtctacagggcatctactgataatgatgataagggaaaaagcttgggtttaccagggtatgttttcaaatacatatatttggcaataaatcttgcccctgataaccatgtaaatagactaatggattgttttctacagttaatatcccatgtacattttgttttcagtgttacgtagcttcagttattggtggtatttcactgtactttgttgttcttggaagacaccatctataattgcactttgttaccttccccccttagcctattctgacaactcacctgcatgtttatccatgctgcaatcccatgacaattggtccagccttggaatgcctgcccatcccagcatgctccccgtgagccacaatgccagcccacctaccagctccaggtaatgtatgtccaggacctggtgcaaagcatcctgggagctctgcctgtgacttcacgctgtttccattcccataggcccttagtccttattctccttggtccctgtgggtggttgggtctttatttagaattctttattagccagctatgcccagggattgcaggtgacatgactgccgagttcctgtttgcagtctgttcgctggaaggactgggctcctttacaacccaggtgtggaatgggagctgcgctatcccatccctgaatgaaaccagggtccccatcctggttctgccacttactggttcacgtgatggacaagtcttttagcctctctgggcctcagtttcctcacatataaaaggaaggtggtaaaaaaataacccagcctcggcctgtctcctacagggttgttggggtcagtaggtagagcttaaagagatcgtttcggaaccttttccaacaaaagctagtaaatgaaggaaatgagtttattggcttttctatggatacaggctcgaagtctttaatatatgtgctaggtaactggtaaacaatgatgactattttgttaccaacttgcaagttatgcagagggaaaaaggcttacaaattaagcaggctggtaaatgtcttacatttcttcataggatgaatataaaaacctaaaataccaaagctagaagtcaaccctcactttctagggaggaaggagggccagagatattaaatgattggaccagctcacagcagagtgagcctggaattaagtgatcttgacctcaaaggcaatgcacttcattttctagaataccaaaatatgcctgcgatcttaattcttgtctagaaaacagttccttcataataagaattcaattgcccgcggttagaaacagagcaacaatgcgtaaacaagcgaagctttcaggggctccaagagcatcgccccagaagcctgcacccgatcagatgacccgcacactgcaagctgttgacagaggccccacccgagggtctcagtgtggctctaattgggcatcttagaacctgaagctttcatttgtaaaatggcataaaaatctgccttgattaactcagacttgtttaaaacagtatggtgatacaacataaggtctcattattcacttgtagaaagacaaggttatttcccaaaataaaatcttaccataattgaatgctatccacttccatgtgcttagactggagaattcaatagtcatttccaccttcctcattttatgccttgagaaacacagcctataagtagtctcaggcaaagtgtaatgtgacacagctaggtaaaggcggaactgggaatggcttcctagtctgactgccaggtgcttttcttgctgctgggcaccatgctagcacacctatgtactgaacaggacaaagtgcagggaattgtgtctgtactggagttactctaaggaatgtctgctgcttagtgtttgaggagaggctggtcttcatcgtgagaatcactgcggtggtgggggtggggtgtcctagataaaaacatgtgtacttaagcccatcctcagtaacttttggttgagactatctgaaaagttttattctgaatgagagtgcaaaactactggtctgagtctttcttttctgttttgtgtgtttgtttgacggagtttcactcttgttgcccagactggagtgcaatggtgcaatcccagctcactgcaacatctgcctcccgggttcaagcgattctcctgcctcagcctcccaagtagctgggattacaggcatgtgccaccatgcccagccaattttttgtatttagtagagacggggtttcaccatgttagtcaggctggccttgaactcctgacatcagctgatccacctgccttggcctcccaaagtactgggattacaggcatcacccactgcggctggcctggtatgagtctttcgcagtgaaacttaacagcgctctttcatgagctctgaatatgtgaataatcttttcagtcatcttcctgatgattttgtttcttattaatagatacgacaataacttctatacatcacagaatgtgcttgtgagtcctttaataatttggagaaaatgacctgtttgaaagaagaaaactgtcatattacacagtcactccgaatgggatttctggtgtgtttttccatccttagctggcctgcagcccctgcccaggccctgctcactggtgtctttctgttgcagtcagtaccccagcctgtggtctgtgagcaacggcgccgtcaccccgggctcccaggcagcagccgtgtccaacgggctgggggcccagttcttccggggctcccccgcgcactacacacccctcacccatccggtctcggcgccctcttcctcgggatccccactgtacgaaggggcggccgcggccacagacatcgtggacagccagtacgacgccgcagcccaaggccgcctcatagcctcatggacacctgtgtcgccaccttccatgtgaagcagcaaggcccaggtcccgaaagatgcagtgactttttgtcgtggcagccagtggtgactggattgacctactaggtacccagtggcagtctcaggttaagaaggaaatgcagcctcagtaacttccttttcaaagcagtggaggagcacacggcacctttccccagagccccagcatcccttgctcacacctgcagtagcggtgctgtcccaggtggcttacagatgaacccaactgtggagatgatgcagttggcccaacctcactgacggtgaaaaaatgtttgccagggtccagaaactttttttggtttatttctcatacagtgtattggcaactttggcacaccagaatttgtaaactccaccagtcctactttagtgagataaaaagcacactcttaatcttcttccttgttgctttcaagtagttagagttgagctgttaaggacagaataaaatcatagttgaggacagcaggttttagttgaattgaaaatttgactgctctgccccctagaatgtgtgtattttaagcatatgtagctaatctcttgtgttgttaaactataactgtttcatatttttcttttgacaaagtagccaaagacaatcagcagaaagcattttctgcaaaataaacgcaatatgcaaaa

SEQ ID NO: 30 - DNA, 10078 bp, Pan troglodytes
  source 1..10078: mol_type = genomic DNA
ggggagggcactgaatttcggtccccagagacctacactagtagagccttggggagttcaagtggaataacttctccccacccctctgcccccgtctcctccccccaagtcttggtccgcgccctcctcccgggtctgtgccgggacccgggacccgggagccgtcgcaggtctcggtccaaggggccccttttctcggaagggcggcggccaagagcggggaaggtggatctcaggtagcgagtctgggcttcggggacggcggggaggggagccggacgggaggatgagttcccctggcaccgagagcgcgggaaagagcctgcagtaccgagtggaccacctgctgagcgccgtggagaatgagctgcaggcgggcagcgagaagggcgaccccacagagcgcgaactgcgcgtgggcctggaggagagcgagctgtggctgcgcttcaaggagctcaccaatgagatgatcgtgaccaagaacggcaggtgggtgcgcgtccggagcccgcgcgcgccgcgctctccagcgcctgggcagcctgggggacctggcaagttcccggaggtcgaaccctttttctcctggaggagggctttgtgtttgttcccgctctggttaactccctcgagtgcatttctccaagtccctcttctggggctttctccgcggaagcttggggaggaggagcgcgcactccggtgtcccgacctcggaggcatcccgggacccgcgaggcgcgccctggtccccgcctgtccccgcgggatgtggcctcctgcactgaaacccttcgccaggtcctctcctccccgccctcccgaggccgtggagatggtgaggaggccacccggacctggcagggctcggggaagggggagcttgggagtcaccttcggacgttccccagggggctcctctgtgccccgaaataacggaggcctctgtgcccagcttctgcctccggcctacctggtcagtgtcggggtcctcctgcgcccgccccgtgttttccaggaggatgtttccggtgctgaaggtgaacgtgtctggcctggaccccaacgccatgtactccttcctgctggacttcgtggcggcggacaaccaccgctggaagtacgtgaacggggaatgggtgccggggggcaagccggagccgcaggcgcccagctgcgtctacatccaccccgactcgcccaacttcggggcccactggatgaaggctcccgtctccttcagcaaagtcaagctcaccaacaagctcaacggagggggccaggtaggtgtgaggagcccgccaggtctgggaccagcgaggaggggccgcgctgggccttctgcacgggggttgtgggaagggacgctgcttgaacgggaggcgacgtctgccctggagaaacggccacagccttctctaataaggcctttagcgctgtttatactaagctgataacatccacgcctggcgaacggggagcgggagcactcccctttgaaggactggagctttgggggaacttccgtgtctagccctaaactctcctgggggtggaaaagatatcagccttgatggcaaagtcgcatttaaatttaaacatgcgccacactacttactgcgtggagtcagaacaaacttgtaaagtcgtgcttttctaaagaacattctttagtcggggattgttcctggaagaccccaggttaggcaagttgcaaacaagctcagtcttttaaaaatgtccatagccttcctgaaagccttagtactttattccaccaggtgaaaggattttgtgatgagcattcattgcttttaatggtgtgtagcgtctcacatcccttttccaaacaagctgtgggaatagcacatataaaccgcagagaagcctcccctggtggaaccccacttccctcaacagcagagacactttcttgggatccagaggactttctgcatcccggagaaatggatgttttgctgttttaacgcaggccgttcagtgccaccaatcctgtatctgtctccctcagatcatgctgaactccttgcataagtatgagcctcgaatccacatagtgagagttgggggtccacagcgcatgatcaccagccactgcttccctgagacccagttcatagcggtgactgcttatcagaacgaggaggtgagaaggacagaggcggatcgctttcccggtgtgctgcggtgtggtgtgctgctccgtggagactctggaggagcggggagacgcgctaacccgcactgagaggaaggcttcctgccctttcaaataatattccggaacttgaaatggaagcacaggagagaactgtttaaattaagtccccattcaaatattttccccttgaattctccatacaagtgtttaaaactagaaacaacttctcaatgctcaaaatgaaaagatccaaaaagcattcaggttaaatgctgtgagaatttcttgagaacaagacttgagtgacagaggggcatgtccttccttggaaatcttccccaaaggtggggggggcaacccctcaaatctctgcagtgtgaagactcaactagatacaagctactgcataggtgcctgtaaatctatgcctaagcccaaccccaaagtactgcaaattcaacattagttggataccttgttggtgttgacgttgaccgaaatctagaacttccaggtctctatttcctaagcagccccagcctgtgttttcagccatttctgatttatacacatggaacattgttagtagtaggttaaatttattgtgaatcccactcagaacattgacattgaaaatttttcataagcatgctactctgtacaattactcagctattttcagttccaaatagaaaactgtatgtggaaagaagtctgattatatttgaaaatttaaaagtggtactggcatttctcaatttcttggtgccaaattaaatcccctggctaatagggaatatactagtaaatgcaatttcttgtttttcagatcacagctcttaaaattaagtacaatccatttgcaaaagctttccttgatgcaaaggaaaggtgagagaattctaactataaatacccttgggcaaagaagtatgcagaaagatgaaatattgctgcacatactcttttctgaatttccttatgtttgaaaattcgatatactttttttttttcattttgatagaagtgatcacaaagagatgatggaggaacccggagacagccagcaacctgggtactcccaatgtacggtttgttgcactctgtcatgtcattctgcgtcatcgggactagacttgctgagagctgggaagtggagatggagaagacaagggtgtttctgggtgtgcctgggatgtaagattgcctttttgccatgcgaggctcttggccctgtgatgttgaagctgtgttgcccatctaacctctgctctaatcggggctgtggatactctcctgggtgcttttgttttgccgtgaggcagctgccaccatgcctggggtggatcattgagacctagctgggtgtttggactctcctgtattaggcaacaggagaatctagctcattacatcctctttgaggctttcattaatggttgaagagccatctttccaatgatgcttaggaacaaaatttttccttagccctgtggttctaggaatgtctcaccagctcctgtggctctgaggatgagagagttggatttaagtctagctccctctaggactttcaggagtcagagtgcaggatagaggattatacagcagcatttgttgggagaaacgctctctctcatcctggtccgtcctctccacccggggaagggacttggagatattaaacaatgaacgcggtagcactggctggtcaagaggctggatgaatcaacagggcacactcctccttacacaggcattttctattctgtagatttttcatcatttcctaggctgattgaacaaccagaaggggagtcacttgagtagagtgagccactgctctggccagggccggctgggcagcgagagcacatctgcaccctcccttccagtgctgcctggagaattgttagtagtttggaaattgaagccacagtagttgtcccactaggggttgctttttctcaatcaaaacaacaaagcttgaagagtgtagaagaggacgggcacggtggctcacgcctgtaatcccaacactttgggaggccaagttggatggatcatttgaggtcagggagttagagaccagcctggccaatatagtgaaacctcatctctactaaaaatacaaaaattgtcaggcatgatggtgggcgcctgtaatcccagctacttgggaggctgaggcatgagaatcccttgaacctgagaggcggagattgcaataagccaagatcacaccactgcattccagcctgggtgacagaatgaaactcccagtctcagaggagaaaaaaatgcgtggacaagaaattgtagttttagaggaaggaaggggagccttggaagaactttctgattctcctggggagaatgtggggagcttaaaccagaagagtgagcagtaaaggggtctacccccagctaggaaggcagctcccgtctctgtgggtggcaggaggagaaggggagggcacccttgtctaagcaccaccccacctctctcacctgctctctgcctgtggttacattgtattcatgctcagtggaggaaagctcacctgccttggggaatagtagatctcaaagcaatccagaggattctcaggaggaaacagcttaggttgcctgaggccaggctcctgggtttactcaggtacacacaggattggaagccttgggttacctgtggtagtgagtgtggggctgatggcctcagatgtcttgtgaggcagactgtgtcctaagtatgagacactcagggtgcttcgtccatcaggggcccctgaggggaaggtgggaagtcactggcctgggctctgctctctggagtgatggagggagagtccctggcctgggctctgctctctggagtgatggagggagcactaatgcaggttactcagcactctcttttctcacagcaggggggtggcttcttcctggaaccagcaccctgtgtccacctgcaaatcctcatcctcagtttggaggtgccctctccctcccctccacgcacggctgtgacaggtacccagccctgaggagccaccggtcctcaccctaccccagcccctatgctcatcggaacaattctccaagtgagtcctcagcctcattctgccaggggttggtgggtggctgcaagaccactttgggaaaggcattctgcaggggtctagaatctaaaaaaacggagacggttttctggaacacatacccaagcccagttttttagtagctcaagagaagatcttcaatttatgtctccgccactgctgccgctggcggaacaaccacggacacccagatcagaggcttgcatccttgcacgggcctcagagctgctgctccaggttttgaaaatgacagattcctgggcctctccacagaaccatggtcgatccttaggaggagagcccaggtttgagtcttttatgaacctctctaaagtgacaatgatgggcagccaggctcaagaattactgactacaccagtgattctccaaatacggtgcccaggccagagcctcagcaccacccgagagtgggcacagtctcaggccccaccccagactgacaggcagcagctcttggtggggcccggcaatgtgtgcttttttttgagacggagtctcgctctgtcgcccagactggagtgcagtggcacgatctcagctcactgcaagctccgcctctcgggttcacgccattctcctgcctcagcctcccaaggagctgagactacaggtgcctgccaccaggcctggctaatttttttgtatttttagtagagacggggtttcaccgtgttagccaggatggtctcgatctcctgacctcgtgatccacccgcctcggcctcccaaagtgctgggattacaggcgtgagccaccgctcctggccagtgtgcttttaaaagccttccaggccattccgatgcatgttccaatattaggaccactgggatagaccataaagatcccctggcctaactctctctataacactgtatatgtctagacttaattttgtctggctccaaaagaaggaaaatagctcaagaacaccataaaacaattaagcaattaaagttgatttgaaatgaaaggaccttattgggttaggaagtcactgggacttgttcaaccagaggctagactctgaggcaggaagatcttatttctaattttgcctggagtaatggtttctatcgcccattcttatgaaataatcactggtaaaaaggcagggtaaagttatatttatttttaaagataagtaattccaagtcagtgattgtaagtaagattcaatgtctacagggcatctactgataatgatgataagggaaaaagcttgggtttaccagggtatgttttcaaatacatacatttggcaataaatcttgcccctgataaccacgtaaatagattaatggattgttttctacagttaatatcccatgtacattttgttttcagtgttacgtagcttcagttattggtgatatttcactgtactttgttgttcttggaagacaccatctataattgcactttgttaccttccccccttagcctattctgacaactcacctgcatgtttatccatgctgcaatcccatgacaattggtccagccttggaatgcctgcccatcccagcatgctccccgtgagccacaatgccagcccacctaccagctccaggtaatggatgtccaggacgtggtgcaaagcatcctgggagctctgcctgtgacttcacgctgtttcattcctataggcccttagtccttattctcctcggtccctgtgggtggttgggtctttatttagaattctttattagccagctatgcccagggattgcaggtgacatgactgccgagttcctgtttgcagtctgttcgctggaaggactgggctcctttacaacccaggtgtggaatgggagctgcgctatcccatccctgaatgaaaccatagtccccatcctggttctaccacttactggttcacgtgatggacaagtcttttagcctctctgggcctcagtttcctcacatataaaaggaaggtggtaaaaaaataacccagcctcggcctgtctcctacagggttgttggggtcagtaggtagagcttaaagagatcgttttggaaccttttccaacaaaagctagtaaatgaaggaaatgaatttattggcttttctatggatacaggctcgaagtctttaatatatgtgctaggtaactggtaaacaatgatgactattttgttaccaacttgcaagttatgcagagggagaaaggcttacaaattaagcaggctggtaaatgtcttacatttcttcataggatgaatataaaaacctaaaataccaaagctagaagtcaactctcactttctagggaggaaggagggccagagatattaaatgattggaccagctcacagcagagtgagcctggaattaagtgatcttgacctcaaaggcaatgcacttcattttctagaataccaaaatatgcctgcgatcttaattcttgtctagaaaacagttccttcataataagaattcaattgcttgcggttagaaacagagcaacaatgcgtaaacaagcgaagctttcaggggctccaagagcatcgccccagaagcctgcaccgatcagatgacctgcacactgcaagctgttgacagaggccccacccgagggtctcagtgtggctctaattgggcatcttagaacctgaagctttcatttgtaaaatggcataaaaatctgccttgattaactcagacttgtttaaaacagcatggtgatacaacataaggtctcattattcacttatagaaagacaaggttatttcccaaaataaaatcttaccataattgaatgctatccacttccatgtgcttagactggagaattcaatagtcatttccaccttcctaattttatgccttgagaaacacagcctataagtagtctcaggcaaagtgtaatgtgacacagctaggtaaaggcggaactgggaatggcttcctagtctgactgccaggtgcttttcttgctgctgggcaccatgctagcacacctatgtactgaacaggacaaagtgcagggaattgtgtctgtactggagttactctaaggaatgtctgctgcttagcgtttgaggagaggctggtctccatcgtgagaatcactgcggtggtgggggtgggatgtgctagataaaaacatgtgcacttaagcccatcctcagtcacttttgattgagactatctgaaaagttttattctgaatgagagtgcaaaactactggtctgagtctttcttttctgttttgtttgtttgtttgacggagtttcactcttgttgcccagactggagtgcaatggtgcaatcccagctcactgcaacatctgcctcccgggttcaagcgattctcctgcctcagcctcccaagtcgctgggattacaggcatgtgccaccatgcccagccaattttttgtatttagtagagacggggtttcaccatgttagtcaggctggtcttgaactcctgacctcaggtgatccacctgccttggcctcccaaagtactgggattacaggcatcacccactgcggctggcctggtatgagtctttcgtagtgaaacttaacagcgctctttcatgagctctgaatatgtgaataatcttttcagtcatcttcctgatgattttgtttcttattaatagatacgacaataacttctatacatcacagaatgtgcttgtgagtcctttaataatttggagaaaatgacctgtttgaaagaagaaaactgtcatattacacagtcactccgaatgggatttctggtgtatttttccatccttagctggcctgcagcccctgcccaggccctgctcactggtgtctttctgttgcagtcagtaccccagcctgtggtctgtgagcaacggcgccgtcaccccgggctcccaggcagcagccgtgtccaacgggctgggggcccagttcttccggggctcccccgcgcactacacacccctcacccatccggtctcggcgccctcttcctcgggatccccactgtacgaaggggcggccgcggccacagacatcgtggacagccagtacgacgccgcagcccaaggccgcctcatagcctcatggacacctgtgtcgccaccttccatgtgaagcagcaaggcccaggtcccgaaagatgcagtgactttttgtcgtggcagccagtggtgactggattgacctactaggtacccagtggcagtctcaggttaagaaggaaatgcagcctcagtaacttccttttcaaagcagtggaggagcacacggcactgttccccagagccccagcatcccttgctcacacctgcagtagcggtgctgtcccaggtggcttacagatgaacccaactgtggagatgatgcagttggcccaacctcactgacggtgaaaaaatgtttgccagggtccagaaactttttttggttgatttctcatacagtgtattggcaactttggcacaccagaatttgtaaactccaccagtcctactttagtgagataaaaagcacactcttaatcttcttccttgttgctttcaagtagttagagttgagctgttaaggacagaataaaatcatagttgaggacagcaggttttagttgaattgaaaatttgactgctctgccccctaggatgtgtgtattttaagcatatgtagctaatctcttgtgttgttaaactataactgtttcatatttttcttctgacaaagtagccaaagacaatcagcagaaagcattttctgcaaaataaacgcaatatgcaaaa

SEQ ID NO: 31 - DNA, 20319 bp, Mus musculus
  source 1..20319: mol_type = genomic DNA
ttttaaacagtcattagataaagtccaaacaggatatgacagctttctttttctttgagtctgcattatgataagcagcgaggtaggtatccggtagagatgctcgtgcctgacacgagatgcctggcacttcgttctttcattattattttttaagatttatttatttattatatgtaagtacactgtagctgtcttcagactcgtcagaagagggcatcagacctcattatggatggttgtgagtcaccatgtggttgctgggatttgaacgcaggactttaggaagaacactcagtgctcttaaccgctgagccatctctccagcccttgttctttcgttgtaaaggtgacaccatcatgcagagcccgaaccgtgaatttggatgatggagacagtcaggcaggcagcacagtgggcagcagcgctgagcagactcagacatgaggctccagcccatggctagtcacttcttctgactcatggtccttctgcctggtgctctctttgcagcatcttaaataaaataagcttgttttctttcttaaaatttgtttaaagattcatttaaagattcatttatctatgcatatgagtgctctatttgtatgtatgcctgcataacagaagaggacatcagaactccttagagatggttgtgagctaccatgtggttgctgggaattgaactcaggacctctggaagagcagccagcgctcttaactgctgatccatccctcctgcccttaaaaattatttttaaaacagctttcaaattatgggtaaggataaggaggcatgaaagtgagccaagggtgtttgatgaagtgaaatgagcgttataagtagaaaaatataaggagcggaagtagattccaacaaggggttggattaggcatatctgaagatggaatgtgtgaaccagagaggccagagatgtgatcagatgtgagcaccagagacaaagtgctggccttaatagcccagcggagctgaagcccagggccagcagtgatggcagagaagctgtggaaggcactgtgctgaacagaaaggaatttccagaaggggtgaaaaatatcaaccctaatatttagggaacccaaaaaaatcacaagcactagtagaaatgacagcattgtctgtggatgtggctgagtggacgactgctttacttgatgctcaaggccctgagttcaatccccagtattgcaagaatactaataaagggggtggggggaggagatggctcagcaccctgaacgggaaaatcccagctgtgattccagtgtcaggggacagatgcccccttctggcttctgtgggtactgcatgcacatggcacacagccattcaagcaggcaaaacacccatacatggaaaagatgaatagttaaaaattttttttcatcctggtgttgtggtccagcactcaggaggcagaggcaggtagatctctgagtttgaggccagcctggtttatagagggagttcccttggttggacagggaggggggagaacaataaaaaaagaaaaagagggggagagagagaggggggggagagagggagggagggagggagggagggagggagggagggaaggaaggaaggaaggaaggaaggaacgaaggaaggaaggaacgaaggaaggaaggaaggaagggattttagaagaacaatggaaatgcttaaaggagccaaagaaaaaggcaggtctcaccaagggataacacccaaagtgcagacagctccctagtggaagtaaggtcagattcggagagaatctttttaagaggtagaaacccttaggagtcctataacaattcagccaagcccatcactttctttctacctctaagaaaataagaaaatgttaggcacacgaagcctgcagatgcagagggaggagacaacagaactcaaacatacattctctagagagagggcctaaggagcagttcccagctccccctgggagggcagtgcatcctcagtcacaaagccagagctacacagttgttcctcccaacccaggcaccactcctaaaaacacagtggcaaaccaagaactaagcctgtgtttaaatatatgtaagaaacctgtgtgttcaacagtgagctagcgtgaccttttctcttgaagttagggacagcaccaggctctacttcatttccactcctgtgcaatactgtaggagaagcttgacccacacaaggatggggaaaaaggataaacactatcgtcgtttataagttttaattttatcttatgtgtacaggtgtctgtgcagcacatacacacagtgcctgaggagtccatagggggatgagggatcccctaggactgtaactacaagtgtttgtgagctgatgtgtcagggctgagagtttagcctgggtcccctagaagagcagccagtgagcttagcctctgagccatctgtctagccccattgtattgtatagagtttaaatgctacaggaaaacatagctgtgtttaacgtttgcaaacatttcctctatgaataaacagaattttttaaaaaaataacttttaaatgtgtgtgtgtccgtgtccgtgtccgtgtccctgtgattggccagacatgtccaatctcctggtgttacaattataggtggttgtgaactggggactgtgtggttgctggaaaccaaacttgggtgctctcaagagcaaaggtattctgcaccactgagccatctctccagcccagtaaatagaactttaaagacacttgaataccttttaactttaggtgagactcttgtctcagtctcagaaggtcccaaggaggagaagacagacccaggttctgaactggcacttgcagtttcctcagaatgaaacagaagctatgttctggcccttgctttcttgcccacaccttctgaggcatgtcaccattggccacctgggagccagctggtatttcaggaatacagttgcccctcatcctcttcattttatagcccttcaaggagacaggctgtgcttaactttaagacacagtaagaaaagctgacaccttggaaaagtatgatgaagatgaaggaacaattatataactatttaaggaggaaaatggactgtcacgtcatactggaaacagaattataatctgtagaaatatatgtttccgtggatgagttgtctgagctcttgggaaaatcagaaagctagttacagggttgagctaggcatgaggtcagaaaataagaaggtcatagaatttcttcattccacactgaaaaatacattgagtacagttagcatgtcgttggtgcagtaaggatactcatgaggtgtgtggggggggggcaggaaggagggagagagaagagagaaaaagagagaaggagggagaggagaaagaggagggagggagagaaaggatggatagggggaaagggagagagaagagagtgggagggaaagaaagaggtgggagggagaggtgggagagaagaaaggagagcagaagggggagagaggagagggagagtgaataagaatctcagattctagggtggttgagatgggaaaaatattttgagttcgtgaccagcctggtcaacatggtattgaggaaggagggacagaaggaaggactgggtgggaggagggaggacctggaggaaaggaaggcaggctgccactttcctcatcagcaggtgagcaagaagagaactggtctgagtaaacacagcctgttagcactgttctaaacagcagagctctgcctaggcagcacagaccccagcaggttggaaactagccaaaccagtttatacaagtttaaggatcccttggctaaaatgcttgtgaccagaagtgtttaagacttgaatcttctaggtttgggaatatttgactttaatggttgagcatctctcaatatctttctcttaaataccttgtaaccgaggctggaaagatgacttagtgcattttttttccctcttgcaaagggccctgggtttgattctcagcactcacatgatggctcacaaccatctctaaggccagttccagggggtctgatgccctcttctgacctccatgggcactacacattcgatatgcttacattcacgcaagcagaatacgcaaacccatacaataaagtaaaataaactagaaaataatcacaacaacaagaaaaacccactttgctgtggcagcgtagagatagcggctgggtaggagagcaaagggaatcctgtccagcctcagtggactctcctgatcctccgggtccccagctggcatggagttggagtcccacatttaccagtggcctggaggggtgaccatggccctctttggactttcatccatttgtggtaagatcatcatctcagggacagacttctgagagatgttccatagtggattaaaaccaaagcaggaggggctggggagatggctcagaggttaagaacacaagttgctctttcagaggactgggttcaagtcccagatcacatgtggcagatcatagctgtctatagctcaagtttcaggggatccaaagctctcctctggggtgtgtgaatttgattcctggagtccacatggcagaaggagatctgacctccataatttgcaccctccgcttctatggtgagggctgtgcccacacacataaatacacacttacacacatatgtgcacacaatgttatgtctcactacatagctctggctggcttggactggctgtgtagaccaggcttagactcaggctcatagagctctgcctcctctctgctaccacgtgcactgccatgattgagaaacaaaacaaacaaatgatttattttctaaaataaagtcctgggggactggagaggagttcagtttccagtgtccaagttagctcaaaactgcctgtaagctgaggcagataaagcttgcatgaccaatgggcctctttccattgatggccaactaggccatcttctgatacatatgcgcgtgtgcgtgcacacacacagacacacaaacacacagagacacacagacacataccctactacacactacacacatgcatacacacacacatacacacacattccttaccatataccacacacatacacagacacacacacaaacacacaccctactacacattacacacatgcatacacgcacacattccattacataccgcatacacacacatgtatacacacagtccaatatacactccacaccacatatatactatacctacatacacatacacacacactacactatatcatactataccatacatacacacacacagcacacacacacacacacacacacacacacacacacacaccacaccatacactcacacacatacatacagaccacatacacacacgcacacacacacacacacacacacacacacacacacacaaacacatgctgaagggttccaggcctgagcagggtaaacaaggcaccagcaagccttgtctttcccctaaacgttagctcacactcctgaagctaaccaccaaggtctattcccttatttggccactttcttatactgcctcattcctgaagctggtcacctcaccaaagcccagcaatcaaaagcgtccacttagctaccttaattaaaatctgcggtcagagcctaccaacccaccccagctcattctaacccagacctcccattttttcctcttaaaattaactcctaccaaccttgtctctttgccctgcttaaggattactccatgttggaaattggtacttgggtgtggtatgtgcctaatctggggcccctcccacacactgttcaggtaccatcacacataatcaaaaataaattataaaagtaaaaaatcatggttaagggagaagatggattttcctgctgatgtcttttgaactatccccacttggtttgtaaactagacacctttagagtcatctaagaggagggaacctcagttgagaaaatgcttccataaaatcagcctgtaggcaaacctttaggccaagttcttgattagtaattgatgtgggagggtgatgctacccctgagctggtgcctggctgagaaagtcatacaggagcaaaccagtaagccatactcctccaagggctctgcttcctggtcctgcattcagactcctgccctgaccaccctggaggtacaagttacaagtgaaataaaccatttctccccagactgggttttgtccttctgttttatcccagcgatagaaactctaactactatagaaattggtacagagtgggggtttgctgtagggagatgatggtggcatttgaatttggggctggaaaagccatggaacactcagagggctgctctgtgggagcctggaacagtagtgcatatgacgacagtcctggcttgtcacgtttcagagggaggcaaaaactgatctgggcatttattcgatgttttgaatgaagattctgtggttccggtcggtggggctgaagaatcagctgtgattaagaagagaccaacatcgctgaggtggaatcttctgatgccctgggattgtttccttgggggcagcatagactgggtcactggtagctgggtagtggtggcacaggcttttaatctcagcactggagaggcagaggcaggtggatttttgtgagtttgaggccagcctggtctacagagcgagttccaggacagccagggttatacagcgaaaccctatcttgaaaaaccaaaaataaataaatacatacataaataagtggagtcgatggacatgatgggaaagatctgtaatcatagaattcaggaagcagtggtagttcaaggccagcctggtttgtatggtgagtttcaggctagcctgggctacatagtgggcccttgcctttaaaaaaagtagccaagtctatcccatttaccttcctcaggtcaaattccttttgtaactatttgtgcgaacgtggtgagctagcaagaggaaagcaaagaaaccccacttttactttctacatacttaaggtgtttcagtagagataaaatagacttaaatgaagataaacccgaagtcttctcattttccactcttttctgcgagcttcgggtgccttatccacagaaagactgctatcccctacggggttgttccactcagtgacttgtgcctacttcttccctgcatacaatataggctttctggtattcggaggtgggactggtgtctggaagccggattgtgggtcgtggcttgcgctaatgcagacttccaagtgggctttcctctctgggctcttcagcttggtggagtctggtgttggcattctctcattctgaatcggttctcaggagtgtgttaagagccccctccccattttttatcaggcttgcccttgatatgtgcggagatttatcttaaccttcgagcttcctgcggcaaagctcccccggggccattcgctagctcacctcctcttcgcctcttcctgttgcttagctgtcagcaggtgggcgcagcctccttcctcacacccactcctcctggaagcggccagcgggtttctgccccacctaccccgctggtcgccgacctgggatactgtcacaagtccgtcattcccctgctcctgttactgtctttcccttgaatgctccctggaaattcctattaaaagcctctaaatcagtgttcttccagaatttttatgggacttcaaattctttctaccaggactctggagatcaccaaatctccccctatctaagaagcctgataggcatctgccctctcaagagtcctcctttggactcatccctctgccttcttgttctttatcagctccgaaaagtctcccaaaaatgcctgcagctctgacctctgacctcccctccgtggttcttttgtagtagctgctgagtcttctctgtcatttaaattaggctctgtctcagtttgccattctcctcctggggtccttgatttctgctttcacaagccccctgggccgttaggattccagtggtcggtacacctggggaagctatatacacttgacccaggttctccggggagcttggcatactctcctgttatctccgctgtcctagtgaatgtcatgtactagctggagccaagagcctgctgtgacgtgtggtttggatataatggagggggaagcggaggggaggagagagagagagagagagagagagagagggagagagagagagagagagagagagaaaacgaagaactcctgtacaaatgacctgtatacaaccactcactaaatgagcgcctgtaatgatttctggaataactccgagcctgcctctgtctacctctgctttctctgagatagctttcttgaggtctcagttaaataggaaacagaacaacacagatggggaaaaaaatgcccggactgctgtggcacctgactttagaaggtgtgcagggccaccaggtctgggtcgtccagtagttcacacaccacagcagtgcggtggctgctgctcctcctggacacagtgacatctatctgccttccatgaccatccctgagttcaagaagacgagagatgaggcatctgtgtaagattctctatgtcagacttagccagggttgagcggagtaaggagaaacaacatggagtcttcagcaaagggctgaaggctaatggagactagcctaagactagaaagaaataaccaacagtagtcacctgaaaacagctgtcaggcccaagtataaggcagaacctggtggcctctaggaaacacaaataccctcgaggagcaaaaggctgccacagaagaccgtggaatagcatggcagaaactagggggagtggggactgcccgaaactcaaagggacagggacgaaataaaatctgcctcgaagggagtaaaacccaagggtgacttagagacaaattgacagggtggtgtggtgcacatacttcacacaccattcaatccacgcagaaggaccagagatgaaacccctcaggagaagcaggagaaatggaaaataggcagggcccgtcattccctggcaccgctgacctggaggcctagagaccccaacaagacaagaatgaggcactagagctttccttgactcactcctgaccgggcatggaaagcttaggtgtggaagagactcaaactacccaccctagaaggtaccaagccagtggccagagtccctcttgagtcttggattcaaagagctgggaggtttccggagaaatgttggctggtttgtttgttttcaatgtgtcaactcctgtccctaaagcaccagaactctggctcatgagggcatctagaataggattggacctgagaacaccttcagctgcccctcgcccagggcagcacctccctcctgcctgcagcttagaatctctagagctggtgattctctttcacagtcgcggtgaccagcaacatatagtcctgatggctcctttcaaaggcccttctattttctttttttataaaaccccggccaccaaagacaacctaatgtcccttttaaagttcaatgttaagcagtctaaagaattgtgccccttttaaaagcccatactgaagccaccattttctttcattgtttgatgacagaattgttttcgttgaagatgtctctgcactgatttgggatttggggatggggatcctgtgtctgcctggtcagcttggggaaacaggaagtggagcagggctagggtggtatactggaacctgaagttactagggctcatgtatctgtgttctgcaacatggatatattatattatattatattatattatattatattatatattatcccctcccctccccttctttcaagaaagaagactccgggagttgtgaggtcaggacccaggatggctcctctcctctgtactggctccaaaggaaagggggctttgttgtctcaaatagggtgagaccagggaaactccccgtaggaattgtcacgggcatacatttatggttcctgggccttttcctttgtttgctcttggtgggaatgttgccttgcggaggctcaggcacgaagcttttctgggatagttgaagcttctccaggactggccaactggagagagaagcagccagcagtgcccaggccacgcctctcccaaggaagggcaggttactaactgggaattctttacagctggcctggaggatgtttttggctgtaaactgtcatggcaccgcaaccctccttgaaaaggctgaggacaactttctcgggacaaagatcagaaattaatcacagaaaagggtagggacagaatagctaagcctcaaaagagtcgcttctagcccggaaaccagggatgtggcactgtggagtggagagattccactgctcacggtagagaaagtaacaccatttatttgcctcctcctctttggagaacagttccagagcaatcttctaccagcttcctgaacgatggcgaaaatccacttttgaccaacaacattcccaggaccggctccgccttcacgccagaggttaaacgcgtcagtgacatatattagtgacccagcctcccttgactttcatgtcctcctccaccgagatttattcctagttccaggaagtctcaggccttagcgtccccgagggtagaaaaggtgaaatctcccttgtatacttctgcaaacccacaacacaaactggctggtgctcattgcaggagggtcggggttgggcgcaaatgagagccttttggtgtctgtagaaagaagtgtcccgctcctctagccagagatttctttatatcctagaccacagaaaagcagccgaacaccccagtattcagtgggaaagggcagaggagggtagtctagggcatcccaccccagaggttggctcctggaaaaccgtctctcccagaagtaggggcaggtagaacccacaactccgaccccaaagacttcccagggagactctcagagagacaacgaactcagaattgagtgcccccacctgattcaggggcctcttccaaggagcttcgggataggataggagagtggaagacggggaaacggaggctggaacccagagtctcgttaaagagctgggcgcgagctctggcttccttcccgcttcctgggctcccgttttagaggaatgttattgtttaaagagaccccattgaactatttcctgctctttgtcaccttcccctcactctcccggcagaggttctcaccgagaggcaataaaccaactgctgcccacaccgcatggcgaggcgggtagggaaacgcgcgcagcatgcgttccaacaatccccggcgcaaagagaccagggactcccggggccacattcggtgcaggcgcatccaccgtcaaagtccagcttttatgtgggacgcgaggacacctcctactagggtcgctatctgttcgtctatttccctctctggacagatccgcattgagcttccctctccacgcaggtgaaggtcgtgggggacctggatgccgaggtgggagttagtggcagtccatggggcgaggggacgtgtcccaaagctgccacacctggggaggctgaggctttggagaggtcaaggagacccgggagacgccgatccgccgaagtccctctcaggtgcgcgcagcgtggacactccgcggggcaaagtcgcaggcgccggtgtgcgcttggacagcgcgtgggagtggagagtttagcagtggctctaggagccagggtcctgggtggctccagcccggcttctcgccctccctcccccagggtccgccccgccgctttgatggaggtgcaaacatttgggggagggcgggggtgtcgggactgcgcccgacgctttccttacaggaagcgcgcgctggagcccattgttggcccccagcctccgggcccgcccggccagtctgatatggccgcgcaccgccaatgggcagctgctcggtacttcaaagggtgtcccgcccaatccgccgcacccccctgcgaggccacctcggctgtatttatggggaggggacccatttttctcttccccagagacttactcttgtcgcgccttgcgggagttcaagtggagccacggctccccaggccctctcccccatccccgcccccttcccccctcatcccgatctcggtgctcctttggcgaatgtgcagggacccaggtgtaatctttgggctccgcagagtgaccctttttcttggaaaagcggtggcgagagaagtgaaggtggctgttgggtagggagtcaagactcctggaaggtggagagggtggcgggaggatgagctcgccgggcacagagagcgcagggaagagcctgcagtaccgagtggaccacctgctcagcgccgtggagagcgagctgcaggcgggcagcgagaagggagaccccaccgaacgcgaactgcgagtgggcctggaggagagcgagctgtggctgcgcttcaaggagctaactaacgagatgattgtgaccaagaacggcaggtaggtgcgtgctgcaagccggcagtctggggcctggcgagtgcccctcgcctcggggagagcatcttttcttcccaaccggccgactttgtttcttcccgctgagttaacagctccccagaggattcctaaaccttggtttctcgggaactttccccctgacgaaacctgaggaggaaggaggcattcgaactctagggttcctaggtgtatactggaatgaccaggtttgcctagggggccgaaacccttggctagatttgtccctctgctgtcccgagaacccgtgggcttagtggggggagatgatttggttcctgaactgagaaagttcaggcaaagatgcttgcgagaccggttgccggggtcctcctctttggccggcatcaaacacttagtgcaggctccccctctccaacggatgggtcctcctgccgtgcgctgtcttttccaggaggatgttcccggtgctgaaggtaaatgtgtcaggcctggaccccaatgccatgtactctttcttgctggacttcgtgacggctgacaaccaccgctggaaatatgtgaacggggagtgggtacctgggggcaaaccagagcctcaggcgcccagctgcgtctacatccacccagactcgcccaattttggggcccactggatgaaggcgcctgtgtctttcagcaaagtcaaactcaccaacaagctcaatggagggggacaggtaagccagtgcagaagacagcctctgggccccaggccgaagggaagagcctggctgggagcttagaaagacaccaccagcctttgtcagccccacagaagccaccgtggcctccttccccaattaaatctttagtactgtttatattaagctgatgagggttaagcagggcctggcaaagggaactgggagttctccctcaccttggaagggttgaagaaggcctgccgcttgggaactggctctggccataggtgagcattggttccgaatcctcagtcactttaaagtcaaaaggggacactggctactctgcacaaatgtgcacattccacccttctgaaaagtctttaattggggcctgtttccaagaaaactcactccaagttgccaccaagccaggcatttaaagttgtttgtggccttatgccggcagggtttaatggtgtatagcgtatctcccatcccagttccagaccatctgtgggaagcagatgtgtaaaatggaccccatgccctccatactgctggcagtttcctgaagactttctgtggctggatccatgtttcttcctgagcagttcctgtggatgctgctgcggtattaaggtaggcctgcacgcaggtctgcattcttgctctgtatctcctgcagatcatgttaaactccttgcataagtatgaacctcggattcacatcgtgagagttgggggcccgcaacgcatgatcaccagccactgctttcccgagacccagttcatagctgtgactgcctaccagaatgaggaggtgaggtttcggaagggagtccccctaccctgcctgtcctgggaactgggagatagaaccacagtactgaagacaggcaagatttagttcccatttaccacttctgtggctaagaggaaaaaactttaaaatactcattcgagcatgttgctaatctcaacagagcacacgtctatgaaagaagcataaaccacaacttcacggttttaagatctggagaggagaggggacagctcttgatctcagcaacgggaaagtcctggcaaaggctgtcaagggttcttacttctaaccctaaatcatagaaaatgtgtcatcagtcccctggggctgccgctgttgaccttaactccacagcaattccaggctatgttgggactgtcatgatatctagccttgatagcaattatgttaaattggagtttcacttagaaattgcttctctttgtaatttctcatccctttcagacacagatagaaaaacaaagaccaattcattctaacttggctgttttcttttgttttttttttttttttttctttctcagtttccttttctcttctttggtagtgtccccccactcccatttgatgcttgctatgtaacccaagatgttcttcagttcacagtccccttacctcagcatcgtaggatgcttctccacccccccccatcaaatactccggtaattagcattgtattgttagtaaatacactttctcttttttcagattacagcccttaaaattaaatacaacccatttgctaaagccttccttgatgccaaagaaaggtgagagttctaaccttgctcctggggcaaaggaccgtgtggagagaaggctggttgctcacctcctctgggcaggcctccttttgaccatcctgaatactttttggcagaaacgaccacaaagatgtaatggaggaaccgggggactgccagcagccggggtattcccaatgtacggtttgttgcacccccatattcctctgccttgtttcaggcctagacttgctaaaaccagaacccatagggaggtttgggtttctgggaatagtgggggtggcaggatggctctgctttgtgccctgggcaaagcgtgccctttgctttggaagctgcctaaccatcttgggctttggacactggcaggcaaaagaacttttgatttgtttgtttttctgcagcagccagggtggagtggactcctgggagtttagacttgggtatggtgagggttcggctatccccctcccccacctttgagatggcttccacttgttagtggctgaaaactgaatggctatctttggatacacctatgagcggccttcctgctcagttcctgtgcctcctgattttggtggcttttatggtggctagttctttaaaaatatctctttaggaggtctcctaggcagtgatgggtagaggtctgttcaggcacatggagagaaaaggcctggtctcgtccctttttccaaggagggattttcaagtattgaagttgttgctgaggggtagaagggtcttgcaggccatttcagtggctgccagaccagcctagcactctgtccctaaacaatgatcaggtattttaataccatcttctaaacaaatttaacaaatgaatttaacgaacagttcccctattgtggctcatcgggtagtcacctgaccaggaagaaatggacggtgtatggggccagtgtggacacatgtgtgctcctcaagtattgtctcaagtattgtatcgggtagtcacctgaccaggaagaaatgggcggtgtatggggccagtgtggacacatgtgtgctcctcaagtattgcctgaagaactgtttcttaaagtagagagcaaaattagcttcagtggatagatctgtcttggaggtgtagtggaaagaatgtgggagagtcaaaacagaagggagcagataggaaatggacccattagctattcttgaggcaggagcatgactactggcctcagtagctggggagtgggaagctgtctggagcagtctgagtcctacctgtggcccactgggtgcctctccctttattctagagcccattaacatatcactcctgctcacttggtagaaagccaccggtctgcagaaccgaaatttcacaaaggttaggagaggtcttaggtctaatcctgtaagacagggctatgggcggagctcaggcctcttgagcgctggcatcccgggtgccacagggacactttgaaacttggctgcactgagggagggatactggttattcttcagttccagagtccctgggttagagctaggacaggactgagtctcaagcaagggccagttacccagcatgcttttctcacagcaggggggtggcttgttcctggtgctggcaccctctgcccgcctgccagctcccaccctcagtttggaggctcgctctctctcccctccacacacggctgtgagaggtacccagctctaaggaaccaccggtcatcgccctaccccagcccctatgctcatcggaacagctctccaagtaggtcctgtacatccatttaccagctgggggaggggtgccggggtggggcggatccctccggagaggcatttctataggggtgcaagatagggaacccagctccttgtggctcctggagagacttggtcaagatgctggttgaaccaggggtccccaaggaggctttcatttcaatatccatgtgcctcagaacatgccccgggcttttcaaaagacagctgtctgggcctttccaaggagccaaagcttgagccccagaatggagccgtggtttgatgaacatcaaggttccatgaacctctctaaagtgacccgatttgactagccaggtacaaacgttcctgaccagatcaaagactctccaggtgtagaactcaagcccttagtgtgggtgtcaccggagaaccaggcacattttaggtccaccctggacccagaagatggacctaggcgcaggacagacctctggcagattctttaacacttgtctgtttagaccaacctttgtctgctccaaagggaggggaaaatggctaaagaacaccataaaacaattaagcaattacaactgattcaaaatgaaaggccacagtcttggagactcctccatcagaggctgggctctgaggcgggggagatcatatttttaatttggtgaggacatggttgccatagcctctccgagccttgcggaatcgccattatggaaaaggtgagctaacgtggcagatatttttttatttgcttttaaaattaagcattccaggctagggtgtcactcagtggatcagcacttgcctagcgtttgagaggctctgagtcagatccctaatgctacaaaaataataaataaatagcataaaaataaagatcaataccactgtctgaaggacatctccttgtgggatgataagagacaccttaggttaagtgggatatattttctaataattgacactgacaataaatattgctgtgctgatgagctaaagcaggctaggggcttgctctccacatctacccaggtagctcttgtttgcagtgttgggttcagttggtatcattttattctgtttgaaagacctgtcaggtaacttcccctctctgcatccctcagcctatgcggacaattcatctgcttgtctgtccatgctgcagtcccatgataactggtctagcctcggagtgcctggccacaccagcatgctgcctgtgagtcataacgccagcccacctactggctctaggtatgtatgtctgtatgtaaaaagcagctcaggcctcagtctgtgtgtgtctctcaggctgatgggtttgacatgggtagtttaaagaaacagtgtagaccctttagtcactggaggcaacacattggctttttctgtggacaaagaaatagaaagtccttagtgcctccagtgctgagaaccagtgaaggatgaagactgtggactgtcccgcaggctatagacgaggctgctggggatacgttcccttcaggcttgttaaccctccagggtactgaaacaacagtgaagaactgcaaagctagatgccaatactccatctccagtgaggaaagggacctgaagatactgattctgggtcagtgtgatgatgaactgtctgttctcagaggagtgagcctgccatcatacaaccttgaccccaaatgtctaaaccagtggtcctcaaccttcccagtgctatgaccctttaatacagttcctcatgttgtggtgactcccaaccatagagttattttgttgccacttcataacttatttttctgttatgaagcatagtataaatatctgatatgcaggatatctgataaaggggttgcaatccacagattgagcagtagtggtctagaaaattaaacatttagctaaggccctagctgttttggctttggagctagctcttcactaataagaatttagttgtctcgtgtttctttgtttggttggctttgtttggtttttgacataggtctcaggctggctttgaactcactacacagtccagagctcaaggtcttgattctcctgcctcagcctctttagttgttggggttattggtaggtattactaattccactttaacctgctcttaaggcaaacacacagatgacaaacttctcaatggccctgaggactttgcttaaggacccaagtgatcggcaggcagccaagtgctgatcactcgttccaatttggtgtcttagtctgaaacagtaatctgccttgatttacccaggcttgctctagagtccgaatgcctttgtagatgccagagggtttagcactcatttcagcatcctcgttttatatcctgaaaaacagtcatggggcaaggtcaagacgcagaactggtcttcagcccagctctggggtccctggcgtattgccccatgctgacacgctaatcccctgtctactggacaagcctgtgacagcaatgatggctttctaaagaatatgcattctgtgaatgcggggattgtggggtggggttgggaacacattgccctgagccttggtgctcagtgctaatcctgtatgccaatgagcacagagctacttgtcagagtcctctttaggaggactcggcacactaaacagtcactgtgcttatgggcaccttattggttttgtttgatgcagtccatccctgtggtcatagtgaaaaaaaaatagtctgcaaagccctgtgatgcaattaagtactgattcctcccccacatctcatcatagctcatttgcaggcccctgatgtctgttttctctatttcagccagtatcccagtctctggtctgtgagcaatggtaccatcaccccaggctcccagacagctggggtgtccaacgggctgggagctcagttctttcgaggctcccctgcacattacacaccactgacgcacacggtctcagctgccacgtcctcgtcttctggttctccgatgtatgaaggggctgctacagtcacagacatttctgacagccagtatgacacggcccaaagcctcctcatagcctcgtggacacctgtgtcacccccatctatgtgaattgaactttcctccatgtgctgagacttgtaacaaccggtgtcaactggatcttctaggctcaaagtggcaggctcttgggacaagggaaaaataaataaataaaagctagatactaacaactccattttcaaataagagcaataatacatgtcctataatcatgttctacagcctcttgtttgatacctacagtagtgatatgtgtcctacattatgaagccaaggacagagagacggctgtggtccagttttttgtgactggcagttaatcagagtcctttgctaggtagggtcctatatcttgtgtttctctacaacatatatgtgactttgaaatcctggaattcgtccaccccctgtcctactttagtgagacacaaggtacacctctaatgtcctcccttgttgccttagagtagttaactttgaggacagaaaaaagcatagccagaagattgtaactgaaccgtcaactgttctgcccttggaacatgcctactttaagcacacgtagctttttgtgttgggaagtcaactgtatggatacttttctgttgacaaagtagccaaagacaatctgcagaaagtgttttctgcacaataaaggcaatatatagcacctgg

SEQ ID NO: 32 - DNA, 24430 bp, Homo sapiens
  source 1..24430: mol_type = genomic DNA
ggggaagcttcgcaggcgtgcacggagcagtgagatcactggcgttataaatatcccggtgccagcgcggagatccgctcgggtggcctctctcttcccctctccccttctcttccccgaggctatgtccacccggtgcggcgaggcgggcagagccagaggcacgcagccgcacaggggctacagagcccagaatcagccctacaagatgcacttaggacccccgcggctggaagaatgagcttgtccttcctcctcctcctcttcttcagccacctgatcctcagcgcctgggctcacggggagaagcgtctcgcccccaaagggcaacccggacccgctgccactgataggaaccctagaggctccagcagcagacagagcagcagtagcgctatgtcttcctcttctgcctcctcctcccccgcagcttctctgggcagccaaggaagtggcttggagcagagcagtttccagtggagcccctcggggcgccggaccggcagcctctactgcagagtgggcatcggtttccatctgcagatctacccggatggcaaagtcaatggatcccacgaagccaatatgttaagtaagttactcgctctcctacaaaacccgtcctaggcggccgcggaagattcgggagggacagcaggtattcgccgggacacaggctcaccttcctgagcccaggccactgggaccaagctgatactcagaaacagccgggcgggttgggtggagatgcatctatatggcgtgcgcacacgcacccctctcctgggcatgaggaattgcgatttctcaggtgtatgttacctagaggctggtgcccagacgggtaccttgttttcagtttgctctagcctcaaagacgagtccccagccatgacaggagagaacaaaaaactcatttcttctcactcaatttgtttaccttctgcttatgaactagcctggcatttttcattaggcatcaaaggcagcccttctccctatccataactgaagttattttttgaaaagaagaatcaaatcccaaatacttccctcttccatccgctaccataaacctcaaattaatattgtatatgtatatgtatatatgtatataagtctatgtatacaatgtatacacataggtagatagatagatagatagatagatacacagatagatagacagacagatagataactaggggacaccagacagacattcctgcttggaagaagattgtgctctagaaaactggacgcgtttagagagggagacatgataaacattgaaattactaactccagagttggatttaacaatgtttagtatcttgagaccatgactacaccgtattaggagagtggccagcctttggtccccaagaacagttaggggaaagttccttattttagaagaaacgcagaggttaaatttggtaggggtgcagattttgtaggactttttataaacaaagttttaaattttccctctgagttttttctttcagcacgctctcttttttcctttctcatctcctcttcccttccaccccatctatgtttccagaccatcgcagccactcctctggtttctcttcactgcctctaggcagctgggggcagggacggtttggggctgtgagtaggagtggggagatctctgtggggcttttgctcagtagggccagatcgctcttccagcgcgggttggtccaccaggcagagccccagccagggcctgtcaggtacccagggagaccggaaatgtagccaggagacagcagcgctcacagtcacctggtttcagtgtcagcctggttgctcctagatgttcctaacttgctccatctcagaccaaagactccacgggccattgggctccttcttacacaggctccagaggagcgtggacaccaccggcggtctgaagatttggcagccagcagtctccagaggggggtcggaggcgcgcaagtgggtaaggcggtaggctggctagcctcctccggtgggttaagggggcctaatgcggaagacctgatggttcatgctgagagaaaagcaggtctatgcccgcccctctgcgcctgtctagtctatctgatcgcgctgattcagcagcctgcggcgcacgtggtgagggcgcctggagcgcccagctggagagagggccctccgcacacgcaccagcgagtcccagggcctccctcacactcccgagaggaatctatttccatattttagagtttatttcactcatcgaataactgctcatttgggggataaagggcaagatctgttggggtgaaatggaattttctgagatttgaggaataatcagtaacatctatttatttccattcgtccttctcattttgtctcaacggtcttttgactccatcagccatcacagcttattcccacttccggcaacctttccttctctcttacaagaaaactttctttcttctgttcttcttgtaacgacccgtggagtcattggtctgagatggagcaagttaggaacatctaggagcaaccaggctgacactgaaagacaggtgactgtgcgcgctgctgtctcctggctatgtttccactctccctgggtacatgacagagcaccaacagaggataacttccgtgagctcaagggcggaccccaaactagcaggcagcaagcagcaggttggagcccagggagctcagagaatgcttctggggagggtttaggtgtgctagagatctcagaaagcaaggctcattcccaggatattcaccatcttctctacgaagacactatatgagacgaaggtagttttacagcttaggccttgctagagggggtgttgtagaaaagcaaaggggggaaaataagagcagatcaaaaagagtgcacccagataaacaagacattgaccactacccagtatgtaacatgtacattttcttttaaaatccatgttgaaagatatctacaagagaacagggatgtttcctaaaacagtgccgacaaaaagcttaatttaaactttttcctaatttattcttgtttacaataacctttcagagtttagtttctgtgtctttcacatgacttgctttcattcatgccataaatcatgtacccaatataagatacctatctcactaagcatgatattttggttacttttgtgttgtttgtcttccatagagtttttttttttttccccagaagaaagcatagcaaatattcaaatcatagtaattttctgctttgtgatatctggagtgtctaatactacttcataaaatttttactacctttgatcaatgcagaatttgcatgtaatttgggaatttaacatggatctctgccattacctagctgtaaaagagaaacagaaacttgctaattacaattggtcatttacctctttgaaggcagtagttgatgtttcctgacattcgtgtaaactaaggtgttggccatggcctttcttagagtatgtgaggaaatgtgtttaaatctcctaagagaggctgagagggctggatcaagggccacagaggatacctcagtttgatctcatcttctatttctactgtatgtgagttagtgatgatagaaaacctattctttttgttacaaccctgatacttcagaaaagtcaaagctttgccatgaaactgcattctaacaagttattttaaacctaataatattctgtagtatttgtctgatagaacagataatcatatgtgtttcgcaaactattatttgacagtaaactttttttttttttttgcaaattgcaaatgttttctggtttcaccatgagaagtgcaccatggccatggactttcaaacataatttgtttagtttacatggaccaattaatatactcttagcttctcttacacaataattatcccaagttttgaacacagaaaatgaaatcaagctcattgtatataaatccttattatgaggaaatactgtggaaaaatgaagaaatatgaacaaggcaagatagatgacccaactattgcatggaaacaaatggtttggtttaatttatacgccttcaagtttaatgtcaatacagtgcttctgttgacttaccttgggccattgaagaataggcaatcaagtagttgtcagtttagggaagaaaagtttaaggctttgtcaaagcgtttacataaaatatgaaaattccaagcacatattttggttaatagaatcgtcgatgttactgctttttaaaaaaatctaaattcactaccaattttggggtcatgtggagtcattagacagtcccccaagcctagataaatcagaatctatatctactatgcagaaaaatcaagtggaaaatttctgttgctaatttaatcagtgaagactgctaaactgaatatttcaagattcagatttcataacttggcacagcatatctgttactttgtggatgcaagtagagaaacttcagttttaaaatatttttgtctggggattttcagatgcgttgttgaaagcttctgaatacatggaatatctgtgcttttctatattttattcattaacaaaagagagaaaaaggaaaaatgtgtatagttgtatcaaccactatcagtagagccctattatattaagaaatctgcagaggactaagtcaaaaatctagaaatatgtttttttttacggaagtaagcttacatcataatgcataagtggaatagactgtgtgtataagctgagagacaccaagacattcttgccttcttcagcctaggtgtcaatgctgaaattccacaaagagaataattccttctgttaagcattctcctcttcttttgaccctcttaaatgggaacaccttaagaaaaataacacactgtctgtagcactttaatgtgaatttatttacactgagccacccgtccaccccgtgccttctcaagcaggagaaggccacagtagcaggagagtactaagacacctgtccatacttgtgtatgcatggggtgtcctgacaagagaaaagagaggtagtgagaggatcaaagaaggcagtcaaatttagcaaacagtcattgactatataccatctacaagacaagcttggccttccacagtttggcttagaaatactgccttggcatccataaggagaattgtaagtttccatcaaatttaatatgcgtgactcccgatgataaaggtcagaaaattactgaaattaaaaaaaatcaatgtcagagaaatgttttcagaaatttatatatttgtgatttaaggcacatgggtttaaaaaattacgtagaattcctgaatgagttactgagatttgtcatagcaaaatcaataggcctgtgatgttttggggaggagggcaggaaactgaactgtgagactcattgaatctgctccagaaaacaaggcattgtgaaatcactgctgacattactttggaaattatgatcataacagtgttcttaatattaggtcataattacggtaagatttagaagatcaataccaaagttactcacgtgaaaaataattcattcatctagtctcatctcttacatctcctgcattctttataatgttaaatagaatgacatatgtaaagtgtatttttaagctttcagttaaagataattttcttaaggttataaaatcttttaattctcaggcactatatcatttttatcctggaagttttaagaagaaacccagcaatatgtaatacaataataacactttcacatatattatttcatcttccccatatttaaaatacattacatgcaacttgtacataatatatacacagagtgtacactgtattgaaatacatgttaaatgcatctaaatgggtctttgtttaaagagagaatgagctaattatcagaaactatttatttaagcaaagcagtagtatttctattaaaacaaatatttataaagcctttttatctcaacatcttaaaagttagcatataaacacatacacttatgagactttaatcttttattctgccatgtattttttcattaatatacaatatatctgcatgttcaaaaccagataattttccagggaatggaattaaaagcctctaacaatctagcaccatgagtaaattggaggaaatatacaatcaaatctctcctgtatcaactccatgttgtcccttttgtatccatcattccacacatatacaatttccttctttctttctttctcatttttgaatgcacatgtttacataaatattcacaatcacatcccccatctcccaaatatctaaaatcattaatgctattcccaatatcattccgtatttccaatagaaatttaactttgtatcactgttatagtcatgctttagtaataatattattataacatattacatctgtgtagagtaactttacaaagcatttggtgtgttttgttaatatttgataaaatgataatgcttctaaacctttagaagcacactcaaacaatgttcataataaatcctattataaatagcatttaaaaacattttgaaggaaaggatttatacagcactggtggttttttttttcagtttccttctaaaagcaaaagtagtttccaatagtttttgatttttgtttttcaatttaaagaaacacctattagtgaactggtacctgcagtttccctaaagtgtgttttatttactttgggctaaaaacatctattttttaaataagctgttcagttatcccctttttcacataaactttctaatcaagttttttaagaaaccaagttgaataaataaacagcagtgcttgctagaattatagatgttagctcacattgcacaaaataaatgctcaataaagttactcacatatatttataaaatatttcttgtttttggtaaacagaataattttatatatacctcaaatactgcagggagagtttgctatttcaagaaaatctgatgaatttctctatttggcagagtcctattgagatatcctaattagtatatatgcttagaatattatagatggaaatattgagatgttcttttttccatccctttccttctttgtttccttcttttcttccttccttcttttcctttttaaaagtagagatgcggtgtcactattttgaccaggatggtcttgaactcctggtatcaggcgatccttcagcctcagccttccaaagtgctggaattacaggcgtgagctactgcacctggcttccctttttcctttctaagacaggtccctttttagctctattgagctaaaaatctctttttaaaaattttgaaatagacaactaataaaacacattatagctctattgagctaaaagtctctttttaaaaattttgaaatagacaactaataaaacacattatgctcttttcatgttcatataaaatacataaatttatgttaaataagcaggctttctaattaagtgcagactatgtgttttatcttattaaactactctatgaacagtggtgtgtaattctcttgatccagtggacgtgaattttgaaattactgtaggagacagagggacattgacttcataatgctaactataaaatacaaaatttatacaacaatgtaataaattatttcattaatttttttctaggaaatgattcaaaatgcaagatgtctcaaagcataatccattaaacatttcattgaaccaataatttcaagttatttataatgctttcagtatcttatatgtagtctttaaatgcagtcactaaaagactgagtatggtatatgtttatttgtaactaccattataaccttgataattagagtagaggaatttatttaatgtaaataagtattattttccagactttcaaatagttatactagtcttgagcacagatttgtgctttaatgttcaaagtagtgtattatctttgatgaagaaacaatggaggagaattattttgaaaaacattttttaaatgtctttttaatttctttaaaacctgagaaaacttcatgctcattgtttactaaaagcaacttatttgtccaaataattactgatgaagtagaatcaaatttttgaatcttgaaattattttaaatgaacacttgaatcctagccttctttgtttttaacatagtgaatgtcatgaacaataaggatgttaaatactaagttcttttttaaaatcacaataataaagaatggaaagaatctatgtagaaatttaattcttcacaatgatataaataagagcctgtgttttattttgggatttctgtcatcctaggtgttttggaaatatttgctgtgtctcaggggattgtaggaatacgaggagttttcagcaacaaatttttagcgatgtcaaaaaaaggaaaactccatgcaagtgtaagtagaaccactttatatttgttaaaggtgctataaagattttacatttgtaaaacagaataattttccaaattcataggtaagaaaatttgcccaaagaacttaacttttaaaaagtatttttacatttaaccaagataattttgtgcgcttccagaagtaataatttaaatatttaatttacttaaaagatattacagagtctacaaaaagtttaagcataaatgtatttgaaaacagcattctcaaaggggcagccatccacttatttcttagaagtggcccacgtaagaaggaatatggcaataatatatttcatcacattttaaacttacaagtttatagtgactgtatttgtgctaagtagatgaggttcttatttaagtttacaggctactcataataccaaattgggtctcagtaatgtaaaatattttcatattaacaagcagggagggaaaaaaccaataattagaagactctgactttcatagacaaattttatttaattaatttgaagaatttttatcttgtatttttgtcacatcaaaaataaagacttcttaatactatgaaaactaattttgcattctcaaaaatttattcagaccagttttatatattgtaatcaattcacaaactatttatttgctttgttatgaaagttcccattacctgggaagtattaaaacattttaaagataataaaatatgttcagcttagttttcccactcacagattctatttatttgcattagtatatacacgctgcacttaaaggtgctttatgctttttctctggcatacttattttcttcacattaaaacattttgaaagcaattattctttaaagttagtcctttaatcctgattctttatagtctttattaaataaattattggaatatcactttttcagttttcaaagttatagaaagtttcaattgatagcaataattgaaacttactatatataatttgatttgatagatctttaaaaaattcaatgagaacgccacttggtttaatgtgtaagacttttataattttacttttcttaacatctaaagtgatttgttaatatcttttggaagagacagaatttgaacaatttctatagttatttgaggattcgatgagataatacatgcagtgtgctaagaatactatttggtgtgttataagtgctcaataaatattgcctattattatagggttaacaatctaaatataatctaaatataataaattactaaaatttcagtttactaacataaatggaaatcctttgttaaacacttaaatcactcattgcaagaactattaaacaatttaccatttcattttttgagctggttactatactctagcaagatgtagtataatattcatagaaatatatttttctaattttttcatttgtttaagggacaacattctgcatcactgtgaaaaaagtagggtattacttttttaaatttattttttatttcaataggtttttaaggagcaggtggtatttggttacatgaaaaagttctttagtggtgatttctgagatttaggtgcacctatcaccccagtagtgtacaccgtacccaatgtgttgtcttttacccccagccccctcccctttccccctgagttcccaaagtccaatgtatcattctcagggcatttaattttattttaaaatattagttaaaatccacatacagatgagttctcacgagggctggaaaaaaaagtaaaaaaaaaaaaaatccacatacagaattgaaaacaatgattaaacacatctaaacggaataacttttcctcagtctactttaagtttataaaagattaaaacacctttaaaatctaacctcataatagtacacagtgcatacaaagaaactttctcttactggtttgttttgagtgaaaatcttaactttcaaaatattctgatttatgccatagtacatgcaaaaaaaatagactaaacttggaacagcttaaggataattgccacagaaagtaacatattacaaatggaagccaattagaaaggtcaaactgagaggttaagatacatgattcctctgtcaaaggcaagtaacaaatttctagaaatttgacccaaatgtctaaggatggctggttgaaataatgcagataatgcaaaaacagcatctgttattctttctcatcttggcaggctaaagttatttcatagaataatgacttttaaacagtacaaagcaagtcttgctcttgtcactcactgaagctctttgatataaaagtcattctgatgactttgagctaaattgtagataaaaatattaagcctatgattatgtggattctttttaaaccaattatccaagcccactttctcttatctgagcatttattagcacttttcctctaggtgtaaacctaattaaattataaagtgatttattttttaaagatgttgaatttagaaatagtattaatgctagcaattaccagttttatgcccagttggtttctttcctgttttcacattctagttaaacatgctgggaaattgtttttgtaactctaaatatgactatttgatttagttaatagttttgatttttacgactttacatcatccccaaaaaaggttaaaaactcatagacttttaggattaaacttgtaatttgtgagttgctttaaactaaaaattttgcggaggcatttaaagggtacttttagggttctatctacaaagcaaatgtaaactaaaaatataaaatattaatagaattctgggaaaagtaatcccccactgtactgagaaatattcatggatacttgtaaatattcaactcagtttttgtaataataatcagagtactaaaaattagctactaggcagagataatgtactttcatagttctttaaaagcccttttgctcacattatctcattagataatgaggtgacgaaagagtctcatagatgttaaattattttcccaaggttacacagttaacaagtgattgaaccagaactatatcctcctagaattttctctttctttttaaatgctatagtgcttggtagataaaagttagcttcaaagaagatattaaattttgtttggaatcaattacattgttttcacctcttagtgtatagaaattaatatgtgcgtgaaaatatttttgtattacatatacaaatgaatactgtggcacatcattagaatatttatagcactctatttaataggcaaataaacaggcaatttaagacttatagttaaaattgtaaatttccccattctaggtacctctttttctctttgattcatatcaccttttttgaactggtgtttcccccatctactcctgggtctccagtactttactttagaatctagagaagaggggatgtgtctgccacagaattttacaaatgttggttattcattgtcaatgatgagttgcatagggaactcctgcctcccgagataaactttcaaaacagaaaagagatctgttttgctcacagaaaacttcatttagtaaatattttactgccatagacacaaatatggcagactgaaagggtaggccagagcagattcaggcagcattgatgctgattccatttttgtgctaaatttattaatcccatcagataagttttatttgagcttcagccatctaaatgtgggctccctggactcattcaagcccctgatctacaggcagctctccttcaaacttttattggtatactctaaatatgcagtgcaaccaaattcttgtcgtgcaggtttttcagcattctttacaaggatgaggatgtatggtcttctctttgtccaaatgtatcaagaatcatcaagagcaggaggagataattactttccaaagagccatgagggctactccaagccacagctgtggcctgtactctctttctcaacacattcccatgctaagataccttctgagactgagcactctttctccctttatctgtctgtctgtccctgctccctcctgaggttggcatccttactgaaagtcccctagagagcctttctggatttatctgaggtgggtccagactaggagtgaaaggccttgagtgtgatggtaaagacacagttagattgccccaggctgaatcctactctaccacttcctaactgtgtcattttacttcatctttctattccttggttttatcaactacaaaagaaggaaaattaaagtcacaatctattgggatagttaagtgttttaaacaagataatacacataaaacacttagagtactgcctgaaaagtgttccacacttaatgtttaaacagattttcctgaatttgctctcaggcagctgtttgacaatccttaatctttttctttctgattttggggtcaggcaactgtgacccttaaattattcaggccagccccaactcctatttatcactgaccttttcttcctcacgtccaaactttgtgtgcttataggtgtcccttatctactaagttttcctttcaccaaggaacctaatttcaaagcaaaatttccaagctcaacctcttaaagaggcatggatttcctatggttataatcttgtgacttttttcatagctctgttgtccatcttgatttttccctaaatatataaatcttggaaaaggtggttatcatgtattcttcagtcttttcataaagtatgcagaaagctcattgctaattagggaaaaacatgttaccttattttaaagatccagagagaagcatgtggtggaattatttttgtttctcagggttttaggggatcatgtttgaaaggaaagctaattgcagactttatgaaacaggcatggaatgtgtgcttgatcagtcctaagcaaggaatagatcatcctcctttcctggtttcagagggtgccagctggcttgcctgggatgagactccagaatggacttcctgcgctgcaggcagagtgaagaggagtcagcagcccctaaagctgaacatatttactgaaaggggaaatggaggcttgagtaatacttatcatcctcatcaaaaaataacttactaagcactccactctgccagtcaagaccatgcatgagctagatcaaggcatttgaaaagaatatttttttgccctctaagagctttcaatatacagtaaaatggaatgtctagctattcaggcacaaaaatgggtttaaactctgccttcgcagtaaatgccagtttcccctcagttttgcactgtggaggtctagttaaaagacctattttattgaggaaatctggatgtgattgccttgtagattcagaaatccattttagcagaaagtgagacatggtaatatatttctttgatgatttgaagagtgacacttgtcattcatcaatattttaacaggaaacaacttcagagcaagtaagattgtatgagcaaagactaggcaatagctttggtttgtatagtgttatggaaagacccttagtctaggaatcagaagatgcaatttaaatcacaggtctattctggcacttaataaatgcagggtgatagatggatcattttctttacttctctggctgaaaaaaatcagataatactatcctaatagcagccatggaattactgtgagttaaattatatatgtaaaccacctgacacagagtagtctccaatagtccagctatatggagttattaagggcctcagaaagaaagtcatgctataccatgttttgcctggtgtggtccttacttcaagggtatcaaaaccacatgggatgctggttaatgatacatcaagtccagggtctcacctcagacttagaaaaacacagtccctggagatagggcttgaggagctgcatttgagcctgctctctgagtaatttgaaggcaaattatgtaagtgaagaaaagagatcctgtagttgatattctttactgcattatctcaggttgggtgatattaaagccaacttgtgtattttgttggttgctcagtatgaagaactgagatatagaaggaacgaatgtccagtaccaagcaggagatatggccgtgcctgggagatagcatggcaaggctacaactgacccatacacagcttatatagtaaagagtaagaagtagccctctgggtgcttgctatcctgtaccagggcacaagtataaaaaacgaactgagtttagggtacctgtcccaggcagctccattggtggagggaagggatgggaaccaagcaggtctaaaaggagggaggggaattagaagtgatgcatgtgacaaggaaacttagtttagagcaaaatttggtctatagttgtttttattacagtctatgataacctttttgttatttaataatattagtctataacaacattttgattatttatatttggctttttttcccttaactttataaggtttttcaggagaaaggggcaaatcaaagaaaacaagctgaaataaatcattaaaattgattaagtacacacaaattccaaggtttatactggtgtctgttcaaattcactcctatttctatatctcatatcctacatatttagttctgtagttgcacgcaagagtcggtatttgcacagctttaattcatactatacaaggtactcaatcatcatagatggtgatatttactaaggaacaaaaccacaagaagggattttagagagatttttttaaacaatatcattttggaaataatttatttggtttaattgacctgtttaattttggcttggcagaattagtcatttctggaatattgtagttaatcggagttgtgctttctttgaattcaatttgaccgttcaaaaaatatctgttgtttaaaattgatccttcactgtgagaaggggtgaggagagccacagtttacttctagtgaaaaagttctttttttttttgagatagagttttgctcttgttgcccaggctagagtgcaatggtaggatcccagctcactgcaacctccgccccctgggttcaagcgattctcctgcctcagtctcctgagtagttgagattacaggcgcgcacaaccacacctggctgattttgtatttttagtacagacagggtttcaccatgttggtcaggctggtctcgaactcctgacctcaaaagatccacccgccttggcctcccaaagtgctgtgattacagatgtgagccaccgtacccagcagaaagttcttatttctcttaatagtagtgtgtttcctctccttgtaataatctggatattcaagaaaaaatagttcgatttgtttaaagttcttttttttttgtcaattaggagtatatactaaagtacaaaaaacgctgattttaaacatttcattttaattttgcaattatggtttgttgaatgtaacctgttattattcttgccagatcaaggagaaattaaagagattttaatgtaatttaagtcaacaaaaacatgggcaggaccatgttaatactgttttccactgtaaaagtggcacctagcacagtgcctggcatgtgatatctgtggaataaattagtgaaaaatgaatatgaaactttttaaacaaatatttaaacaattgctttcattgtagtggctgatggtggtaaggcaattagatgaaggagtcttgatttcagcaacttatctgaaatttgattcatctctctacttcatactctttaactatagaaaaagtctgttaatttcaggggttttttttctagaaaaataatggagttctatcattttaaaagtgtatattttattagaagacttataatttaaaaaaaagatttaaaaaataaaaatcagcctggaaaatttattgtccaaaattttctaatggtaaatgtatgtattttagtacctctagctaagacctatgactctttgctataaagatggtccatgcacaacattatgtatagagatatactgcttagggtcaccatcttgtctgagccagaccgggaatactaacaggaatagtcaatccttcaagatgagtaaattcactgaaatgtttgtttcaaatgattctgtgttccatcacagctggaataatttttcagacaaaacattaaattaaaagttaattaagaaagccaaaacagtctaactgcgtttactcccgtattaatgtagaatgtaggatttggatggctgaggggctgtgtgtactgtgtagatccttagaactctacacacttctaccctgggtaacagttaggtgacctttgaaaaatctgaagtccaaatagccatctccataaagggctcctcttaagaaagaactttagaatatgaatctcgaggaaaagaggaggaaaagagaaagattttagatgaaacaattgtagggggtggggcaggtgggtttcactcatatgaaagatcctaaaatggaaatgatatagattcctgttttaaaaaaagaaatgctgtggtgtgtgtctgcacatgcacctgtgcatgagtgtgtgtgtgcctgtcatctacattagttaaaaatgacatgttctttctttattttcttgggcactgttgggggaaaatattaaataatgtagtacattgtaaaaacctaactctgtcaaaattgagtaaagcaatcaccgctgtttttgtgaaacagagctggaagtcagatcaaggcataatgtattacacattttcaaaaatgtcattcaactgcattttaagaaaaaaaaaacccgagacaagataaatatacctgatactctttttaatgaaatgtttcacacctttgtaaaattcttgtgatctgtttatagagccagaaacattctagatgtctatagcttttattttgaaataaaatgttgggattatctaattaaatgggaaaaccattttaagagctaagcagctgtagacaaatctacaatgaatttgtaagcaagtctttctaataaaaaataggaatagtcaatgtgtggtcttcgaaagtgatgtcagcatagcagtccgggcctaaatgcaggctggcaaggtgtatcgtagacagggtgaaagggatgccatacataggtggtgattgtttataatacctgccttcggccgggtgcggtggctcacacctgaatcccagcactttgggaggccgaggcaggcagattatctgaggtcaggaattcgagacaagcctggccaatatggtgaaaccccgtctctactaaaaatacaaaaattagctgggcatggtggcacacacctgtaatcccagctactcaggaggctgaagcaggagaattgcttgagcctgggagatggaggttgcagtgagccaagataatgccactgcactccagcctggccaacagagcaagaacctgtctcaaaaacaacaacaataacaaaacaacaacaacaacaacaacaaagaaacaaacaaaaaatacttgccttcagcctgctcgagatcatatccagagattcaccagtagacttgtggaagatctacatatatggcttcataacctgccaatggaactttgttgattgaactacacttaaatataagtaactccagtaaactattgtacataaagtgaatgtgctgttggaaatgctctgatattggttggcttctactactgtcagtaacctgcactgctcagaaactccatgtggacttcaacagtggatctatgtagattgccttgcaatattcagatttttagatttctgtgttatgatcagtatttcaaagaaaagtttggcattattagaaaaaacaaggaaaaaaaggccattttattcccgtataaaacttcttggtttgatatagaagtatgtagcttttagtgtttttatatataggggacaaaatatttggtattctcaaacacgggaattctgtgtaaatagtactccttgaaattatgaaacctggtagtcttaactagtacaggaattcttaattctttgggggttatgggctctttcaagtttgatgaaagctacagaatcctcctttggattctcataacagccctattgttgtaagtgttatggataaggaggctaaggctaagagcttaattggcagaactggtttttgattgcatgtctgactccaagttcacactcttcccccattctcccacatattccttcaaattttactacatggcaaactaagctctttcagagctggtgctgacctacattgtctggctcatctccttacttcccacatgcatcctaggtagaggtcacgctgaactacttacaggtatttgaaagtgtcatgttgacctttcaacaccctgttccttctccctgaaaatcctttcttattttgccttcctctctaatgctagttagagaacattcctagttgtacttgaagactcagctcaaatgtcaccttttataggaagacttttctgccctcttcttggccacctccaccctcttagatgcccttcctctatgctgtcattgtaccctctgcataccgctgtcataattccatttatcaagctgcaccatgacggatgtctacttgtctgcttttccactattctgtaagcatttcaagggcagatattttgtgtgtgtgtaagatctggccaaagtgtagttagtaactcgagtgacttttttcttcttggagttagatatactttcctgtaatgcctgagtaaagatacgttatttttttctaaagaactctaacacgtgcaatattaatgggggccatatgctacttctctctcagcagcctcaatcacactgataacattgaaaaaatgcaagcttgtttcaaaggaataattttgacctcatttctgtgaacaggaatttatattttaccaggcaatcatttcttagtaatatagttccatttattttcttagtgagttaggaggaaaaacagtatgtaaaaagatttgtaactatacatttcaaagtatttaaacaatagtaacagggtttaaatgtatcaagagttctggttacttttatagtcatcgatattatgtcaccaagtaagtagggaacagaaatgtgttacaaagataaatgaagtagaaatatagaaagaaaaatagtaattttaaagcaactttaaaataagcaaacatgtctttataaaaaggaattgagtaggaggaacagagatcaacaaaattattgtttttttttctacaataccttatgttttattacatgctgaaaagatcgccacaacttaaatttcctctttttttctcctccttaggccaagttcacagatgactgcaagttcagggagcgttttcaagaaaatagctataatacctatgcctcagcaatacatagaactgaaaaaacagggcgggagtggtatgtggccctgaataaaagaggaaaagccaaacgagggtgcagcccccgggttaaaccccagcatatctctacccattttctgccaagattcaagcagtcggagcagccagaactttctttcacggttactgttcctgaaaagaaaaagccacctagccctatcaagccaaagattcccctttctgcacctcggaaaaataccaactcagtgaaatacagactcaagtttcgctttggataatattcctcttggccttgtgagaaaccattctttcccctcaggagtttctataggtgtcttcagagttctgaagaaaaattactggacacagcttcagctatacttacactgtattgaagtcacgtcatttgtttcaatgtgactgaaacaaaatgttttttgataggaaggaaactggaattctttgtactaatacagggagcacactccttcagttcagcaagacataaagccttttgctttatgcttgagggatatttagaactttgtattttcggaaagttaaataacagggactacgtatttttctgacttttacagattaacctgaaagaacatacatgatacatttttatttttggtttccaaagaatattttgatgcagataaaatattttgttaacttttgtttttttttgtttgttttcttaaaagtacctctgcattgagcatattttcttacttttattattttaattaatatgacataagcaatcattttatgctgtttatgaattataaatgtgtttatagctcatttgtaatatggaaatcttttacatttttcctattcactgcacttttttattgtttttatttctagccatacctcagataatatgtttagttttacattttaaaatgtttaaattctctttcacagcaccaaaggctcagcttggatttgtgtgtatgtgtatgtcaattcatgacattatgtggaatcctaaacctttggtggctgggatatgatgggttagaagcaaggagaaaatataaggactttttgatggaattaaatgtgggaggtaaggaaaaggatttagaggtaaaagtacactaagtttgcaacatttattgagatctaagtctgtcttgccttcatttctctttttatctcccccttgccctcattcttgaacagctggaggaatacattttattctgtccatgaagcatacactatgaaattcaagtgcttaaaaatacttctatgactctctgctatcccactgtatagatccacagggagcaaacacttagaaatgatagagaactgaaggagatcaatggtttaacagttatccatgccaagtcccattgtcagaaatattcttattactcagtcaaacactctttgagcttcccttcctaaaggtaaccaatccagtgaatagatgtgcccttttataaggaaacttctgatgtttattaaaaaaactggccttttgatagaggtaacttaatttgggaatttgttgtgttgaaatggcatttaatttcaacctaaatactgactgctggacataaatcacagaaaatttaacttaagaaaatttacaaaatttattctcaggtaatcattttaataaagttctgcaaaatacacgtttatcttacattcagaaatgtggcaaaaaaggcatagctaaaggctaaacatatggctttagtagtaacaaaagggttcatagaaacttcatggtttgcatttaaacatgtttaaagtgtacttataaactatttttttcttaaagcaaactatgatttattttggtgcacaaatacaaagtggaaacttaccaaaattgaactagctaccatataagcagattgctttaatttgatgggaaaatagtacacacatatatataacaaataatatattaaaaaacccatccatcaactaaaacattatatgtatacatcagtatagtgttttattataaagccaattatctgattaagcattctttccactgaatgcataatgtttaaatagcataaaatgaaatgctacaaaaattgaactaatttatactttaaagtatttctgggttaaatgaaacaatgaaattttttagtatgttcaactctcatccaaatggcatatgaccctgtttacacagcctaaagctaaaaatattactctagtttattctaatctattgttaagtattgtgcactgtataccaagttcttagggcacatgaaaaattttagctgccaaacaggaactagtaaacatatgttcctaataagtgaagggaaagataataatgatggtcaacaataagccacgtcaatgcataagttgtataggctaaatgttgcttgtaggctacattaaactcaaatgtaatagtttatcttatactcctggtttgatttgattagcatattaacgtgaaagtaggatagctactaaatatatattatgcaagtcaggaatcattaatttcaaaatttaaagccatgctaaaattaaaaagaaaatattaaattacacaattacacttgtctttactggccatacaaaatgattttttttttttttttgagacagagtcttgctctgtcaccaggctggagtgcagtggcatgatctcggctcactgcaacctccaactccctggtttaagggattctcctgcctcagcctcccaagtagctgggattacagactcatgccaccacgccagctaatttttgtatttttagtagagacggggtttcaccatgttggtcaggatggtctcaatcctggcctcttgatagtcctgacctcatgatctgcccacctcggcctccccaaagtgctgggattacaggtacaatgatgtataattaatgcttagtgaagcataaagttacctacatcaattaattaaatgaacttatgtacagaaaacatgtataaatataagtctatactaatgcttacaactttctaagagggttcttgcttatgtagctttttattattttaagtaactagaaccaccaaatatcaaataaaattatttggttatggttatgttcatctaaacacaacaataacttttatattaatatttaggagtctattttgtctataggtgacaaacatctccagactaacatgtcagttttatcaattatattatgtttaattatttaagatttctttatgtggaacatctatagagataaatagaaattttcaataagatgtagtaacactgtgatttatctttcaagagtctctcttcacttccttctaaagagactaatttgagagtacaggtgcatattaattttcttggttctttcagctgaattatattggtccagaagttcaaaatcatgtgacaataataagggatactgacagaagttatttccaagtttgtgtatatattataaaaattacatatataaaactaaggcttttatttctgttatttttaagcttttatttcttgtagctaaaaataaaacatcataaatctggtaggtaaatttcttattaaatcaatcttgaaatagaaaatgtaataactttcttaccattaacattttttacccttccatagaagggagggaataaatcatgacttatcccattttcaataacaaaacgaaactatggcactaaccaaaaacttgcattctggcataatttttacagttgcagagaattgtttctgggctcattaaaaaaagtagtattgcagacattgctgcaatgggaagcagacaataacttcttaaaggaattctacacctcctttaagatttacttaattgctacatctaaattctgataatttaaaatccattttaggtgataaaattttttaaaagttttgaaggaaacctctggataaatggacaaggcctaatttttttttgtagtcaatccaactgtactggccaatttttgaaataagattatatgattaggtattagcagagacaaagagttacctcctccatcttactctgccctatttgaaagtctcaggggagaaaagggaacaagatgctgatccaacctgagtggagtcaggtgaggcatctttacatctaagaatttttttttaaattttattattattatacttcaagttctagggtacatgtccacaatgcacatgtctgtcacacatgcacacatgtgccatgctggtgtgctgcacccaccaacctgtcatccagcattaggtatatctcctaatgctatccctcccctctccacccaccccacagcaggccccggtatgtgatgttccccttcgtgtgtccatgtgttcttattgttcaattcccacctatgagtgagaatatgtggtgtttggtttttggtccttgcaatagtttgctgagaatgatggtttccagcttcatccatgtccctacaaagaacatgaactcatcattttttatggctgcatagtattccatggtgtatatgtgccacattttcttaatccagtctatcattgttggacatttgggttggttccaagtctttgctattgtgaatagtgctgcaataaacatatgtgtgcatgtgtcttta

SEQ ID NO: 33 - DNA, 37503 bp, Pan troglodytes
  variation 25565..26413: note = n is a, c, g, or t
  variation 27538..27547: note = n is a, c, g, or t
  source 1..37503: mol_type = genomic DNA
gctccctccccgcaccggccagtgagtacacaaagccgcgggtgaggggaagcttcgcaggcgtgcacggagcagtgagatcactggcgttataaatatcccggtgccagcgcggagatccgctcgggtggcctctctcttcccctctccccttctcttccccgaggctatgtccacccggtgcggcgaggcgggcagcgccagaggcacgcagccgcacaggggctacagagcccagaatcagccctacaagatgcacttaggacccccgcggctggaagaatgagcttgtccttcctcctcctcctcttcttcagccacctgatcctcagcgcctgggctcacggggagaagcgtctcgcccccaaagggcaacccggacccgctgccactgataggaaccctagaggctccagcagcagacagagcagcagtagcgctatgtcttcctcttctgcctcctcctccgccgcagcttctctgggcagccaaggaagtggcttggagcagagcagtttccagtggagcccctcggggcgtcggaccggcagcctctactgcagagtgggcatcggtttccatctgcagatctacccggacggcaaagtcaatggatcccacgaagccaatatgttaagtaagttactcgctctcctacaaaacccgtcctaggcggccgcggaagattcgggagggacagcaggtattcaccgggacacaggctcaccttcctgagcccaggccactgggaccaagctgatactcagaaacagccgggcgggttgggtggagatgcatctatatggcgtgcgcacacgcacccctctcctgggcatgaggaattgcgatttctcaggtgtatgttacctagaggctggtgcccagacgggtaccttgtttccagtttgctctagcctcaaagacgagtccccagccatgacaggagagaacaaaaaactcatttcttctcattcaatttgtttaccttctgcttatgaactagcctggcatttttcattaggcatcaaaggcagcccttctccctatccataactgaagttattttttgaaaagaagaatcaaatcccaaatacttccctcttccatccgctaccataaacctcaaattaatattgtatatgtatatgcatatatgtatataagtctatgtatacaatgtatacacataggtagatagatagatagatagatagatagatagatagatagatagatgatagatagatagatacatagatacacagatagatagacagacagatagataactaggggacaccagacagacattcctgcttggaagaagattgtgctctagaaaactggacgcgtttagagagggagacatgataaacattgaaattactaactccagagttggatttaacaatgtttagtatcttgagaccatgactacaccgtattaggagagtggccagcctttggtccccaagaacagttaggggaaagttccttattttagaagaaacgcagaggttaaatttggtaggggtgaagattttgtaggactttttataaacaaagttttaaattttccctctgagttttttctttcagcacgctctcttttttcctttctcatctcctcttcccttctaccccatctatgtttccagaccatcgcagccactcctctggtttcccttcactgcctctaggcagctgggggcagggacggtttggggctgtgtgtaggagtggggagatctctgtgaggcttttgctcagtagggccagatcgctcttccagcgcgggttggtccaccaggcagagccccagccagggcctgtcaggtacccagggagaccggaaatgtagccaggagacagcagcgcgcacagtcacctggtttcagtgtcagcctggttgctcctagatgttcctaacttgctccatctcagaccaacgactccacgggccattgggctccttcttacacaggctccagaggagcgtggacaccactggcggtctgaaaatttggcagccagcagtctccagagcggggtcggaggcgcgcaagtgggtaaggcggtaggctggctagcctcctccggtgggttaagggggcctaatgcggaagacctgatggttcatgctgagagaaaagcaggtctatgcccgcccctctgcgcctgtctagtctatctgatcgcgctgattcagcagcctgcggcgcacgtggtgagggcgcctggagcgcccagctggagagagggccctccgcacacgcaccagcgagtcccagggcctccctcacactcccgagaggaatctatttccatattttagagtttatttcactcatcgaataactgctcatttgggggataaagggcaagatctgttggggtgaaatggaattttctgagatttgaggaataatcagtaacatctatttatttccattcgtccttctcattttgtctcaacggtctcttgactccatcagccatcacagcttattcccacttccggcaacctttccttctctcttacaagaaaactttctttcttctgttcttcttgtaacgacccgtggagtcattggtctgagatggagcaagttaggaacatctaggagcaaccaggctgacactgaaagacaggtgactgtgcgcgctgctgtctcctggctacgtttccgctctccctgggtacatgacagagcaccaacagaggataacttccgtgagctcaagggcggaccccaaactagcaggcagcaagcagcaggttggagcccagggagctcagagaatgcttctggggagggtttaggtgtgctagagatctcagaaagcaaggctcattcccaggatattcaccatcttctctacgaagacactatatgagacgaaggtagttttacagcttaggccttgctagaggggatgttgtagaaaagcaaaggggggaaataagagcagatcaaaaagagtgcacccagataaacaagacattgaccactacccagtatgtaacatgtacattttcttttaaaatccacgttgaaagatatctacaagagaacagggatgtttcctaaaacagtgccgacaaaaagcttaatttaaactttttcctaatttattcctgtttacaataacctttcagagtttagtttctgtgtctttcacatgacttgctttcattcatgccataaatcatgtacccaatataagatacctatctcactaagcatgatattttggttacttttgtgttgtttgtcttccatagagttttttttttccccagaagaaagcacagcaaatattcaaatcatagtaattttctgctttgtgatatctggagtgtctaatactacttcataaaattttaactacctttgatcaatgcagaatttgcatgtaatttgggaatttaacatggatctctgccattacctagctgtaaaagagaaacagaaacttgctaattacaattggtcatttacctctttgaaggcagtatttgatgtttcctgacattcgtgtaaactaaggtgttggccatggcctttcttagagtatgtgaggaaatgtgtttaaatctcctaagagaggctgagagggctggatcaagggccacagaggatacctcagtttgatctcatcttctatttctactgtctgtgagttagtgatgatagaaaacctattctttttgttacaaccctgatacttcagaaaagtcaaagctttgccatgaaactgcattccaacaagttattttaaacctaataatattctgtagtatttgtctgatagaacagataatcatatgtgtttcgcaaactattatttgacagtaaactttttttttttgcaaattgcaaatgttttctggtttcaccatgagaagtgcaccatggccatggactttcaaacataatttgtttagtttacatggaccaattaatatactcttagcttctcttacacaatagttatcccaagttttgaacacagaaaatgaaatcaagctcattgtatataaatccttattatgaggaaatactgtggaaaaatgaagaaatatgaacaagacaagatagatgacccaactattgcatggaaacaaatggtttggtttaatttatacgccttcaagtttaatgtcaatacagtgcttctgttgacttaccttgggccattgaagaataggcaatcaagtagttgtcagtttagggaagaaaagtttaaggctttggctacacgaactcaaagcgtttacataaaatatgaaaattccaagcacatattttggttaatagaatcgttgatgttactgctttttaaaaaaatctaaattcactaccaattttggggtcatgtggagtcattagacagtcccccaagctagataaatcagaaactatatctactatgcagaaaaatcaagtggaaaatttctgttgctaatttaatcagtgaagactgctaaactgaatatttcaagattcagatttgataacttggcacaacatatctgttactttgtggatgcaagtagagaaacttcagttttaaaatatttttgtctggggattttcagatgggttgttgaaagcttctgaatacatggaatatctgtgcttttctatattttattcattaacaaaagagagaaaaaggaaaaatgtgtatagttgtatcaaccactatcagtagagccctattatattaagaaatctgcagaggactaagtcaaaaatctagaaatatgtttttttttatggaagtaagcttacatcataatgcataagtggaatagactgtgtgtataagctgagagacaccaagacattcttgccttcttcagcctaggtgtcagtgctgaaattccacaaagagagaataattccttctgttaagcattctcctcttcttttgaccttcttaaatgggaacaccttaagaaaaataacacactgtctgtagcactttaatgtgaatttatttacactgagccacccctccaccccgtgccttctcaagcaggagaaggccacagtagcaggagagtactaagacacctgtccatacttgtgtatgcatggggtgtcctgacaagagaaaagagaggtagtgagaagatcaaagaaggcagtcaaatttagcaaacagtcattgactatataccatctacaagacaagcttggccttccacagtttggcttagaaatactgccttggcatccataaggagaattgtaagtttccatcaaatttaatatacgtgactcctgatgataaaggtcagaaaattactgaaattaaaaaaaatcaatgtcagagaaatgttttcagaaatttatatatttgtgatttaaggcacatgggtttaaaaaattacatagaattcctgaatgagttactgagatttgtcatagcaaaatcaataggcctgtgatgttttggggaggaaggcaggaaactgaactgtgagactcattgaatctgctccagaaaacaaggcattgtgaaatcactgctgacattactttggaaattatgatcataacagtgttcttaatattaggtcataattacagtaagatttagaagatcaataccaaagttactcatgtgaaaaataattcattcatctagtctcatctcttacatctcctgcattctttataatgttaaatagaacgatatatgtaaagtgtatttttaagctttcggttaaagataattttcttaaggttataaaatcttttaattctcaggcactatatcatttttatcctggaagttttaagaagaaaccctgtaatatgtaatacaataataacactttcacatatattatttcatcttccccatatttaaaatacattacatgcaacttgtacataatatatacacagagtgtacactgtattgaaatacgtgttaaatgcatctaaatgggtctttgtttaaagagagaatgagctaattatcagaaactatttatttaagcaaagcagtagtatttctattaaaacaaatatttataaagcctttttatctcaacatcttaaaagttagcatataaacacatacacttatgagactttaatcttttattctaccatgtattttttcattaatatacaatatatctgcatgttcaaaaccagataattttccaaagaatggaattaaaagcctctaacaatctagcaccatgagtaaattggaggaaatatacaaccaaatctctcctgtatcaactccatgttgtcccttttgtatctatcattccacacatatacaatttctttctttctttctcatttttgaatgcacatgtttacataaatattcacaatcacatcccccatctcccaaatacctaaaatcattaatgctattcccaatatcattccatatttccgatagaaatttaactttgtatcactgttatagtcatgctttagtaataatattattataacatattacatctgtgtagagtaactttacaaagcatttggtgtgttttgttaatatttgataaaatgataatgcttctaaacgtttagaagcacactcaaataatgttcgtaataaatcctattataaatagcatttaaaaacattttgaaggaaaggatttatacagcactggtggttttttttttcagtttccttctaaaagcaaaagtagtttccaatagttttcgatttttgtttttcaatttaaagaaacacctattaatgaactggtacctgcagtttccctaaagtgtgttttatttactttgggctaaaaacatctattttttaaataagctgttcagttatcccctttttcacataaactttctaatcaggttttttaagaaaccaagttgaataaataaacaaacagcaatgcttgctagaattatagatgttagctcacattgcacaaaataaatgctcaataaagttactcacatatatttataaaatatttcttgtttttggtaaacagaataattttatatatacctcaaatactgcagggagagtttgctatttcaagaaaatctgatgaatttctctatttggctgagtcctattgagatatcctaattagtatatatgcttagaatattatagatggaaatattgagatgttcttttttccgtccctttccttctttgtttccttcttttcttccttccttccttcttttcctttttaaaagtagagatgcggtgtcactattttgaccaggatggtcttgaactcctggtatcaggcgatccttcagcctcagcctcccaaagtgctggaattacaggcgtgagctactgcacctggcttccctttttcctttctaagacaggtccctttttagctctattgagctaaaaatctctttttaaaatttttgaaatagacaactaataaaacacattatagctctattgagctaaaaatctctttttaaaaattttgaaatagacaactaataaaacacattatgctcttttcatgttcatataaaatacataaatttatgttaaataagcaggctttctaattaagtgcagactatgtgttttatcttattaaactactctatgaacagtggtgtgtcattctcttgatccagtggacgtgaactttgaaattactgtaggagacagagggacattgacttcataatgctaactataaaatacaaaatatatacagcaatgtaataaattatttcattaatttttttctaggaaatgattcaaaatgcaagatgtctcaaagcataatccattaaacatttcattgaaccaataatttcaagttatttataatgctttcagtatcttatatgtagtctttaaatgcagtcactaaaagactgagtatggtatatgtttatttgtaactaccattataaccttgataattagagtagaggaatttatttaatgtaaataagtattattttccagactttcaaatagttatactagtcttgagcacagatttgtgctttaatgttcaaagtagtgtattatctttgatgaagaaacaatggaggagaattattttgaaaaacattttttaaatgtctttttaatttctttaaaacctgagaaaacttcatgctcattgtttactaaaagcaacttatttgtccaaataattactgatgaagtagaatcaaatttttgaatcttgaaattattttaaatgaacacttgaatcgtagccttctttgtttttaacatagtgaatgtcatgaacaataaggatgttaaatactaagttctcttttaaaatcacaataataaagaatggaaagaatctatgtagaaatttaattcttcacaatgatataaagaagagcctgtgttttattttgggatttctgtcatcctaggtgttttggaaatatttgctgtgtctcaggggattgtaggaatacgaggagttttcagcaacaaatttttagcgatgtcaaaaaaaggaaaactccatgcaagtgtaagtagaaccactttatatttgttaaagctgctataaagattttacatttgtaaaacagaataattttccaaattcataggtaagaaaatttgcccaaagaacttaacttttaaaaagtatttttacatttaaccaagataattttgtgcgcttccagaagtaataatttaaatatttaatttacttaaaagatattatagagtctacaaaaagtttaagcataaatgtatttgaaaacagcattctcaaaggggcagccatccacttatttcttagaagtggcccacgtaagaaggaatatggcaataatatatttcatcacattttaaacttacaagtttatagtgattgtatttgtgctaagtagatgaggttcttatttaagtttacaggctactcataataccaaattgggtctcagtaatgtaaaatattttcatattaacaagcagggagggaaaaaaaccaataattagaagactctgactttcatagacaaattttatttaattaatttgaagaatttttatcttgtatttttgtcacatcaaaaataatgacttcttaatactatgaaaactaattttgcattctcaaaaatttattcagaccagttttatatattgtaatcaattcacaaactatttatttgctttgttatgaaagttcccattacctgggaagtattaaaacattttaaagataataaaatatgttcagcttagttttcccactcacagattctatttatttgcattagtatatacacactgcacttaaaggtgctttatgctttttctctggcatacttattttcttcacgttaaaacattttgaaagcaattattctttaaagttagtcctttaatcctgattctttatagtctttattaaataaattattggaatatcactttttcagttttcaaagttatagaaagtttcaattgatagcaataattgaaacttactatatgtaatttgatttgatagatctttaaaaaattcaatgagaacgccacttggtttaatgtgtaagagttttataattttacttttcttaacatctaaagtgatttgttaatatcttttggaagagacagaatttgaacaatttctatagttatttgaggattcgatgagataatacatgcagtgtgctaagaatactatttggtgtattataagtgctcaataaatattgcctattattatagggtaacaatctaaatataatctaaatgtaataaattactaaaatttcagtttactaacataaatggaaatcctttgttaaactcttaaatcactcattgcaagaactattaaacaatttaccatttcattttttgagctggttactatactctagcaagatgtagtataatattcatagaaatatatttttctaatttttttcatttgtttaagggacaacattctgcatcactgtgaaaaaagtagggtattacttttttaaatttattttttatttcaataggtttttaaggagcagatggtatttggttacatgaaaaagttctttagtggtgatttctgagatttaggtgcacccatcaccccagtagtgtacaccgtacccaatgtgttgtcttttacccccagccccctcccctttccccctgagttcccaaagtccaatgtatcattctcagggcatttaattttattttaaaatattagttaaaatccacatacagatgagttctcacgagggctggaaaaaaaagtaaaaaaaaaaaatccacatacagaatagaaaacaatgattaaacacatctaaacggaataacttttcctcagtctactttaagtttataaaagattaaaacacctttaaaatctaacctcataatagtacacagtgcatacaaagaaactttctcttactggtttgttttgagtgaaaatcttaactttcaaaatattctgatttatgccatagtacatgcaaaaaaaaaaatagactaaacttggaacagcttaaggataattgccacagaaagtaacatattacaaatggaagccaattagaaaggtcaaactgagaggttaagatacatgattcctctgtcaaagacaagtaacaaatttctagaaatttgacccaaatgtctaaggatggctggttgaaataatgcagataatgcaaaaacagcatctgttattctttctcatcttggcaggctaaagttatttcatagaataatgacttttaaacagtacaaagcaagtcttgctcttgtcactcactgaagctctttgatataaaagtcattctgatgactttgagctatattgtagataaaaatattaagcctatgattatgtggattctttttaaaccaattatccaagcccactttctcttatctgagcatttattagcagttttcctctaggtgaaaacctaattaaattataaagtgatttatcttttaaagatgttgaatttagaaatagtattaatgctagcaattaccagttttatgcccagttggtttctttcctgttttcacattctagttaaacatgctggaaaattgtttttgtaactctaaatatgactatttgatttagttaatagttttgatttttacgactttacatcatccccaaaaaaggttaaaaactcatagacttttaggattaaacttgtaatttgtgagttgctttaaactaaaaattttgcggaggcatttaaagggtacttttagggttctatctacaaagcaaatgtaaactaaaaatataaaatattaatagaattctgggaaaagtaatcccccactgtactgagaaatattcatggatacttgtaaatattcaactcagtttttgtaataataatcagagtactaaaaattagctactaggcagagataatgtattttcatagttctttaaaaacccttttgctcacattatctcattagataatgaggtgacgaaagagtctcatagatgttaaattattttcccaaggttacacagttaacaagtgattgaaccagaactatatcctcctagaattttatctttctttttaaatgctatagtgcttggtagataaaagttagcttcaaagaagatattaaattttgtttggaatcaattacattgttttcacctcttagtgtatagaaattaatatgtgcatgaaaatatttttgtattacatatacaaatgaatactgtggcacatcattagaatatttatagcactctatttaataggcaaataaacaggcaatttaagacttatagttaaaattgtaaatttccccattctaggtacctctttttctctttgattcatatcaccttttttgaactggtgtttcccccatctactcctgggtctccagtactttactttataatctagagaagaggggatgtgtctgccacagaattttacaaatgttggttattcattgtcaatgacgagttgcatagggaactcctgcctcccgagataaactttcaaaacagaaaagagatctgttttgctcacagaaaacttcatttagtaaatattttactgccatagacacaaatatggcagactgaaagggtaggccagagcagattcaggaagcattgatgctgattccatttttgtgctaaatttgttaatcccatcagataagttttatttgagcttcagccatctaaatgtgggctccctggactcattcaagcccctgatctacaggcagctctccttcaaacttttattggtatactctaaatatgcagtgcaaccaaattcttattgtgcaggtttttcagcattctttacaaggatgaggatgtatggtcttctctttgtccaaatgtatcaagaatcatcaagagcaggaggagataattactttccaaagagccatgagggctactccaagccacagctgtggcctgtactctctttctcaacacattcccatgctaagataccttctgagactgagcactctttctgcctttatctgtctgtctgtccctgctcactcctgagggtggcatccttactgaaagtcccctagagagcctttctggatttatctgaggtgggtccagactaggagtgaaaggccttgagtgtgatggtaaagacacagttagattgccccaggctgaatcctactctaccacttcctaactgtgtcattttacttcatctttctattccttggttttatcaactacaaaagaaggaaaattaaagtcacaatctattgggatagttaagtgttttaaacaagataatacacataaaacacttacagtactgcctgaaaagtgttccacacttaatgtttaaacagattttcctgaatttgctttcaggcagctgtttgacaatccttaatcttcttctttctgattttggggtcaggcagctgtgacccttaaattattcaggccagccccaactcctatttatcactgatcttttcttcctcacgtccaaactttgtgtgcttataggtgtcccttatctactaagttttcctttcaccaaggaacctaatttcaaagcaaaatttccaagctcaacctcttaaagaggcatggatttcctatggttataatcttgtgacttttttcatagctctgttgtccatcttgatttttccctaaatatataaatcttggaaaaggtggttatcatgtattcttcagtcttttcataaagtatgcagaaagctcattgctaattagggaaaaacatgttaccttattttaaagatccagagagaagcatgtggtggaattatttttgtttctcagggttttaggggatcatgtttgaaaggaaagctaattgcagactttatgaaacaggcatggaatgtgtgcttgatcagtcctaagcaaggaatagatcatcctcctttcctggtttcagagggtgccagctggcttgcctgggatgagactccagaatggacttcctgtgctgcaggcagagtgaagaggagtcagcagcccctaaagctgaacatatttactgaaaggggaaatggaggcttgagtaatacttatcatcctcatcaaaaaataactcactaagcactccactctgccagtcaagaccatgcatgagctagatcaaggcatttgaaaagaatttttttttgccctctaagagctttcaatatacagtaaaatggaatgtctagctattcaggcacaaaaatgggtttaaactctgcttcgcagtaaatgccagtttcccctcagttttgcactgtggaggtctagttaaaagacctattttattgaggaaatctggatgtgattgccttgtagattcagaaatccattttagcagaaagtgagacatggtaatatatttctttgatgatttgaagagtgacacttgtcattcatcaatattttaacaggaaacaacttcagagcaagtaagattgtatgagcaaagactaggcaatagctttggtttgtacagtgttatggaaagacccttagtctaggaatcagaagatgcaatttaaatcacaggtctattctggcacttaataaatgcagggtgatagatggatcattttctttacttctctggctgaaaaaaatcagataatactatcctaatagcggccatggaattactgtgagttaaattatatatgtaaaccacctgacacagagtagtctccaatagtccagctatatggagttattaagggcctcagaaagaaagtcatgctataccatgttttgcctggtgtggtccttacttcaagggtatcaaaaccacatgggatgctggttaatgatacatcaagtccagggtctcacctcagacttagaaaaacacagtccctggagatagggcttgaggagctgcatttgagcctgctctctgagtaatttgaaggcaaattatgtaagtgaagaaaagagatcctgtagttgatattctttactgcattatctcaggttgggtgatattaaagccaacttgtgtattttgttggttgctcagtatggagaactgagatatagaaggaacgaatgtccagtaccaagcaggagatatggccatgcctgggagatagcatggcaaggctacaactgacccatacacagcttatatagtaaagagtaagaagtagccctctgggtgcttgctatcctgtaccagggcacaagtataaaaaatgaactgagtttagggcacctgtcccaggcagctccattggtggagggaagggatgggaaccaagcaggtctaaaaggagggaggggaattagaagtgatgcatgtgacaaggaaacttagtttagagcaaaatttggtctatagttgtttttattacagtctatgataacctttttgttatttaataatattagtctataacaacattttaattatttatatttggctttttttcccttaactttataaggtttttcaggagaaagggccaaatcaaagaaaacaagctgaaataaatcattaaaattgattaaatacacacaaattccaaggtttatactggtgtctgttcaaattcactcctatttctatatctcatatcctacatatttagttctgtagttgcacgcaagagtcggtatttgcacagctttaattcatactatacaaggtactcaatcatcatagatggtgatatttactaaggaacaagaagagattttagagagttttttttaaacaatatcattttggaaataatttatttggtttaattgacctgtttaattttggcttggcagaattagtcatttctggaatattgtagttaatcggagttgtgctttctttgaattcaatttgacctttcaaaaaatatctgttgtttaaaattgatccttcactgtgagaaggagtgaggagagccacagtttacttctagtgaaaaagtttttttttttttttttgagacagagttttgctcttgttgcccaggctagagtgcaatggtaggatcccagctcactgcaacctctgccccctgggttcaagcgattctcctgcctcagtctcctgagtagttgggattacaggcgcgcacaaccacacctggctgattttgtatttttagtacagacagagtttcaccatgttggtcagcctggtctcgaactcctgacctcaaaagatccacccgccttggcctcccaaagtgctgtgattacagatgtgagccactgtacccagcagaaagttcttatttctcttaatagtagtgtgtttcctctccttgtaataatttggatattcaagaaaaaatagttcgatttgtttaaagttctttttctttttttgtcaattaggagtatatactaaactacaaaaaacgctgattttaaacatttcattttaattttgcaattatggtttgttgaatgtaacctgttattattcttgccagatcaaggagaaattaaagagattttaatgtaatttaagtcaacaaaaacatgggcaggaccatgttaatactgttttccactgtaaaagtggcacctagcacagtgcctggcatgtgatatctgtggaataaattagtgaaaaatgaatatgaaactttttaaacaaatatttaaacaattgctttcattgtagtggctgatggtggtaaggcaattagatgaaggagtcttgatttcagcaacttatctgaaatttgattcacctctctacttcatactctttaactatagaaaaagtctgtttgttaatttcagggttttttttctagaaaaataatggagttctatcattttaaaagtgtatattttattagaaggcttataatttaaaaaaaagatttaaaaaataaaaatcagcctggaaaatttattgtccaaaattttctaatggtaaatgtatgtattttagtacctctagctaagatctatgactctttgctataaagatggtccatgcacaacattatgtatagagatatactgcttagggtcactatcttgtctgagccagaccggcaatactaacaggaatagtcgatccttcaagatgagtaaattcactgaaatgtttgtttcaaatgattctgtgttccatcacagctggaagaatttttcagacaaaacattaaattaaaagttaattaaggaagccaaaacagtctaactgcgtttactcccgtattaatgtagaatgtaggatttggacggctgaggggctgtgtgtactgtgtggatccttagaactctacacacttctaccctgggtaacagttaggtgacctttgaaaaatctgaagtccaaatagccatctccgtaaagggctcctcttaagaaagaactttagaatatgaatctcgaggaaaagaggaggaaaagagaaagattttagatgaaacaattgtagggggtggggcaggtgggtttcactcatatgaaagaccctaaaatggaaatgatgtagattccagtttttaaaaaaggaatgctgtggtgtgtgtctgcacatgcacctgtgcatgagtgtgtgtgtgcctgtcatctacatcagttaaaaatgacatgttctttctttatttatttgggcactgttgggggaaaatattaaataatgtagtacattttaaaaacctaactctgtcaaaattgagtaaagcaatcaccgctgtttttgtgaaacagagctggaagtcagatcaaggcataatgtattacacattttcaaaaatgtcattcaactgcattttaaggaaaaaaaaaaacccaagacaaggtaaatatacctgatactctttttaatgaaatgtttcacacctttctaaaattcttgttatctgtttatagagccagaaacattctagatgtctatagcttttattttgaaataaaatgttgggattatctaattaaatgggaaagccattttaagagctaagcagctgcagacaaatctacaatgaatttgtaagcaagtctttctgataaaaaataggaatagtcaatgtgtggtcttcgaaagtgatgtcagcatagcagtcctggcctaaatgtaggctggcaaggtgtatcgtagacagggtgaaagggatgccatacataggtggtgattgtttataatacctgccttcggccgggtgcggtgtctcacacctgtaatcccagcactttgggaggccgaggcaggcagattatctgaggtcaggagttcgagacaagcctggccaatatggtgaaaccccgtctctactaaaaatacaaaaattagctgggcatggtggcgcacacctgtaatcccagctactcaggaggctgaagcaggagaattgcttgagcctgggagatggaggttgcagtgagccaagataatgccactgcactccagcctggccaacagagcaagaacctgtctcaaaaacaacaacaacaacaaaacaacaacaacaaagaaacaaacaaaaaatacttgccttcagcctgctcgagatcatatccagagattcaccagtagacttgtggaagatctacatatatggcttcataacctgccaatggaactttgttgattgaactacacttaaatataagtaactccagtaaactattgtacataaagttaatgtgctgttggaaatgctctgatattggttggcttctactactgtcagtaacttgcactgctcaaaaactccatgtggacttcaacagtggatctaggtagattgccttgcaatattcagatttttagatttctgtgttatgatcagtatttcaaagaaaagtttggcattattagaaaaaacaaggaaaaaaaggccattttattcccgtataaaacttcttggtttgatatagaagtatgtagcttttagtgtttttacatataggggacaaaatatttggtattctcaaacacgggaattctgtgtaaatagtactccttgaaattatgaaacctggtagtcttaactagtacaggaattcttaattttttgggggttatgggctctttcaagttcgatgagagctacagaatcctcctttggattctcataacagccctattgttgtaagtgttatggataaggaggctaaggctaagagcttaattggcagaactggtttttgattgcatgtctgactccaagttcacactcttcccccattctcccacatattccttcaaattttacaacatggcaaactaagccctttcagagctggtgctgacctacattgtctggctcatctccttacttcccacatgcatcctaggtagaggtcacgctgaactacttacaggtatttgaaagtgtcatgttgacctttcaacaccctgttccttctccctgaaaatcctttcttattttgcctgcctctctaatgctagttagagaacattcctagttgtacttgaagactcagctcaaatgtcactttttataggaagacttttctgccctcttcttggccacctccaccctcttagatgcccttcctctatgctgtcattgtaccctctgcataccgctgtcataattccatttatcaagctgcaccatgacggatgtctacttgtctgcttttccactattctgtaagcatttcaagggcagatattttgtgtgtgtgtaagatctggccaaagtgtagttagttactcgagtgacttttttcttcttggagtcagatatactttcctgtaatgcctgagtaaagatacgttatttttttctaaagaactctaacatgtgcaatattaatgggggccatatgctacttctctctcagcagcctcaatcacactgataacattgaaaaaatgcaagcttgtttcaaaggaataattttgaccccatttctgtgaacagaaatttatattttaccaggcaatcgtttcttagtaatatagttccatttattttcttggtgagttaggaggaaaaacagtatgtaaaaagatttgtaactatacatttcaaagtatttaaacaatagtaacagagtttaaatgtatcaagagttctggttacttttatagtcatcaatattatgtcaccaagtaagtagggaacagaaatgtgttacaaagataaatgaagtagaaatatagaaagaaaaatagtaattttaaagcaactttaaaataagcaaacatgtctttataaaaaggaattgagtaggaggaacagagatcaacaaaattattgttttttttttctacaataccttatattttattacatgctgaaaagatcgccacaacttaaatttcctctctttttctcctccttaggccaagttcacagatgactgcaagttcagggagcgttttcaagaaaatagctataatacctatgcctcagcaatacatagaactgaaaaaacagggcgggagtggtatgtggccctgaataaaagaggaaaagccaaacgagggtgcagcccccgggttaaaccccagcatatctctacccattttctgccaagattcaagcagtcggagcagccagaactttctttcacggttactgttcctgaaaagaaaaagccacgtagccctatcaagccaaagattcccctttctgcacctcggaaaaataccaactcagtgaaatacagactcaagtttcgctttggataatattcctcttggccttgtgagaaaccattctttcccctcaggagtttctataggtgtcttcagagttctgaagaaaaattactggacacagcttcagctatacttacactgtattgaagtcacgtcatttgtttcagtgtgactgaaacaaaatgttttttgataggaaggaaactggaattctttgtactaatacagggagcacactccttcagttcagcaagacataaagccttttgctttatgcttgagggatatttagaactttgtattttcggaaagttaaataacagggactacgtatttttctgacttttacagattaacctgaaagaacatacatgatacatttttatttttggtttccaaagaatattttgatgcagataaaatattttgttaacttttgttttttttttgtttgttttcttaaaagtacctctgcattgagcatattttcttacttttattattttaattaatatgacataagcaatcattttatgctgtttatgaattataaatgtgtttatagctcatttgtaatatggaaatcttttacatttttcctattcactgcacttttttattgtttttatttctagccatacctcagataatatgtttagttttacattttaaaatgtttaaattctctttcacagcaccaaaggctcagcttggatttgtgtgtatgtgtatgtcaattcatgacattatgtggaatcctgcacctttggtggctgggatatgatgggttagaagcaaggagaaaatataaggactttttgatggaattaaatgtgggaggtaaggaaaaggatttagaggtaaaagtacactaagtttgcaacatttattgagatctaagtctgtcttgccttcatttctctttttatctcccccttgccctcattcttgaacagctggaggaatacattttattctgtccatgaagcatacactatgaaattcaagtgcttaaaaatacttctatgactctctgctatcccactgtatagatccacagggagcaaacacttagaaatgatagagaactgaaggagatcaatggtttaacagttatccatgccaagtcccattgtcagaaatattcttattactcagtcaaacactctttgagcttcccttcctaaaggtaaccattacagtgaatagatgtgcccttttataaggaaacttctgatgtttatttaaaaaactggccttttgatagaggtaacttaatttgggaatttgttatgttgaaatggcatttaatttcaacctaaatactgactgctggacataaatcacagaaaatttaacttaagaaaatttacaaaatttattctcaggtaatcattttaataaagttctgcaaaatacacatgtttatcttacattcagaaatgtggctaaaaaggcatagctaaaggctaaacatatggctttagtagtaacaaaagggttcatagaaacttcatggtttgcatttaaacatgtttaaagtatacttataaactatttttttcttaaagcaaactacaatttattttggtgcacaaatacaaagtggaaacttaccaaaattgaactagctaccatataagcagattgctttaatttgatgggaaaatagtacacacacatatataacaaataatatattaaaaaacccatccatcaactaaaacattttatgtatacatcagtatagtgcttcattataaagccaattatctgattaagcattctttccactgaatgcataatttttaaatagcataaaatgaaatgctacaaaaaattgaactaatttatactttaaagtatttctgggttaaatgaaacaatgaaattttttagtatgtccaactctcatccaaatggcatatgaccctgtttacacagcctaaagctaaaaatattactctagtttattctaatctattgttaagtattgtgcactctataccaagttcttagggcacatgaaaaattttagctgccaaacagaaactagtaaacatatgttcctaataagtgaagggaaagataataatgatggtcaacaataagccacgtcaatgcataagttgtataggctaaatgttgcttgtaggctacattaaactcaaatgtaatagtttatcttatactcctggtttgatttgattagcatattaacgtgaaagtaggatagctactaaatatatattatgcaagtcaggaatcattaatttcaaaatttaaagccatgctaaaattaaaaagagaatattaaattacacaattacacttgtctttactggccatacaaaatgattttttttttttttttttttttgagacagagtcttgctctgtcaccaggctggagtgcagtggcatgatctcggctcactgcaacctccaactccctggtttaagggattctcctgcctcagcctcccaagtagctgggattacaggctcatgccaccacgccagctaatttttgtatttttagcagagacggggtttcaccatgttggtcaggatggtctcaatcctggcctcttgatagtcctgacctcatgatctgcccacctcagcctccccaaagtgctgggattacaggtacaatgatgtataattaatgcttagtgaagcataaagttacctacatcaattaattaaatgaacttatgtacagaaaacatgtataaatataagtctatactaatgcttacaactttctaagagggttcttgcttatgtagctttttattgttttaagtaactagaaccaccaaatatcaaataaaattatttggttatggttatgttcatctaaacacaacaataacttttatattaatatttaggagtctattttgtctataggtgacaaacatctccagactaacatgtcagttttatcaattatattatgtttaattatttaagatttctttatatggaacatctatagagataaatagaaattttcaataagatgtagtaacactgtgatttatctttcaagagtctctcttcacttccttctaaagagactaatttgagagtacaggtgtatattaattttcttggttctttcagctgaattatattggtccagaagttcaaaatcatgtgacaataataagggatactgacagaagttatttccaagtttgtgtatatattataaaaattacatatataaaactaaggcttttatttctgttatttttaagcttttatttcttgtagctaaaaataaaacatcataaatctggtaggtaaatttcttattaaatcaatcttgaaatagaaaatgtaataactttcttaccattaacattttttacccttccatagaagggagggaataaatcatgacttatcccattttcaataacaaaacgaaactatggcactaaccaaaaacttgcattctggcataatttttacagttgcagagaattgtttctgggctcattaaaaaaagtagtattgcagacattgctgcaatgggaagcaaacaataacttcttaaaggaattctacacctcctttaagatttacttaattgctacatctaaattctgataatttaaaatccattttaggtgatacaattttttaaaagttttgaaggaaacctctggataaatggacaaggcctattttttttttttttgtagtcaatccaaccgtactggccaatttttgaattaagattatatgattaggtattagcagagacaaagagttacctcctccatcttactctgccctatttgaaagtctcaggggagaaaagggaacaagatgctgatccaacctgagtggagtcaggtgaggcatctttacacctaagaatttttattttattttattattattatacttcaagttctagggtacatgtccacaatgcacatgtctgtcacacatgcacacatgtgccatgctggtgtgctgcacccaccaacctgtcatccagcattaggtatatctcctaatgctatccctcccctctccacccaccccacagcaggccccggtgtgtgatgttccccttcgtgtgtccatgtgttcttattgttcaattcccacctatgagtgagaatatgtggtgtttggtttttggtccttgcaatagtttgctgagaatgatggtttccagcttcatccatgtccctacaaaggacatgaactcatcattttttatagctgcatagtattccatggtgtatatgtgccacattttcttaatccagtctatcattgttggacatttgggttggttccaagtctttgctattgtgaatagtgctgcaataaacatacgtgtgcatgtgtctttatagcagcatgatttataatcctttgggtatatacacagtagtgggatggctgggtcaaatggtatttctagttctagatccctgaggaatcgccacactgacttccacaatggttgaactagtttacagtcccaccaacagtgtaaacgtgttcctatttctccacatcctctccagcacctgttgtttcctttttaatgattgccattctaacaggtgtgagatgatatctcattgtggttttgatttgcatttctctgatggccagtgatgatgagcattttttcatgtgttttttggctgcataaatgtcttcttttgagaagtgtctgttcctatccttagcccactttttgatggggttatttgtttttttcttgtaaatttgtttgagttcattgtagattctggatattagccctttgtcagatgagtagattgcaaaaattttctcccattctgtaggttgcctgttcactctgatggtagtttcttttgctgtgcagaagctctttagtttaattagatcccatttgtcaattttggcttttgttgccattgcttttggtgttttagacatgaagtccttgcccatgcctatgtcctgaatggtattgcctaggttttcttctatggtttttatggttttaggtctaacatttaaatctttaatccatcttgaattaatttttgtataaagtgtaaggaagggatccagtttcagctttctacacatggctagccagttttcccagcaccatttattaaatagggaatcctttccccattgcttgtttttgtcaggtttgtcaaagatcagatagttgtagatatgcagcattatttctgagggctctgttctgttccattgatctatatctctgttttggtaccagtaccatgctgttttggttactgtagccttgtagtatagtttgaagtcaggtagtgtgatgcctccagctttgttcttttggcttagcattgccttggcgatgcgggctcttttttggttccatatgaactttnnnnnnnnnnnnnnnnnnnnnnnnnnnnnnnnnnnnnnnnnnnnnnnnnnnnnnnnnnnnnnnnnnnnnnnnnnnnnnnnnnnnnnnnnnnnnnnnnnnnnnnnnnnnnnnnnnnnnnnnnnnnnnnnnnnnnnnnnnnnnnnnnnnnnnnnnnnnnnnnnnnnnnnnnnnnnnnnnnnnnnnnnnnnnnnnnnnnnnnnnnnnnnnnnnnnnnnnnnnnnnnnnnnnnnnnnnnnnnnnnnnnnnnnnnnnnnnnnnnnnnnnnnnnnnnnnnnnnnnnnnnnnnnnnnnnnnnnnnnnnnnnnnnnnnnnnnnnnnnnnnnnnnnnnnnnnnnnnnnnnnnnnnnnnnnnnnnnnnnnnnnnnnnnnnnnnnnnnnnnnnnnnnnnnnnnnnnnnnnnnnnnnnnnnnnnnnnnnnnnnnnnnnnnnnnnnnnnnnnnnnnnnnnnnnnnnnnnnnnnnnnnnnnnnnnnnnnnnnnnnnnnnnnnnnnnnnnnnnnnnnnnnnnnnnnnnnnnnnnnnnnnnnnnnnnnnnnnnnnnnnnnnnnnnnnnnnnnnnnnnnnnnnnnnnnnnnnnnnnnnnnnnnnnnnnnnnnnnnnnnnnnnnnnnnnnnnnnnnnnnnnnnnnnnnnnnnnnnnnnnnnnnnnnnnnnnnnnnnnnnnnnnnnnnnnnnnnnnnnnnnnnnnnnnnnnnnnnnnnnnnnnnnnnnnnnnnnnnnnnnnnnnnnnnnnnnnnnnnnnnnnnnnnnnnnnnnnnnnnnnnnnnnnnnnnnnnnnnnnnnnnnnnnnnnnnnnnnnnnnnnnnnnnnnnnnnnnnnnnnnnnnnnnnnnnnnnnnnnnnnnnnnnnnnaacataaatttttagaccaactaaaaatatcaggcacttgcagctgcatttaagtatcaatacatgtcatcatatgacacttcaatttcactagcaatcataaaaataggttactgtgcaaatcccagtgcttttgctatttgtaggccaaacaagcagtctagtaggatgccagtaggtatcagtgggagagtaaagacatttctttttggtaatttatttctagatgtgcttgtctttccctagataaactctctcagagaagactgacatttttctgtatcctacagagagattagtgaatgcataatcacacagtgacaggtccagctccaatgtgtttctcattaaattctctgtcgttccctctgtgggaaactggacaatttatcagattttcatacagggaggtgaatttctgctgaggaggcaacaccaatgtcttttaccttcctgagtgcaattatggctgagcttccctgatagtactccattttatgatagggttgtcattgtaggatgtgtgcattctataacttctgacactggttatatatttacactttttaaagttagctagttgtcctacatttgccttaacacagaatgtctgagattaagcatacctgtatactaaaatattaattgtacaaggagaatatacaaagatttctctaacagtcaccatcttaatggagcatgtgagagaatgagtttcaaatctggaaacagaaagtagcataaaagcgtatgttctcagtcaattcttgatttttttttgcataaaagatgaatttcaaaggggagaaaaatatgttttctgtttaagtaatgaaagaataaccgttatggcaataactaccataaattttgtctgagatctggagttcctttaagttatgattagaaggaaaattcatgcccatttatttatgttgccacatttgttgtatcactgtgtaaaacaacagatcagctctgacagagagtttgttttcactttagatatcatgttgcctaagattctcagcctttaccatttggtgagcaagtgaacaaatgagaaaaatacacacgcatcccaccttgctggtgcagagcacaaaccacaagattctccactannnnnnnnnngcatttcatgtttgcgctaatctcttggaggtcgtcactagccactttgatggtattgttttctgtattgtgagtcatgtagattctggatattagccctttgtcagatgagtagattgcaaaaattttctcccattctgtaggttgcctgttcactctgatggtagtttcttttgctgtgcagaagctctttagtttaattagatcccatttgtcaattttggcttttgttgccattgcttttggtgttttagacatgaagtccttgcccatgcctatgtcctgaatggtattgcctaggttttcttctatggtttttatggttttaggtctaacatttaaatctttaatccatcttgaattaatttttgtataaagtgtaaggaagggatccagtttcagctttctacacatggctagccagttttcccagcaccatttattaaatagggaatcctttccccattgcttgtttttgtcaggtttgtcaaagatcagatagttgtagatatgcagcattatttctgagggctctgttctgttccattgatctatatctctgttttggtaccagtaccatgctgttttggttactgtagccttgtagtatagtttgaagtcaggtagtgtgatgcctccagctttgttcttttggcttagcattgccttggcgatgcgggctcttttttggttccatatgaactttaaagtagttttttccaattctgtgaagaaagtcattggtagacatctaagaatttttatgacattgaatcagtcagctgggctacacatcatcaatcagtatttcagcaattttatgcaataaaaataatattagattataaaccaagaactctcatttatgttttagtttattaaattgtttttgtctttattcagacataaatatcacaagtcactctctagcacctgttttacccttcaccatttgatctctaacatgatttctagatttattaccagtgattgtaggattcttacaatgttgaaagttctatgagatcataaaaagggacatagttccttctctaatgaaactaaatttacgtccagatgaaactggacaaccacgtgaaaaaaaaagctgtcaatgaagttataaacatagatctttttaaaagatcttttcttagtttaaaaaatatccactgagtaagtttgtgagatttgatcaagacatttacaaagctgggatcgattttgggcttaacattttatgaaggatgtaaaaaatttgaattaacctggaggaagaatggtcagagtggtatcattgttgataataaatagccctacttaattaaacatgcaattttaaaatcagctcttttgtgattaaagttccccattctacatgaagtcttctagaaattcttgaagaaatatgagcaatttcttcttgacatcatgcctccaaataagatagctcaggacacaattttctgtcaccattcccttactttcccaaaaattcaggaaatgttttctgagatccctccttgcacaaggctctcagctagcaagacattcttggacttgctcagtgcttgtttagtagttccttgtgtatatttacttcaatgtactctcatattttgaacttctggagaaaatatgtctgccctcattgcacatttcccaccctaaaatcaggctaataaaaataactcaataaatgctcttagcgaaaagcaaacttgaatgatgtattcctctggcttaaacactttgtagaggctattggatattctagttattcacaaaacttagtgtataattataattataggttcctggcatatgttagttgctcagaaatgcttttaggatgtatacatgtgctgaataagatttatcggacaaaaatgatgatgacaggtaagagaatttcatgttaaatatgaaatgtctcctacaataagagtaagaacatccactgtccctcctactgtacttgaagttctcaaacataaatttttagaccaaactaaaaatatcaggcacttgcagctgcatttaagtatcaatacatgtcatcatatgacacttcaatttcactagcaatcataaaaataggttactgtgcaaatcccagtgcttttgctatttgtaggccaaacaagcagtctagtaggatgccagtaggtatcagtgggagagtaaagacatttcttttcggtaatttatttctagatgtgcttgtccctttccctagataaactctctcagagaagactgacatttttctgtatcctacagagagattagtgaatgcataatcacacagtgacaggtccagctccaatgtgtttctcattaaattctctgtcgttccctctgtgggaaactggacaatttatcagattttcatacagggaggtgaatttctgctgaggaggcaacaccaatgtcttttaccttcctgagtgcaattatggctgagcttccctgatagtactccattttatgatagggttgtcattgtaggatgtgtgcattctataacttctgacactggttatatatttacactttttaaagttagctagttgtcctacatttgccttaacacagaatgtctgagattaagcatacctgtatactaaaatattaattgtacaaggagaatatacaaagatttctctaacagtcaccatcttaatggagcatgtgagagaatgagtttcaaatctggaaacagaaagtagcataaaagcgtatgttctcagtcaattcttgattttttttttttgcataaaagatgaatttcaaaggggagaaaaatatgttttctgtttaagtaatgaaagaataaccgttatggcaataactaccataaattttgtctgagatctggagttcctttaagttatgattagaaggaaaattcatgcccatttatttatgttgccacatttgttgtatcactgtgtaaaacaacagatcagctctgacagagagtttgttttcactttagatatcatgttgcctaagattctcagcctttaccatttggtgagcaagtgaacaaatgagaaaaatacgcacgcatcccaccttgctggtgcagagcacaaaccacaagatttctccactagtcaagggagtttaatgtttaatgacacaaaatcaactcagtctagcaaaactccaaggtccaaaggagccaagcaaactaaaagaataatgatttcttggttgctaataattcatggcagaaaccactaataagtttctaatataagcattcagtgttcatttaaccccttatagctggcattatgctggggttctgggaatagaattaaacacattggtttgagggaaatttacattcttgctgataatattagggaagtgaaccatagctttagaatacgatatgcagttcttggtaggttaaaaatgacacttattcttgccaaagaaatttagtatgttgggtcactgtttaccaggatggatccaaaaccttaagctgtagtttacattacacattttagaagtaactctcaagtttctttgatgctccttttgggaatttacagcattttttattggatattaacctacaggatgttatcaaagatgcaagatgtttctatgcttattttaagataattagggatccaatggaacgtaagaaaattgtgtgcaggcttttctaattccatctgctataacaaacatttaccttacagctgggattggaaaagcaatacgatctgattccaggattgctcagaaattggaaaaaaactgacctgtgcttcccaaatttatttcccaagacaaagatgtctatagcacagaaaaaattgcatgaattaaaaaatcaagatgtattattaaatatggtcctgagtattgcttaacatttcagttctttttctacctgtttgctggaagcaagaacattgttaacaatttagcacctttttcattaaacaccacctcccactgttggtcttaaatataggattgtatatatatatcagacttcctttgagaacagctgctgctttttggactgctaggattagtgcaaacaaacctcccccaggacatttaagggggttggcaaatgctgctgtgtctactttggttgttatagaggcacccttgcagtggtttcagccagcgttcctgtaacattggcctgcagtcaataaatatttcatgtctctttcccctagggtgtgctcagaagaccaccctgcaagtttctgcctctgtggtcacagcttcatgctgtgggcgtaaaggtgggtgtgcagccagaggcaggatgtgcaggcaagatccaatgtggttaaaatttgggatcactagtctggctttagggaatctggagactatttcatgttaacactcattctaagagagaaagcatgtccatcagaggattatcattaagcatcagtgtgattcactcaagggttaatagaaagaaacattcataagaggtgaggtttcaggttaagagagaaataggagcctcttgttcttctcaccagagtgtagaatgtcttcttccctttaggaagaagaccctcaaagtttccagaaggttccaaagtttcctaaaggacccaagtgggaaaggatccatgtctccttagctctttaaaacatgtcatgaatcaggcatccaaacaataatgcactcagtgactgagtgaacatctagtgaaccgaatgattcagagattggtcgagatttattaattgcctaaaaaagagactcaaaggccagggaaagtagagccagttttgctttgcttaagaaaataagaggaaaaataaaaatggtgttgcacgttgcttttggggcctaatatcactttccctccaccctcgcagagggtaggtctaactcttgttagttatcatttggatggtttgcttagttattccctgtctgttttccatagacattgtttgagtacttactatatgccaaatatgccacaagtgatgggtgtagagataaataagacctggtttcttccctcaagaagcttgtagtctagatgagaagacaaacaattaaaaaaatatgctctatatatcccacgaaggcagagctggactactgtaataagtactgccaccttacttttgaacagtgctttttagttttaatgtagcacttaaagcgttcagaacatatttagctgccttatctaattagatatagaagtaaaccacctaaaaggaaatgaatggcttctaagaagttagcatttaaacctaagataccttgatgcttggtccaaattcccttttcagtgctcataactcagctgctgaatatgcagcttctcaaggccgtgcctcttaccttaggcaactaccaaggttacattcattcccacggtaccctgaggccaataactagctgattcagaaatacaatggcctgacccccttgccacgatttttaatcaatatgaagggccatagcagcttcaaggcacccctaggatcagctgaggccccagctgccgacatagagaagacaattttctccctccaccctgcctttttcatttccttacaggtagggacacagatacaagacaatactctcgactaaatttgaattctagataaacaataattttttgtataagtatgttgcaaatattgcataggtatcctgtagttttatttgctaggtctggcactactatgtacaattgtaactctgaagatcactccctgtgaacgtgctgtgtgctactctcagcctcagagtgttgctggggaatccattctctgggaaaaggtattgtggtcaggaagcacaagggagggcctggactgccagagaaaagtgtgaggggaataagaagaggatcctctttctacaatcagagatgaaggcatatttcaacattctcatgggcataaagaagtttatactcataagcaaggcaaaattcaaaagtttcagtggctatacaaagcctaaaatattctttatccaaagcgtgatcttgagggcttaattctttgctcagcctcccaaaacattagctgtatgtgtttgtacatataatactaaggcacatggactgtcttttcctaaattatgcaaggcatgtgatcaatttggggcttattaatgacatttctgaaagtctctcaaaaagttggtcagcctttcttcataaaacacattttttacatgttttacaaagtgccacatgcacctggcctttctgctacctcagcagctatttcttcctgtctctttggctagctcctcttttacctgacctgtaaaccttgtgggaccccagggaggtaaactcacttcctatgtgatttcacctccgccttacataccagatgtatgctgacgacttccacatttaaatctccagcctcaacctctcccagaatttcacattcacgtagccaactgcctgttgcagcaattctatattgctacaggatatctaacaggcatctgaaggctgacatgttcaaaactcaactcttgttcccaaaccagttaagcttccagacttctacagtttaataaacagcatgatgatttattcagtgactcgagccaaaaatctaggaatcattcttgtgtctttcctttctctcataaccctcatccagtacgccagcaactccttttggctaaacctttaagcaaattctgagttctttctctgtctctactccatatctcatctttggcttgacctgtcgctatatcctctcaactggtctctcttcttctcactacagtggattttacagagaagtcaaagtgaaattttaaaaacagaaatcacgtatttttcctgctcagaactcttcagtggcttcccagcccactaagatggagctagtcctttcctccctctcttgttccatcccctagtctcttccacctcactaactctgctttaacccaatgcctggaatgcctttcccccaattgttcagctattctactccttctctcctcagagatgccttccctgatgactgtttgaagtgtcttcccctacttactccatctcatccccttcttatttttgttagtgcatttttcatgctccttaattatcttgtatactttggtgttgattgatttcctcagggttatataagtaagtctgtttccccccaatagaatgtaaacaccttgtgtaaagacccttcgcttggcttcttcactgcaggatttctggttcctggtgtggacctgccacaaaggaggtactcgatatttatttatttattggaatgacaatattccctattctagaaaaggctagagggttgaaagtaagtgaactatacaattagccagaatgattagtcaagctttaattctaataagctctccaactggaatgctaagtttgtctgaaagtgcaattaattctctggccgaacatgaaaaacctcccaacgatttaccaatttttcagtaaggtaaattttgtagaaggattaggaaagccttaaaccctaatgtggtatcaccatgtttgcaagctcccctagacaatttatctatgcccttgctggatgtggtcaagattctaaggatctgccttatgagcaacactaaatagcatattaatattaataaatatctgtatggcataaaactgagacattcaccagcaaatatacaaatacataactactctttgattaattttaggataatccatcaaaagtaatgtgaatattatactttcttttttccaatattaaaacatttttaattgacacataattgtacatatttatgggatacaatttgatgtttcaatacacatatatgttatatagtgatcaaattagggcagctagcatttccatcatctcatgtatttatcatttttttgtggtgagaacattcataagcctctcttctagatattttgtattatacaatacattattgctaaccatagtcaccctattgtgcaacagaacactagaacttattccttctatctaattgtaacttgtacctgttgacctacctctccccatctttccttcctcccacccctccccacttagtctctggtaattactgttccactacctgcttctacaatatcaacttttgtatttgtttttctgtgtttgacttatttcacataaaattatatcctccaggttcatccatgttgtccaaatgacagggtttcattttcttttatggctgaaaagtattttattgtgtatatttaccacattttctttatgtgtttatccattgttggacactaatttgattccatatctgagctattgtaaatagtgctgcaataaacatgggagtgcagatacattttcaacatgtatatttctgttggatatatccctagtagggggattgctggataatagggtagttttgtttttaatattttgaggaaatttcctattgtgtttcataattgctgcactaatttacaatcccaaaaaccatgtgtaagtgttcccttttctccacatccttgccaatagttttcttttgtcttttttgataatagccattctaactagagtgaggtggtattttattgtggttttcatttgtatttagcataaatgattaatgacattaagcatttttttcatatatctgttggccatttgtttgtcttcaaagtctgctaaggtcttctgcccacttttaaattggattatcattattattattatttttgcattgagttccctttatataccggatattaaccccttgtcacatgtatagtttacatatattttctcctatcctgtaggttttattttcactcttgtttcattcactgtatgaaagctttttcatttgatgtaatcccgtttgtctatttttgcttttgttgcctgtgcttttgaggtcttacttaaaaaattttcacccagcccaatgtcgtgaagtgtttctcctataaaaattatgctgtgaagcatttcttccagtagttttatagtttcaggtaatatttattgattgaatgaatgagtatggtcagttttgctacaacagttgtttcgaaaaccctaatttgttccaactccattgatagattaggaaacaatttgagcataatgtaaattttgtgttgactcatatgcaatttcatctgtgagaaacactagatatttcagctgaactgagctatgtgggaatacgcaatatatacatacacatacctgatgagatcaatgagccatacctattcatacctggcattacaattttccatcagatacccctccttcaaacatgttgtggactaaattgtttccccctaaaattcatatgttgaagtcctcacccctaatataactgtatttggagatgtgggcattaaggagataattaaggttaaatgaagtcagaaggatgagtccctaatccattaggactggtccttaaaaacaaaggaagagacactggagctctctttcccctcatgcacagaaaaacagtaagtgaggagaaagcaacaaggcaaccctctgtaagccgacaaaagagccctcaataggaactgaatctgctggcactttgatctgggacttccagcttccagaactgaaaaaataaatttgttgtttaacccacctagtctgtggtattttgttatggcagcctgggaaggctaatacaaaccacttgacaatacctcacaagccacaaccctttctattgctaccctactcatgcagcgcagcatgcatcctcctatttttgtccctctttttaagcttttttgaatttttcctccctgttctcttttctttttctcttgatctttcctttatgatagaagctttttttctcagtttatttcttctcctcttcttttacacagaacacgctagaaacttaagtacaagcaaacttcagacccttttgaagg

SEQ ID NO: 34 - DNA, 22850 bp, Mus musculus
  source 1..22850: mol_type = genomic DNA
gcaggcgtgcacggagcagtgagatcactggcgttataaatatcccggtgccagcgccgagatccgctcgggtggcctctctctctccccctctccctctcccttccccgaggctatgtccaccctgtgcggcgagggaggcagcgccagaggcacgcagccgcgcgggggctacggagcccggagccagccctgcaagatgcacttaggacccccgcggccggaagaatgagcctgtccttgctcttcctcatcttctgcagccacctgatccacagcgcttgggctcacggggagaagcgtctcactcccgaagggcaacccgcgcctcctaggaacccgggagactccagcggcagccggggcagaagtagcgcgacgttttcttcgtcttctgcctcctcaccagtcgcagcttctccgggcagccaaggaagcggctcggaacatagcagtttccagtggagcccttcggggcgccggaccggcagcctgtactgcagagtgggcatcggtttccatctgcagatctacccggatggcaaagtcaatggctcccacgaagccagtgtgttaagtaagttgctcactctccaacaaaacctgttctgggagggacggtcaagattcctttgggccacaggcacctctaggagccctagcgtctgggactctgctggttctggaaagagtccggtagggtttcgtggagatgcgtctactcagagcgagcagacgcacccttctgtcttgggtagtaagcatgggtaagcccaggtgaggttaccgaggtgagacaggcagctcttttccagaatgcccgggccgaaaagactagccacccactctagctggagaagaaaaaaaaataataataataatgaaagaagtaacaatctttctcctggtacaatttctttctacttatgaactagaaccgcatttttctttaagcgttaagtatatctctattccctgtacataatttacgtttatgaaaagaacccatctgagtacttccattctccaactacaaatatcctatatatcccatattatgtttgtttattaatatctctatgtaactccgaatgcttaggtatctttcacacgaatacatacatatgtagatacatacatgcgtacataagcgcgcgcgcacaccaactacacaggtctacgtagaatttacgtgtacatgcgttttggaagggcaaagttctgcttgcaagaaagcaacatgatctggaaaaccggacagacagtattatgactaagtccggtgctgagtttaacaacatttagtaggctgagaccctgacaatgttaacctttggtttccagggacagatggagtaaagttcttaattttaaaagaattacagatgaggttggaaatggttgtaaattgagcataacttaaaaaaaaaaaacatcaaccacccaacctgaaatttttctgagttctctctttctcctttcctcttcgcttccacccccacccgcgttttctccattccatctgcttttctggaccaccacgttaatcactcgcactcccctcgctgctctaagctgctgaggtgagcggaggtttggagctgtgtgcatgcatgggactgtagttgtctctgtaatcctgcaagcagttttctcactaggttcaggtcgggtttccagcagggctcagtcctccagataaaagccacagcagggaccgctcagactcccatggagagcggaaatggggccaggagatagtgctgcgcagtcacctggctcctcttgtcttcctggtggctctcgggtgcacttcactagaccagcgtccccagaaactagaacacttttgtttactcagctccaagaaccacgggctttatttgttgggctgacagtcggctggggcctgtggggagggtttggaaattcaagcacaggtgggatggctggccgaccagtctctttcattgagttaagaggatcaggctagtgagatccggtggtagcttcccgacaggtgctgttccaagcctgcctgccggctgcttgctttgtctttggagagcaacacttcagtcggctgaggtgcagaaggagaagcaatgcacaacagagggccctggtctcccatcccattgagtctcagggcttccaatatagtccacattggaccccttctcttgacgttcgaaagaaactttggtctttgtgtatgaagggaatagtccgttctgataagggtggattttctgatgctcctcggagatgttacttctgtttcaatatttctgctcattctcctcattttgcagggttcagttctaccacaagacagcctttagtcttgacctcaacaattttcttagctcttgtagaaaaactttctctactttgttgctgtgaatgagcaccaagtatatataacccttgcttgctcaggagagaccccaatagcaggtagctagcagtaggttgggatctcctgtgcctggggtagctttggagtgctagggagctctggtagcagaacattaaaaaagcccattgaagctaaatgtggctgcagtacaggccttgctagaaggggttttttcagaaacataaatgaagaaactcgagagcagatcaacagatcatttatctaacgaagaaactagccagctacatattatatccaggggctaattttaatttaaaatcctcattgaaattatttaaaatcctcattgaaaggtgggcacaaaccagaggagatgtatcctagacagggacttataaaactttgtaagtagctttttcctaactcccaaccttgcaattttaaacagccattcagagtttaatttgtatctttcaaaagactggcatgtatgcatgcattcattcgttcattcattcatgtacccaatgtaggatgtctgcctcagaatgcgtgttttggttacttatgtgccatgttttcttttcctttttttacattttctctggctttgccttccacagacaggtttttctcaaagaaaagcataacttaagtctcatagtcacagtcctttcggttatcagtacttcccaacacagctctctatgaattgattttatgtgcagtggaaaggcatgggatttggaaacttaaaatggctctttacacttaggtagccatggaagaaaaagcagcatctacttgcaactgattactacagtgcaatatatatatatatatatatatatatatatatatatatatataccttagactatgtattgcttagactatatgtggaaacgtgtttttctctcacaagaaagactgaaatgcattgggggaaataaccctcagtatgaaggtgtttttgttttgttttgtttttatgcctcaatgagcctttttttttagataaaatgtcgatttttacttgataataaatatatttgccaatcatgaagatttgtttagttttactatcaaaaccatgctctagccacagatactgaaacgtccctttcggtacttcaactagtcaggccctggtttgcctcactcaatagtgggtaccatgctttacagacagaatatggtatctggcatcttgcatatgaacccttgtaggaaggaaatgctggggaaagatgaagaatggacacaaccaggggctatgagctctaaccctgaagagaaatgaacagctgctttcccttacaagctgtcaagtctagcttccatacagtgctttacttggcttacctggggccattaaaactatggaatgagatagcagttcagagggaaagctttaggtgacagctattcagagcagtcacacaaaatatgaacctttcattcattcacattttgactaagagagtcctgaatgttacactttgttctgaaaatctgatttgactatccatttcaggatcatatgctcatcagacatcaccccaggctggataagccagaatttaatgtgcagagaaattccagggggagatttcatcaataatttaatcagcaaaagacagagctaaattggatcattcaagactgagatgtgataacttggcagaggagcatgtcggttaccatggatgagagtagaaagacttcagtgtcgccatgtttttcttttgggaaatttcagatgctttattgaaagcttctgaacacacgtgatatctatgttctcttagcttttattctcctagtctgtaataatgtgtcccccatcatcaatagcatcttctgatattaagagagctaaagaacaggaaagaaaactatgtatgctttttttcttactgagggaaacttattgtaatcatcctttgaagtaggcagattaaggaccaatggtagagacaccaagaaactttgtctctttcaaccttgacattttactaagaaaggcttcttccttccatctctgtctctcctctcttctcctaatcatagacaccttgggaaagatgacacaccatctttagtacctgcatatgagtatatcctgagttctccacacccatccccaaacaggagagagacacaataaatagtaagagcaactcaaaactcatgaccctgcaagggggttgtccccaagacagtgcaacatcaaagatagtcactggtccctacaggcgtctacttgggtgtccccaagacagcacagcattgcagtcagtcactggcaggtctgtgagacaatcactttccataattatgcttaaggacactgtcttagcatccacagggtgaataacaaattattaccttaagtttatcatctccaactcctaaaaattagaggacaaataatactgacttcataaagtcagctttagcgaaatgcactttggggtgtattaattcacgatttgacacacatgggtttacagtatttcctagaattcttgaatgagttactgagatgtgtgctctcttggagagagaaagatggaaagcccattgtgagtcatgcaggattgtgctggtattctagaaaaccagactgtgtgaaatcattgatattagtttagaaattatgattttaacaatgactccaatattaggtaaaaattacattaagatttaaaagattaattacaaagttgcctatgtgaaaaacaattcttatgcacacacatatgcatatacatgctcacttacatacatgcatgcatacacacacacacacacacacacacacacacacacacatatatatatatatatatatacttattaagcttttaggaacactaaatcttaaaattacatagtctttccattatagggcaatatgtgatttttatcatacagacaatgcaatgtgtaataacataacacttttataggcattacttcatcatctccccatatttaaaattaattgcaatgagaatgtatataatcaacacacatagaataaaatatgcagtgtattgagatacaagttaattgagccaaaatgagttcttaaaggaaggtcttatggtcggaaaacagtcgtttagttaaacaaggacctatttttttttaaaccaagtcaatatttataaagccatttaatttcaacatctcaaaaggtaggctgaaaatataagaatttgatctttgctgctgaatattttcattaatgtaggaccaatctacatttataaaaatgaacacttccgtaaggagaacagaaaactctgttcattgtcttcctaaaaattaagatacagaaaaaaattgaatttaaaaaggatcagaaaaaatgtttgttggtctacattagtatatgagtgaatgcacccttagcaatctagaggcatgagtaccctgaagacaaccatgaagagctcatggtccaaccctattgtcttcttatgtcaatcatttcacacagacgagttctcgccgtggcccttccatacttctgatcacatatgtggtgtttacatgttcaccccgaatcagctaaatatttgaactctttactgaagctttcaatattattcccaaattctgattcaaatatagctttttgtaagaagcgatggccatattttaataataatatatcctactatgtctttttataaagctaaagctcacgtgtggagtatattttaaattttagaatgttaaatacaccatgtaattatacctattatactctatataaactgatgtatgtaagtttacaaagtattctgtgtgctttgccagtatctggtaaagtgacgatgcttctaagttcttgcatgtgtatctcaatcaaacaatttttatattaggctctacctaaataaaaattagaaatatttgaatggaaatgatatgtggaacagtagtgtctgttaacactagtgtctgttaacactagtgtctgttaacataagcaaaagcagctctgggtaaggtgggtttggtttggtttggttttgttgttttggttttttatgttctgtttcttttcattctcctgaaaagacacaacagtaaagtggggcctgcaatggttttcttattctgggctaagactgtccaaaacaacagtaacaaaacagttccccaggtgttcccttttctctgtgaagcttctgagtgtttaaaggcggagctgagtgagcactcggtaatatttgtgagaactgcagatgttcagcttgcgctatgcaataataattcttcaacaaactgattcacctgtatgcactcatcgccctcgtgggcaaattaactattgtgcacaagtcctgtaggggagaatgctacttcaaggacacctgaggaaaatgtcacctccacagaggtatttccacaataccctaagcagggtacatgcttgaaacaattgtgtccaagtgttgagatctgctctctcctcctctgagttttctttgttttgttttcctctgttctaatgaactatattgctctatttcagctctaatgaaatacactgtttctatattttaacagtatcatgtgtataactaacaagaatattctccccactcatatttatatataaagtcttttgtgactttatatactaggcaggctttctagctatgtgcaaagcacacattgaaccttttaaaaaccctcgaggaattgcagttaacagtttcttgactcagcacatgtgggtcttgaaatgattgcaggaaataaagggactaaggcttgacacacagactgtgcatcacacagtcacaacatcgtagatcatcacacttttctaggaaatgatttaaagcgcaatacgtctcaaaacataattcattaaacaattcacataagtagtgtaacttatattttcagtatcttaggtatggtttttatggttttaaaagattgttttatgtaagaaattataactttccaggcttttgaattttttatacttgtggaatagtaacaaattagaattaccgaaaaaaatattttaaaagcctctctcaataccttcagggcttgagaaggatctattgtcaaatttactaaaaacaacctgctatgtgcaaatacagaattactgaggaagcagggtaaagttcctgaatcttgaaataagtcattccgagtgtacacgcattgttagccattctttaacacgttggaggtcacaaaaggtcattatatgttcttttatttaatctcagtagtaaggactgagaacagttgacgtagtagacattgaattcttcacagttctgtgtagaagagtctgtgttttattttgggatttttttgtcatcctaggtattttggaaatatttgctgtgtctcaggggattgtaggaatacgaggagttttcagcaacaaatttttagcgatgtcaaaaaaaggaaaactccatgcaagtgtaagtagaaacccctttgtgtttgttgaaaagtgctccaccggttgtgcgtctgtaacaaagtgaagagattgtttttgaaatgagtggataagatagaccatttgcctaaggaacttatttggtttttttctggtaaaaatgatatgtatgtataaccaattgtgaatctgtctgtaagtcattattggaacatgtctttgttttggaaacaaatagaaccttcaaggctgtaaagggtaaatgcacttgtaaacagcctttgcaaacggattgccattgtgagacttgtcacaggagtgagctattccgtggcctcacataaactttacatttggtggcatgtgtgtttaatagacagaggggttcttaattgattttacagattactcatgatattaatttgaggtctaagtaatatatgtttccatgtaaggaagtaaaggacaaaagcgacacccgccaagcctctcacctcccagagagaaactgtgcttgaggaagcaggggcatttctgtcttgtctttttttttttttctgtcacttcaattataattacttaatactaatcttgcattcaaaagttttcttcggagtgcttacacattttgtaatcattttaaaaattatttgcttcttagctttttaccacatctagattctgtttgtattagtgtatatgtgtcacacttaaaagtaacttcgggcttttttgtgatgaaagagatttttcttaacacgacataaatttaaaaggcaattgctccttaaagttagtcctttaattaataggaaatgactagctgaatatttcttttgtaattttcaaagggtacagggaaatctaactcaccggtgaaaccaattgacaccagcctctaagccctgattctacagatctttaagaaccaaccagaattccacgcttttctatatggaaagctccacaatgtcctttcctttgcatctgaaagaattagtaacttctgaagaacactatatctatttggagttttgtgagatggtagatataaagtccttaggacagcagttggggccttgtgagtttttaagaaacagtgtgaattattaaatgcagtaagctaaacataatgtaatgtagcaagccacctcaatctggaattaatgagaagcctttcttaaactctttcatcattaatttcaagagttataaaagcaatttatttcgtttctgtgttgttttactccagtaatgactaacacagttttttttttaaagaaagttataactgaacaagtaaaagtcacatttcactcatttctgtgggaaaaatcagacatcactcattttgttagggataacgtttgatcactaaaaggtcacatccaggttggacaataatgacttttcattgttctgctttaaggctctaaagccttcaaagcctcagtgtcctaagatccgagacaagtaaagagatcacctcttaaaggtttgtctgaggaatgaaaaattgtaaccctgaaaatgttctcatctgcgtaccagtgcatacaaaaatagatggaactcgggccagcgagaggataattgccacagaaagcaaagtattataaatggatgccaattagaagggtcaagctgagaggttaggatacatgattcctccgtcaaatgcaagtaactaatttctagaaatttgacccaaatgtctaaggacgactggtggaaataatgcagataatgcaaaaaaacagccatctgttattcttcctcatgctggcaggccaaagttatttcatgggataatgacttttaaacagtacaaagcaagtcttgctcttgtcactcaatgggcttcttagatacaaaagtcattctggtgactttgagctgaactggagataaaaaaaaaaaataagccccacgattgtgtccaaacctccattctcttatctgagcttttattagcaccccacccccccccccagatggaaacctaattaaattatgaagtgatttatttttaaagaagtcgagtttagaaacagcattaatcatagcaattatcggctttatgcccagccactttgttttcctgttctcactgtactcaacatgttaaagaaacactcttctaactttcaatgtgtttacctgctttggttttgacgcttacagagttattatcgcccgaactactaacccacactcagtaacacatagttggtgagttgctttatagtaataaccttgcattggccttggagagcatctttcagcttcttcatccgaattgaaagtgagttagaagtgtaatgtagccaggtacctggcgaaaatgattcccctacagcggagtgtccatttcaatccagttctaatagcagagcttaagctggccaccaggctacagtgatgtagtttcacagctctgcaaaggaccttccactcacatgacctcatcacacactcaggcaagaaaagaggctggagaggggtagttacttccctaaggttacatagttgtaggattgaaaggaaactgtgtcctcttcaaattccctctttagatatccaaatggtttgcaggcataagttagtttaaaagatagcattgtgtttgggaacaaattacattgtttccatgtgcttataggaattattaagtaatagccttacaccatatgtcaaaaatgaagactatggcagaccattaagagcatttatagcacgctgttaactagctaagaagagggaaattctataccagatgtgtaaagttataaattaatttccactgtctcaccttcccttggattcaaaacatttattttggcccttgcctttccccccaaactctccagtacttgattttagtctacagaggaggggatatgtctgctacagagctttacacagacatattcattcggtgtgatattgggtcacttagggaacccctctggaggttaactttcaaactgaaaagaactgcctggtttccaaaaatcctcaagcactgactgctacttcttttgtgggtgtgagcaaagatggcggactgcaatggcctgcctggagcagcatgaaggaggcacgctggcgctgacagaattgtcccgtttgtcaatgtcacaataggagttttacttgaacctccaagagttgacaggtggtgttgaagctctctccccatcccctcatccgtgcgcgcacgggcacctctcctcaaaaccattcacagattccaaatgcgcaagatagtcgtcatattcccactgtgtgaatttcccagcacgcttgaaaagaatttaatttaaaaaaatatattttccatacaacctattctgatgttggttttccctcccctacctccttacaggatcctccccactccccacttcgccaaatccatactctttctcactggggagagagagggggagagggagagagagagtgaaagtttatggtctttttgtcaaaatgtgtgaggagctctggacaggagaagagcatgattgcttcctagagaggcagcagggttagtcagggtatcaccgtggctcccattcactgtcttaaactattctggatgaaggcccttgctgtgtcctctcaggctttcagcctgtcgccctcacgtttggggtcttcatggaaagcccgccacaggacctttctggctcttccaacacagtttaggtgtgaagagtgaacacctctgggtatgcagttaagcccagttccgctccacacttgtgtcacgttatcgaatagtctgcgttttgcttttatagttgaaataaacaggaaaattatagcggctgcccaaagtggtggctgtgttttccatgagactgtgtacagaggtcttgctgtagtgcctggaatctattatcactcgccatttaaacaaatcttccagaatgtgttctctggcagctggtgggtgatctccaatgtctccttatgatttcaaggtcaagcagcctcggctcctcagctatttagattagcctaaatcctactccttgggacgtcactgtttgcacacacaacagcctcttatctgctaggttttccttttgccaaggaatcaaatttgaaggcaaggtttccaagctcacaccggcagggtggggagcggggaggggagttcctgtcctcatggtcttctggtccctttggagtcctacagtctattttagtatggaaaattataaatcttgggaaagttggaggtcatatgtgcttcaatgttttcatgaagtatacatgatagcttgttacatgttgggaaaaaacttaactatccagagaaaggcatatggtcaaatggttattttcttatgtctctgggttttaggggatcatgtttggaaggaaggctaattgcagagtttacgaaacaggcttggaatgtgtgctgatcagccctgagtgaggactagaatattctcctttcctgagttcagagggtgccagctggctagccagtctggactggacgtccagcgctgggggcagtgagtgagcaaccaacagccccccaagctcagcatgcttagtaaaaggggaaaagaaagaccggagcaacacttacaattatctcctagaaacataacctattacaagccccacttcctggcacgatcacgggttctaggtatagaaatgtcattagcactgtaagagctcacttctatgtaaaaaggaaagagacagtgatttgccatccagaatgagtttgcagttaattcctgtaccagcctttaattttttccttctgtcaggttggtgagaaggactttgttgaagaaatgtggggaaaatgaatggacttgttgatcccaaatacaagttgtttaaagcaagtgtagcgcgccatcactctgatggcctaggagatggtgcttatcagtctttaaggacggaagaaattcagagtaagtcgtctatacaaatgtgaggagacttgtgagactatgccggggcctagcaaacacacagtggatgctcacagtcagctaatggatggatcacagggctcccaatggaggagctagagaaagtacccaaggagctaaagggatctgcaaccctataggtagaacaacaatatgaactaaccagtaccccggagctcttgactctagctgcatatgtatcaaaagatggcctagtcggccatcactggaaagagaggcccattggacacacaaactttatatgccccagtacaggggaatgccagggccaaaaagtgggaatgggtgggtaggagagtgggggggagggtatgggggacttttgggatagcattggaaatgtaattgaggaaaatacgtaataaaaaatattaaaaagaaaaaaaaaaagaaaaaactaccttcctctaaggaaagtttaaaggaaaaaaaaatgtgaggagacaagtcttaattttcagtgttacggaaagaactgcagtctcagtcaggaaatgagagctatgtgcccaatccggtacttggaactgtgggactttaggtgtcagtgtctttactcttttgactcaaagccaaataatagtatcttgattattgcaggaggtaaataatgtaggctgatcatggtatatagagtagtgcagttttccagggctattaaagaccccagaaatcaagcacccgtttccttcccctggtcttcagatactcttcttacctcgcctccaccactactatctagctgctggtgattcaagtccaaagcttccatctcccgcttactaaaatagaatctctgaagatacagccaggggtataagcatcttaaatctgctcgatgattaattttttaaaagttatattgatgtccttttaagttgtttattttgaagccatctgaatatctgtataaaaattttaagccttctgaggttatggacaactaaactataaatctgctatctgattgatttttaagacaattcctggttggcatttgccgctgtcttactggaatggttattattaaacccagcaatcccttggctgctcaataggaataatgaagcagagaagggtgagatgtcaagtgtcaagcaggagctatgcccctgctgggataacacagcagagctaccatggacctccatgggacatacatggtgaagggtaaagggcagctcctttgggcttgcattgccctacatcaggacacagctatacacagcaatactcgtaaaagtaaaggcgggagccaagcattactgaacgtgggcaggggagccagaagctgggatccatgtagtcagcaaactgcttaaagcacaccttggctgatacttgtttttattgcagcatagaataacattttaattatttgggttaagttagttctttctcgaatttataacttttaggaggatgaaggcaaccaacgaaaacatggtaaaatagataaatagatgaaacaccttataagctctgtgtgttaggtgccgtctatccaaattcacttcggttggcaccttgttcatgcactgcatcttcatctgtcactgtacattctgagcactgatatttgcgtagccctggccgggagctagagatccttggattgagctttcccagtgcagagattacaggtgtttggcaagaacctttaaatagtacccatagtttagaatggattccacactgggaaaacacgcagtagaatctaaacactacttatttatttgcttactgctttacttatttgtttctttgtttataaattagcccataagttgcctccttagcgcagcaggtagcccatcagtctcataaatcagcccacaaagtattagagttcactgttttcaaagacaacttgtgattatttcattttctgtttcttttctctcaatcccgacccctccctgtgatcatgtgctaaggccccccccccccccacagccacttcctgtctcacttttgctaccacgcttaccttctttaactccctccccctcttctggtctcctttctaacatcatggcctgtatccactcctacctctcacccacattaataaaaaaaaaaaaaaaaaacacctaaagactcaagagaacacatgaaatttgtctctctgtgtattgcctacctagcttgatataatactcttccaccagatgtctgaaatgctcgtgagttcactactctttacagcagaataaaattctactttgtgtaagtaccacacttccctcacccagtcttctctggatcatcatctggaatggttgcatttccttgctactgtggataatgcagcaatggaactgtaaatgtttctatggtgggatacagtgtggtgtctggagatgctcagggtcgtatagtaggtccagatagatttccatggtggccacattggtttacagtctcagtagtacataaactttcctccttcctccatctccactgtcatctgctgccatttgatgtcttgatcttgccattctgagatcaaactcaaagaagttttaatttgcagtttcccaatgtgcacttccccaatggctagtgatgttgaatgcctaaaaaagaaagaaaatacatattgataagttgtatttcctttttggagaattgtctgctcatgcccatgtattaactggctgtttgattttcttggtgtttaagttttacagttctttgtatattctagatactaactctctgcagcattctgcagactccctgatagctttctttgctcagagaaatgctccaatttcaatgagtccatctgttgattattggggtacactattccataggctacaggagtcctgttcaggaagctcttgccaggagctataacttgaaatgcattccctattgttttcctccgggagtttctgcactttgggttttcaggtgaggtctttaacccacttcacaggtatctttgtgcagggtgagagatgtacttataacttatttcctttgcaggcagaggtcagttttgccagcactgtttcttgatccctttattaaaaattaggtagccatagccgaaagtacagcgtttggcaataacaaattcttgctttccttagcatcgcatgtatcccctccctctgtgtaatgatctggatatttaagctagcatgatttaattgcttaaattttacttgttttgacagaaacagtaaattacaataaattagttggtttgaatatttcactttaatgttcaactcagggcctcttgattgtaacttgtttagacgcttgtaaaatgaaagagaaatacacagataatttaattcattaaggaagactggaagggcttatgtgcctatatagtgtttttctgtagaagctgcaaataccctaacatttggctacacagtcagcaacagttatcaaatcaattaaaacatatctgaaacaaagatggcaataatcctgttttctacttttctttctttgctgagacaaagtctcactgaactcctggccattctctcagttttactctcctgagtgctaagattacagctgtgtgccatcctgtccagcaatgacagtgatctgaggcattgctgccctagtgacagacagtgggtgaatgctaaagttatggctgatttcagtggctcatttagcatttgatttacctgtctatatcagacctttgataatgaaaacacctacggcaacttcactcttccccttaaggaagtaaagcatgcctgccatttaaaaagcataatctttattggaaaatgtcctataatttaaaggagaatgtagcatgaaattcccttagaaacactcagaatgtcatcatcaacttcccccacccccaagactcagggaaagatgcaggaggcagaaggagcgtaagagctcgagggtatggaggatatctaggaaacagggtctccagacacaacagggcagatgcacacgtgaactcacagagactgtcagcacacatagggcctgcacaggttaaagccagatggggcctcagaggtgagaggggattggacacaatctctcattccttttttttttttttaaggtatgttttctaatatttattatatgttaagtacactgtagctgtcttcagacactccagaagagggcatcagatctcattacggatggttgtgagccaccatgtggttgctgggatttgaactcaggacctttggaagagcagtcagtgctcctaacggctgagccatctcaccagtcccacaatctctcattcctaacccagaacctgtctccaaatgacagcttgcttgccaagaagagtcagttttttccagcggagtctcactggtgtacaaatcacacttaaggacaggcaggcctgataccccatagtagactcacacaaaatgaactcaggggtacttctgtaggaatttttgtttgttttatttttattttttctcatatttcttgtttggacacttaagaaacctcactgggcttttgcttgtaacttatggtttttgattttgtggtttttatgggttttgtttgtatgtgttccttgtgccttttctttttgtaaatcctactctcttttatttgcttgtttgtttgagagagagagacaggggggagagaggaggcatggagctggatgggtgaaaggtgggggttatgggaggaaataagggaggaaaagtaatcaatatatcatttgaaaaatttattttcaataaaatagtttttaaaaaaaacactctagaaagtaattttccaactttttaaaagagccgttgtatccactttggtaaatgtacatgtattgtgttaggcccatgtttcctggtcattcggctcttgagatgttccaaactaatcattgcattagagaaactctgtttagtcaccattatatctttgagaaggcgtgaataatgatggcagcctttgagatgaagctacattttctagtgagaaaggccagggaaagatttgtttaaatagttctggtacatcatagatgggggacatttttcaaacaaaatacaaattggaagtcaattaagaaaacccaaacaatctgattctctttactcgggctttcaagtggaagggttagtgagctgcacacagcgtacggggcatcagcgcggtgttatcactacatgggacctctgaaggatgggctgcttcaacagccaccacctttgaaggactttctaatgaacttcagagcatgaaaccttcagagaggagaaagtctctaagttgaatagttttagaggctgagtaagtggatttttcactcaaggatggaactgatacagtttttttaaagatatgtcgtatatgcatgctactatgaacatgtgcatgtgcatatgtatgtgtactacccctcctaggaaaaagagcgtgtctttacttacttagaaaccaggggagtaaacaagactaaacaatgcagcccacttcaaaaacctacaagccagtgtgagcccttgttatctggcaactttgttaaataaaaagagttttattgtttgagatgctaaaggttaaaaccaggtcctctcagatactcagagtctaacaccaaccggtttgcagctcaggtctgttattctgttattcaagaaatgcacaacatctttcttgtccttttgtggagtcacaaacagctgagatgtttaaaatttttattttagagtgtaactgcaagccaggtgtgacacacacctttatacttttaatcccagtatttgggaggcagaagcaggtggatctctgtgaccttgagtccagcctggtctacggagtgagttccaggacagccaaggccacggagagagcccctatctaaaaaaaaaaaaatcaaacaaacaaataaacaaaatctaccctctgtcagaagatagtttctgggagtttaatttctgggagttcgaggctagactgatctacatagtttctgtccagcaaggggtatatagtaagactttgtctcacaaaaaaccaaaccaaaccaaacaaacaacaaaacattgaaatcataagtatgtttatttaagtgagaaagccttttaaagagctcaatagctatagacaaagttaaattgaatttataaagaaagtttctttaataaaaactgggaacaaataatgtgccgcattattataagggtcatgacagcaccctctctgcagacactggctggcagtttgggaattaaagacaagaatatatatatatatatatatatatatatatattcttcatagccattgcaaaggagcttgcttgaacctaagtgaaaagactaaggagaccgctgggtagttgtgacacaggactttgacctcggcactctcgaggcagtggcagaagcaggcagatctctgtgagtttgaggtcagcctggtatataaagcaagattcaggatagccaagggcaagactttaatcccagaactccagaggcggagcagaggtagacagacctctttgagttcaaggctctggccttcagagcaagttccaggccagtcagaggctatacagagaaacgtgtctagaatccctgcccccttcccccaaaacacaaacttggggcatctgttacacagagataaaaatgttaaaaaaaacaacactactccaaagttggttgtgtctttggatttgcagaggtaaaattttgtttatgggagtgttattaatggatttgtgtacttttccttgagggtccagacgtttagacttcagtgtgtgatcttcattacggagaaaaattgggtattattagaaaaagcaaggcacagaacattttctacatagacgcacaccacagcagggaaagccagctgttattctcaaacccaagaagtctttacaaatgggactctctgaaattgtgagtcttgttagtctggactagtacaggaactcctaagccattcaaagtttggggttctcgtatgtttgatggaaactatcaatccctttcttgggaatatgtgttcattcacatagtggccatgtaggcagggcttctgttctgcataggagccaaaggacaagagcttaaacagtagtcccaggtcatggtaggaaaaccggagttcacccgcactgtccctccgtcgtatacctccagattactcaatttagcagacaagctcttttggggctggcgccggcttgcttagtcagccccatctcttgtcctttctgccatacatcccaagtagaaatcacactgcagcactagtaagtgttcccagtgtgcgcacacacgttcatgttcccctggggctctttctgacccatacaccattttactactgtctcatgcatgacacagccacaatgctgcgcggctctcctgcgctcccacctaccagctctgctgctgacattgtactccctgtccagtgaggtcacatgacctgttatcaacagctatgggtgtggataagactcaggtgaaatgttgccgaggactcttcccggcatcagctgtactttcttgaaccacatatgtgaagagatattttttttcctaaagaactttaacacatgcaatattaatagagccatatgccaccactttctcggcatcaagaatcacactgataacactgaaaatatatgcctgtttgaaaagaatcacatgactctgataactatatcccttgtgggaacgtggtcctctgctaacacaaatgcatgtttgattgggcagttgtttcttaggaatcaacagatctatttttttttttatgacttagaggggaaaatattaagttaaattttaggtacaatttttaaaaacagtaacagtatttatacatattaaaatgagagttcatagcgcttaaatagttccaagtatttgtgttaacaatgatactgtcatctaagcataatgaataaaaatggtgttgcagaggtaacttagaaatatataacccaccctgaacacacacacacacacacacacacacacacacacacacacacacacacagagctaactctaaaaagaacatatctttataaaagggaacagaataagggtatcccaaattcatacaatttttgtattttcaaaacttcatatttattatatgttgaaatattgtcacagcttaaatgttctcttccccccccctccccccaggccaaatttacggatgactgtaagttcagggagagattccaagaaaacagctataatacctatgcgtccgcgatccacagaactgaaaagacaggccgagagtggtacgtggccctgaacaagagagggaaagccaagagaggctgcagcccacgggtcaaaccccaacacgtctccacccacttcctacccaggttcaagcagtccgagcaaccggaactttccttcaccgtcactgttccagaaaagaaaaagccaccggtgaaaccaaaggtgcccctgtcgcagcctcgcagaagtcccagcccagtgaagtacagactgaagtttcgctttggatgatgctcgtccatcctggccttgtgggaaacaactctctatacaggcgtcatcggagccctgaaggaaactcggatacagcatccctctgctgtgcctacacgtgtggaagtcaggtcattttgtttcgctttgactggaactaaactgctttctaaaatttaagtcgaaacagaagtgggattctctgtagcgatccagggagctcatctcttcagatcaccgaggatataaaggcttcgtgatttgaggatggttagcattctgcgttttcagaccagtttgatagcctggaactatgtacttttctcatttttacagatcaaccggaaagaacatacatgatacatgtttatttttgttttccaaagaatattttgatgcagataaaatattttataaacttttgtttttttaaggtacctcagcattgagcatattttcttacttttattattttaattaacgtgacacaagcagttggtttattgctgttcatggattataaacattttaatagtttgtgtggtaggatctggatctcctttgcgtttttctctctactacagcatcgtttactttattttagctatacctcaagtcgtataaatttagttctacattttaaaaaaaatttttaaatgtgctttcgaagccccaaaaggctcagcttggaggtgtgcattgtgtatgaagttatggcattatgtggaatctggccatattagtggctgggctcaatgatcagaaggaggaaaatatgaggacgttttgatggatttaaaggctttatgtaaagaaaaggacagaggccaccgcacactaagtgtgcagcgtccacagagatttaactctgtcttttgcttcttctccttttatctgccccctgccctcattcaagaccagctgaaggaataagttttattctgtccaccaagcatacactaggaaactggagtgcttaaaaatacttctataactccctgttatccttactgtatggacccacagggagtaactaatcagggtgtgtgtgtgtgtgtgtgtgtgtgtgtttgtgtgtgtgtgtgtgtgtgtgtgtgtgtgtgtgtgtgtagctgaaggagatgaatcactaaccaagttttcatgtcaagtctcatggtcaaaaatacttctactattcagtcaaataccctttgagctttctaccctaaaggtaatgactggaatgagtgcatctgctctgctctaagaaaacctggtgcaccctagaagcttctgcccttgcgacccaggagcttaattcgggaatgtgatgagctgaaaatgacacttcattctcaacccaaattccaaaccctcaacagaaaccacagacggtttagcttacaaagagttacaaaatgtattttcttggataatcctttttatggagatctatgaagtataagtgttcaccttatattcctaaatgctgcaataaagaggcgtagatgaccata

SEQ ID NO: 35 - DNA, 38817 bp, Homo sapiens
  source 1..38817: mol_type = genomic DNA
agcgccatgcgcagactcagttcctggagaaagatggcgacagccgagaagcagaaacacgacgggcgggtgaagatcggccactacattctgggtgacacgctgggggtcggcaccttcggcaaagtgaagggtgagaaccccgcgggactaggcttggccccagctgaggagccgcacgacttccgctttccgcacctcttcatcctcccccgcccgctgcgtcccttctttccagggctgggcagcccctgtcccggatcctgcgggagctctccccagccgccgcggggctgcggcgcggccagcacaggccgggtgggggtgggggtggggtaggggccagtcgccatggcgacggcgccgcggcctgaggggctggtaggtacgaggggctgggatgcgaaggtgcaaactttcccaggtggggcaggcgggcggcgcggcgcgctctgggtgctgggagggggcgccgggcgcgatccccggggaggcggcatcttgtgcgcccgggttgtgctcccttggctcagggccagcccatcgcttccttggcggtccttggcgttgtcggtatttccgtcctctgtaggaggctgtcgatttaccggcccctgctgtttcccgagtgcgaaatgtgtttccgcagaagtaaggtttctttgtgggtagccgacatcattttttttaaagaccatgtcgtcggaaaggatcactggtttccttcggagcagttaatgagtataaactggttcagtatttgcgatgcatggtttacgttctgaatgagactgtgcctttagtgtttccgaattaacaggagtttctccgtgcgaaacttcgttgttagttcagatgttgcctccagatagtatttattactttattagtacagttcatttccacttattttcaaaggttatttgtattctaataaactctttaagtgcacatcattcgaacttttgttttaagaaaggtgtattgggtgcattgtacagcattcgggtgacgggtacactaaaagcccagacttcaccactatgcagttcatctatgtaaccaaaagccacttgtacccctaaagctattgaaattaaaagaaaagtgtggactctttcaaaacactattctggaaataaacttgctctacagtccaccaattctggcaaaaaaacgtttaattgcaagttttgtaaggcatgattttttttttctttaacatatttgactttgttataagggatgcagagaaaggaagtttggaactgataaaaataattcatgcattggctttggataaataatagactgacttgcatatactaagttcttggtaaatatttgacttgaaagaaaaaaagtttgccaaagtctgtacggtaactcaactgagccttactcttccagagctaaataaacagtttctgattttatttagggttagaagagaagaacgcttccttctcttgccattttctgagtcatagaattggaaaattgttgtatatcccacagggaagcaactgcctgaaccttcttatgaaaatctgcaaggcggacaatgtcaggaggaagtaagaagcaaatgccagaattgggtaataacagctattaggacaggtccatataaggccagtaagatgtttctgtgccatggaagttttaactttatctttggctatgatatttcttgttagcaattacaaactgctttttagtttacaagtgtttgtaaaaaaaaaaatgttcatttttgcccccatcccttcccagagttctgcctggattagggtgttcatcattcccctaatatagacttgaatgcttgaataaagtcaggtctatttttttttcttttttcttttttcttttcccgagatggggtcttgctctgttgcccaggctggagtgccgtgtggtgtgatcttggctcattgcaacctccgcttcctgggttcaagcagttctcctgcctcagcctcctgagtagctggaattacaggcgcccaccaccacacccggctaatttcatatttttagtagagatggggtttcaccatgttggcccggctggtctcgaactcctgacctcaggtgatctacccacctcagcctcccaaagtgctgggattacaggcgtgagccactgtgcccggccaggtctgttttcgtatttgctaagtggtttttggcatggcaggtagtaaagcaggaagagatttttcatcttctggatttgatctgtgatatggctgtgacacgaatgtctccagtgactttgctgtttcttaaccttcacttccccacccacactaacttctcttggagtaccatattctgttaaagtcaacaaactctccaaatgtacaaaggccaatattagtccaaggatcataggtttcatagatatggttaaatttgttcatgatcacatttgttgatgttgatcagaatctttaacctgttcattttttaagttaacagttgggatgctttttgccacaagtaatagaaaatctagctttgcctagtaaagaacttatctgtggttctctttccacagataagtccttccagcagggaaggccagcatatctcttatgagtctcattggctcatccagtccctctggctaggaatgccatgtgccagttggcttatgcttgtattcctaagcaggcattagcaagggggatggcattgcccttggaggagtatgacccaccctttgatgtgtgtgtgcaacagaggtgggtgggtgggagacatcttttttttaaaatttgttttattttttaaatttttctttaagttattggggtacagatggtatttggttgcatgagtaaattctttagtggtgatttgtgagattttggtgcacccatcacctgagcagtatacattgcatcatatttgtagtcttttatccctcacccctctcccactcttccccctcaagtccccatagtccactgtatcattcttatgcctttgcgtcctcatagcttagctcccacatatcagtgattagaacatactgtgttggttttccattcctgagttacttcacttagaataatagtctccactcttatccaagtcactgcaaatgctgttaattcattcctttttatggctgtgtagtattccattttgtgtgtgtgtgtgtgtgtgtgtgtgtatatatatgtatacaccacagtttctttatccatacattgagtgatgggcatttggattggttccacgattttgcaattgtgaattgtgctgctataaacatgcatgtgcaagtatctttttcgaataatgacttcttttcagaagagattgctggatcaaatggtagttctacttttagttctttaaggaatatctacactgttttccatagcagctgtgctagtttacattcccaccagcagtgtagaagtgttccctgttcacccttttcaacaaattgtgctgggataattggccagccacatgtaggagaatgaaactggattctcatctctcaaccttatataaaaatcaactcaagatggattaaggacttaaacctaagacctgaaactataaaaattctagaagataacattggaaaaacccttctagacattggcttaggcaaggatttaatgactaagaacccaaaagcaaatgcaataaaaacaaagataaatagatgggacctaattaaattgaagagcttttgcacaggaaaaggaacagcagagtaaacagacaacccacacagtgggagaaaatcttcctaatcaatacatctgaaaaagtactaatatccagaatccacaatgaactcaaacaaataagtaagaaaaaacaaatagtcccatcaaaaagtgggctaaggatatgaatagacagttctcaaaagaagatatacaaatggccagcaaacatgaaaaaatgctcagcatccctaatgatcagggaaatgcaaatcagaaccacaatgtgataccacctcactcctgcaagaatggccatcatcaaaaaatcaaaaagcagtagatagattttagtgtgcatgtggtgaacagggaacacttttttttttttttggagacagttttgctcttgtcacccaggctggagtgcattggcgcaatctcagctcattgcaacctctgcctcccaggttcaagtgattcttctgcctcaacttccctagtagctgggattacagacgtgtgccaccacgtcctgctaatttttgtatttttagtagagatggggtttcatcatgttggccaggctggtcttgaactcctgacctcaggtgatcccacccgcctcggcctcccaaagtgctgggattacaggcctgaaccaccgtgctgggctgggagacatcttctaagtacttggatagtgtggggggacagggtagacacctacacataaatggatgttgttaggagagagaaagggggacatggatactcagtgaacacacagaaatggccactattgtggtgatgttggtaattaaacaccaacagccttaattatgcaagaattcttgcaaataatagggttaaccatatgtttagacaatttggagtaaagaaagctttaaaaattacttatacatattggtaaatttaacatgaagagggatctaataaaatatatgatattgatatgcagaaaaagtctaagtatgatattccatgcttataggaaatttaattttgcggggagagtaggctggaagttcggagtgattgtttcctgttacaggccaaaaaatttgtttggttacttagtggtagcattttgagaggaaagtttacagaaaactagggttattttgtgattatgcttgaattgtctttattgtttccaaggcatcttttttttttccttctagttatcaagatgttaggttctgtgcccttgtgggccttccctctgcccaaaaaaagcatggatgagcagagtaatatcattaaaatggcagtctttgttagtttttctagagaagatggtctctttggtaggctgggtgtatcttcggcaaatgagttatttatacatataaactattaagttggcaagtatttcttttttttctttttctttttttttttttgagatggagttccactcttgtcgcccaggctggagtgcaatggtgcgatctcagctcactgcaacttccacctcccgggttcaagcgattctccagcctcagcctcccaagtggctgggattataggcgcccaccactacgcccagctattttttttttgtatttttagtagagatggggtttcaccacgtcggccaggttagtctcgaactcctgacctcaggtgatccacccacctcagcctcccacagtgctgggattacaggcatgagccaccatgcttggcctaagttcgtaagtatttctgtgtaaaactgcaatttcagctacataggtactttgtgaatgaatcatagtagaagttatttaaaaattcctttaagtaaaaattataaacatgaactagagctatatatatcagtgtgaatgaatcttaaaaatataaggttagacctcgaaagcaagttgtataagaatatgtatagtttgctgttatttatataaattttagaaacctacagaaccactcatacaatgctggtagagtataaattggtatcctacctctacatgagagagtgacagcatttattaaaattaacctaacaattcaacttctaggaattattttatagatgtactcgtgtatgaaataatgggttattcgctgccatattgttgtaaatattaatacaaaactttcgaagtaacctttctaatagtaatagttatggtttatccatatagtgaaataccttgcaaacattaaggaagaaaaagggaggaactttgtatattttagagaacaatttccaaggtgtatttttaagaggaaaaagtagaacagtgtgttcaatatgcctaccacttatgtataaaaggcaggggcaaatctgtatcttaaatgtgactgcttttatatatagagtatgtctctttaaagatacacacaagactggttacgttagttgctcagtataggggactaggtaaaggaggacattgtgttgcaccatagatgcttttgtacttttgaactgtgtgtatagtgcaggtattgtgttatcaaaatatatgcaatgacatttgtaaaaataaatatgaaaaataatgttactatattttttatggattcctacccatgtaaaaatatttaaacgtgggaaacacaaacaccaaattcaggatagtggttacttctgaggacagatgaaggataagggaatctgggaggagtcatgcagggcttgagttgtatttgtaatgttttattgcttaagctgatggtggctcatgggtatttggaatgcccttggtgtgcttgaaatgtttgtttgctttcttaaattacgatctatagcttttaaagcccacccttccccaggattaagctatttccttaacacgtttttattctttcaattttaaagtgggaatgaaatggttaggtgtctagaatatctttagtagatatttctatctttgctgcttctctgtcctattaaaatcctctgtttcaaagtatgatcttgtttcccttcaggattatatatctaattagaagagcatttgttacaatgttatgcagttagacaaagttccctttagatagcaatagcatggttgttagctaatatttagttgactaatctgctattcttgtgagggggacattgtgaatgctggtaatatttgctctgagtaatgtgcaagtcttccgtggccaaaatatctgtcttccgtttcatttaaaagcaaaaccttagcactattctaaaaactgacagtctgaagaataaagtttgaattttgaaaaaggggggaatcccttagtagtgcatatgcctgacagagtccatttactacattcattgattgactatggaacagcatttagtttggctacaactgagtttactcactggggagaatatttagcctggttttgagaaaacagtttagtttctgataccatgccaagccctttgtccctctcactgcacagtgatggtggggagagtggataggtcaaaagacttgggagtcggaagacctgtcccaacttgatcacaatagctttacttccacaacttacagaatctcttagagcctcagtttctttatctgtaaaagacaatacctccatcataggtttatgctcaaatgtgataatgtgagtgtctcctaagctattagatgccatattttaaaaagtattatgctactgaaggccgggtgtggtggctcacgcctgtaatcccagcacttttgggaggctaaggcgggcagatcacgagctcaagatattgagaccatcctggccaacatggtgaaaccccatctctactaaaaatacaaaaatcagctgggtgtggtggcatgcgcctgttgtcccagctactcgggaggctgaggcaggagaattgcttgaaccccggaggcagaggttgcagtgagccgagattgtgccactgcactccagcctggcgacagagcgaggctccatctcaacaacaacaacaacaacaaaaaaaaaaaaaaagaaagagttgactcctgatagactatgaaggctgggatacaaattcaaaaagcggaaaaccacacgagctggaacactataggctgggagcaaaaagccctatcctgctaaataactcccactgctgtcactgtgtgagggtataaggagcagttgatactcataagttaacatttgtttggttcccagtcttcatgtacatgtgttccatttaagaagtcatgatcatgtgtagtacaattagaaaacctgttttcaaaaaatattacttctgttaacttgttaattttaatggtgaatatcatagtttagaaaatccaccctccttttcttgtcagggactgagtgtgtggtcctgctcctgttatgtatggaggcaaagggaaagggctccggccccctcaaaatcatgtctttggtgccagccggttctgttctcagtcacctggatactgaactttcctgagcagggcagaactgagatccagtgggcttctccccaggatgcttacgctttttcatttgatttcaggtctcctctttcgcttcctattgcaaccaatgaaggccattcctaccataagtaaataaaaaagaaaatctatctttaataaataacaattgtatatatttatggggcacaatgtgatgttttgatacatgtatacattctgcactgatcaaatcaggccaagtagtatatccatctcctcaaatatttatcatttctttgtggtgagaacatttaaagttcccttttttaactcttttgaaaaattaatatatttactgtaatcatgatgctatgcaatacaacaccaggatcctgttcctcctgactgtaattttatgtagccattgaccaatatcttccttttcccctccagccccacttaccccagctactggtaatcaccattctactctctacttctgtgagtttgacttttttagattccaaatataagtgagtctcagacacctctgacatactgatttcaattcctttggatatatactcagtaatgggattgctggatcatatagtaattctatttttagttttgtgaggaacctctacactgttttacaaaatggctgtatttatagtttcaccagcagtgtataagtgttccatttctctgtgaccttgctaacacttatctttcacctttttgataatagccagtctaacaggtgtgaggtgataccttattgtggctttaatttgcatttctcttatgattagagatgttcagcattctttcatctatctgttggccatttgtttgtctttttttttatttttatttttgagacagtgtctcactctgttgcccaggctggagtgcagtggcatgatcatggctcactgcagccttgacctcctgggctcaagcgatcctcccacctctgcctcccaagtagctgggactacaggcatacaccaccacgcctggctaatttatgtatgttttatagagacaaggtctcactgtgttgcttagactggtcttgtattcttgggctcaagtgatccacccgcgtcggcctcccaaagtgctgagattacaggcatgagccaccatgcctggccggatattagctatatatctgatgcatgatttgtaaatacgttttctcagtctttgggttgtctcttcactctatttgtttttgcttgtttgtttgtttttttgagatgcagtctccctctgtcacccaggctggagtgcaatggcgtgatcttggctcactgcagcgtccgcctcccgggttcaagcgattcttttgcctcagcctcatgagtagctgggactacaggtgtgcaccactacgctcagctaattttgtatttttagtagagatagggcttcaccatgttggtcaggctggtctcgaactcctgaccttgtgatccgcctgcctcggcctgccaaagtgttgggattacgcgtctggcctgtttgtttgttttttgctgttcagaagctttttagtttgatgtcatcccatttgtttattattgcttttgttgcctgtgcattaggggatcatatacaagaaatgattgcccaaacctgtgtcatggagcttctcgcctaagttttcttctagtagatttgtaatttcaggtcctaaatttaatccattttaagttgatacttgttaaggggtgagataagggtccatttccattcttctgtatgtggctatccagttttccaaatgacattattgaagagactgtcctttccacattgtgtagtcttggcacctttgtcaaaaatccattgattatagatatatgcatttattctgggctatccatcctattccattggtggacatgtctgtttttatgtcagtgccgtgctgttttaattactataggtttgtaatatattttcaaacatggtagtgtgatgcctccagctttgttctctttggacctaaagtctattttgtctgaaataaatatagctatctctgttctctttttgtttgcatttgtatggaatatctttttcagtcccttcattttcagtctatgagtgtcctttatggtgaagtgagtctctttataggcagcgcagagttggatcttgttttttatccatttagccactctatgcctgttgtttggagaatttaatctgtttacattggaagtaattattgataggtaaggacttagtagtgccattttgttaattgttttctagtgtttctgtagaacctttgtccctttctctattactttccccctttgtggctcgattgctttctgtagtggtccactttggattttttctttttatcttttgcaaaagcaaaggcttttgctttgtagttaccctgtggcttacacaaaacatcttataactggtatataagctgataacaagttaactttgatcacatacacacattctacatttttactccccctcttccatgttttatgttcatgatgtcacgatatacatttaaaaaataatttgtatctttaacaaattattgtagctttattattattattattattattattattttgagatggagtttcactcttgttgccgggactggagtgcagtggcgtgatcttggctcaccccaacctccacctcctgggttcaagctattctcctgcctcagcctcgtgagtagctgggattacaggcatgcgccaccacgcccggctaattttgtatttttagtagagacggggtttctccatgttggtcaggctggtctcaaactcccaacctcaggtgatatgcccgcttcggcctcccaaagtgctaggattacaggtgtgagccaccgcgcctggctagctttaactatttttaatagttttatcttttaacctttatactagatatataattcatttacttaccaccattacagtattagtgtgttttggggttgacagtatacttactttttccagtgagttttatacttttcatgttttcctgtcactcattagtgtcttctttattcagcttgaagaagtttctttaccatttctttttctgtttctttttgtttgtttgagacaaagtctcactttgttgcctaggccagagtgcagtggtgagatcttggctcactgcaacctctgcctgctctgttcaagtgatccttccactcagcctcccaagtagctaggattacaggcgtgcaccaccactggcagcttttttttttttttttttttttttttgtatttttagtagagacagggtttcaccatgttggccaggccagttttgaactcctaacctcaagtgctctgcctgcctcggcctcccaaggtgctgggattacaggcgtgagccaccatgcctgaccactgtttttcattctttatccttttttcttcttcagattgtatgatttccagtggcctgtcttctaattactaatcttttcttctgcttgatgtagcctgtggttgaacccctttattgaatttttcagttcagttatactattcctcagctctatgattactgtttggtacttctttagaaaatccacttttcaactgataaactaactatatccatttctagggctgccgtaacaatgccacagactcaatgacttacagcaacagaaaattattctttgccagtactggaggtgagaaatttgaaatcaaagggccatcagggccatgtttcttctgaaggctctagtggagaatctgttccttgcctcttccagctgctgctgcttttttttttttttttgagacggagtctcactctgtcacccagaatagagtgcagtggcatgatctcagctcactgcaacctccgcctcctgggttcaagtgattctcctgcctcagtctctcaagtagctgggactataggtgtgttccaccactcctggctaatttttctatttttagtagagatggagtttcgccatgttggccaggctggtctcgaactcctgacctcaggtgatctccccgcctcggcctcccaaagtgctgggattacaggcgtgagccaccgtgcccagccctctttcaccttcttgtggctcctgatgttccttggtttgtgatagcataactccagtctctgcctctgtcttcaaatggctgcgctcgcttgctctctctctctctctctctctctctctctctctctctctgtgtgtgtgtgtgtgtgctctcctcttcttgtaaggataccaggcattagatatagggctcaccctaaatccagtaagatttcatcttcaaatccttcactagtcacgtctgaaaagatcctatttccaaataagataacaatcagagattctgggttgacatagattttgtggggacgttattcacttcactacacttgtttttatattttgtatacttttagttttatgctttctttcttagtttttgagtaacttttaaattggtttgatagaatgtattagtaaaatgtctgtgggctgggcgtggttggttaatgcctgtaatcccagcactttgggaggccgagggggggcggatcacctgcggtcaggagttcaagaccagcctgaccaacatggtgaaaccccatctctactaaacatacaaaaattagccgggcgaggtggtaggtgcctgtaatcccagctacttgggaggctgaggtaggagaatcgcttgaacccaggaggcggaggttgcagtgagctgagatcatgccattgcactccagcctgggcaacaagagcaaaactccgtctcaaaaataaaaaataaataaaataaaataaaatgtctgtggaatcctaagacattgaaattgatatgaggcaggttttcagtacactggattcatgttctgatacaggaaggaggtcatagtagcagtgcctggcacatagtaggtgctggtactcaaatatttcttgaatgaatgaatttgtatgattgaatgcatttctggataattcttattactacaaggaattcagtctattcttttcaaaactgtatatacattaagaatttctctgatatgtttaacttccatttatgttttattaaaaggatgtgtatttttacatgtcttctgaggattatctttttaaaaaaatcaaatttcacttaaccatgttcggaaaaagcataactttaagagtctgacctgggttgaagttttggcttttccactcattagctgtgtaactttgggcaagttatttcatctttctgtgcctcagtttcctgtaaaatgttgctaataatgccaagtcttccaggttggtgagagtgtgtcagtatgtttgggtacaaagtgagtatgctgcaaatattaactagtaagttgtatactttaattatgtattgtaaaggaactagatttatgttgtaaaaaattgtttttgttaaaaaaagagcccttgtttattaaaactcacatcaaattaagctgcttttttcctctgtgttcttctgtgaccaaacaagtgttcctgtagtaggtgaaatcactgtcaaggattggtgttatgtgtatatatgtctgatagtaatctgttgaacattaaccaaagtcaggaaatgagttgaactttggaaggtagaaatctgaggattggtggtagtggtggtggggtaggagtggtggagcgggttggagggattgaagtatatgggaatgggagctagatacattaaaatgacagctattatttatttagcacttatgtacctggataaaggaatgctattgcatctacatggataggtatcaccaatcagagctgagataaaactggctattcagagattaaaacaaataattcagggctgattagatacagatgggggaacaggtctgggagcagtggaaaataaataaccctaaataataaaggctaccatttatttatcaatcacttgctatatgccaggcattgtggaaagtgctttacaaacactattccatgtatctgttatagtcacccttatggagtatgtggtattcttattttaaagatgagtaaatagaaggttgtagtttctttaacttgcccaagtcaaacatctagtaagtaccttcaaacaggaataaaaccgaggtctgtgcgactataaaatctatgctttgtatacatactgctttcacatgtgcaattggaattaggggttcaaccctattcaactctacttccaaaaaaggtgaatctgctaatactacttccaattgtttttttcccctttggaaatttttttttttgagatggagtctcgctctgttgcccaggctggagtgcagtggcatgatctccgctcactgtaacctccgcctctcgggttcaagcgattctcctgcctcagcctcctaagtagctgggattacaggtgcgtgccaacacgcctggttaattttttttgtatttttagtagagatggggtttcagcatgttggccaaactggtctcgaactcctgaccttgtgatccacccacctcgtcctccaaagtgctgggattacaggcttgagccaccgcactcggccttggaaattttttttctaactgataagaatacaaagcagcaagtaaaattcaaaaaggatcacagtggaataacttttcattttagcatattaacatttttatatgatttttttgtgtagctaaaaaatgtaaaatgcatatataatttttttttatgtttgtaagaacattttctatagttttcctatgagagtctgttaggttggaataacaatgtattaaactgttctctgaaattggtcagccttttgttcttacataatacactgtaatgaacatatttatgcacatttttttcatcaacttttaaatcaaattcttagaaggaaaactacagattaaaaaagaaaagatcctgatcatgtaatttgtgtgtgtgtttatgaatttgaatgatctcttggcatggctgtcagggcactgcctctattcctgccactgtgatacgatcatacttttgtgatttcttctattacttcaaaagggaagaagttataccaccatactttaaaacaattaatttataatttgatgaaatgctcaagtattagaaaaaagttttatggtatatcttgattggttatggattttgttctgcttattatgccttcttttgggtggttggggggcttctgttatttacaggtggattaatattctgctccgtattactcatgagttaaattatactcaattccctattccgtagttaccaccttccctcctatttttgctaatttcctcctcattttttgttgtgtgttctataaaatttcccatcacattattattgctactacctactgttttctaaatgattttaattgtattgtaaaattcttcttgctctgctctaatttcatacctcctatattttcttatcactctgaaaatagttaataaattttgctaatacaatcatgcatttcatggatgagtttaatgtctattcatttttttgttttattcttttgtattataagactttttgctttttctcactttactgttatttttgtcatcattacaggccgggaaggtcccatagcccaggttgcttttggtcaatactgttttccccagcagcattaactggcatgtaggagatgctcagtacataatgccaaaataatgaatttgagagaatgctttgaattcctattccagttccttattaaatgacaggatatatgtccagagttttggataagctccagtcatttcttaaagttaattggggttgaagttcagttgagcagggtatcataggagtttggttggtttgtgatggtttgggagttcaggcccaaattggattctgtcttagtattctttccaggtcttgagtccaccagtattatccagtattgtggctatttcccagtcctgtttcagctgagcagctgtcaagagaaagtctgtgccaagccagagcttggagattcttggaggatgtgtttagcaccatgcttaggtttcaacatacttgttctaagaaaaaagatacttcctgaagcaagctttaacagtcaagttggctgctcttaatcacatctaattagtactggagattggagaaagccttattagaaattagaatgtgcttcatttccacagttgatttcagctgtgattatagggttgccttccttctttctcttatacatttcatactacacccccatcctcctaatatagttatatcgtacttttaataaaacctatatttggttttttcataattgtggctgtgtaaatactatttgctaagtcagtatctatgactatgttttatttcttacagaactttaattttactggcattcatgaattatctcatttttttcatttgtttaatttttttacctaaagcttaatttcttacatcttccagtgcctttgtaaaatccctcagaaataactatcttggattctctgtcacattcctgtctggatttgttgccttctaggccttctccatatgttactgtgactttgcttcaccattttgagattctcttagtttttctcctatattggatcccttctttgctggattccatgccatctttcttgggtttcttcctgattttgatggaatatatattctccagtaggttcctgagaaagggtgcacaaaggttaaatttttggagacttagcctcatgactgtctaaattctactggtgatcatatccccaaaagaccaaatccctaatgccataatcccaaatgttgaaatactgaaagatcaaaatctctaaaaatcagaatccctaaattctaaaaatctcacacatctgaaatcctgaaaatcagaatcatgaaagattaaaatcccaaatgttgaaatgctgaaagccaacacctggggtagaaattagtgcacattcggttgtatgaaagatagttgcatcattttacttgcatcatattaggtggaaccgattgcctttttattgtatttatttggaaattaagtatggtttaaggagatggtttatgggtgccaaattgacgaggggtggattcatggatttaattttaggtgtcaacttgactggattaagaaatacctagaaacttgttaaagcattattttgggtttgtctgtgaggagattagtatgtgagtctgagtggactaggtggggaagatctgccctcaatagcggtggccaccattaaatctgctgggggcccagagaaaacaaattgttgcctttctgagagctggaacggacttttcttctgctgaattgaacatcagaactccaggcttgttggcatttggactctaggacatacaccagcagccccctgggtcctgggctttcagcctcagactgagacctggtttggcttggttctgaggtctttggactgagccaagctaccagcatgccagggtctccagcttgaaaatgacctgtcctggaacttatcagccactataatcgcatgagccaattcccctaataaatcgtctctcatatatctatgtatatatatatcttattggttatgtctctcaagaatgctgtctgtcgagaattatgtctgtcgagaatgctgactaatacggatttggtattgagaaagccaaatatcattccttcttactgtattccttacagcacagtggaagagacctgtgaaattgttcccttgcaaaaaggctgtgataaattaagtataccaggctacttaatgctgaaagagaaaagtttaaaagctaattattattggtgttgtgaagacagaaaatcacttaattgcaatggccaagcaataaccagatttctaaatggtcagcatatacttacaaaatatttagaccacaaccgctctagtctaaacacaagtgaatgttttgaagatcatagaagtgaatatgcaggtgaaaaatataagaaagctcccctgccaaattattcaatcaggtatgacttctgccctttcacacatagtgccaatttgctatgctatgtattttatctttgcatcatttctaatactgcaggtataaattctgtaaaggcttttagagaattctaattcattttatgcactttttttttgcatatttgactccatgaaagtgcattatcacaatgtgacgtaatgtgtaagcattgtgcatgtacataaaaatgttgaaacttgctcagtaaatgaagagatgtccgttttgttcatctgtatttgtgaaagataaaatttctcaagatcttggctctttgggtgactctattgcagtttttgtgcaaacggtagtgacccattgcagtttttgatcgatcttgtcagaagattcaggttgtctggtatttcagatgaccgcagttatgaatctgggtgcacctgattaccaaccatagtgatacgtgtttatccattttgctttttaatctatttcttcatgaatacattttctctgttcctattatacccatgcaatggttgttagtatacctgagtatttatgcttgcaaaaatatgttattagtgcctattttattgtgtaaaggggcctatgaactgttccgttgtgtttttatgtttctcaaataaatcttttaaaaatggaaataagtgtcttttagagaactttttacaaattatttttccagaattcaattttttggattttgttcttttgggattgtgatttttggaattttagattttagggattttgatcttttgggatttcaacatttgggattatggcatttgggattgtgtcttttgggattatgtcctaaacccaaattctgtcaccaccgactgtctagtgataacatttaaaatggaaagataaaatgacttgattttttttttccctttatttttaactgcatttaaaaaaatagaggctgggcatggtggctcacacctataatcctagcactttgggaagttgaggctggtggattgcttgaactgaggagtttgagaccatcctggtcaatatggtaaaacatcatttctacagaaaaatacaaaaaaattatctgggtgtggtggggcctgcctgtagtcccagctacttgggaggctgagatgggaggatcacctgatcacctgagcctggggaggttaacgctgcagtgagctctgattgtgacacggcactccaccctgggtgatagagtgacaccctgtctcaaaaaaaaaaaaaaaaaaaaaaaaattaaaaaacaggaaaaaaaatttaaaacacagagaaaccaaaaaaactagaaaccacatgcacatgaaccagaatttcaaaggtataagaggttatggatggggaaatgtatctatgacatgagagagtcttttgggatgatggaactgttctgtatctgactatataatgctggttacaccaatttctatatgttttaatatccatataaatgatactaaaagaaaaattttagtctgtgtgtatgataggttaaaaggtgaaaaattaaaagaatttaaaaatacgaaaaggtatacagcaaaaaagtctccttcccctcttcctttagtcttctagctttctcttctggaagaaaccactgttaccaatttcttatgtattctcctatgtaatcactcttaaacatctgaacatttgggatgaatctggcaaaagagaaaataacttatatttgcttagctattttctgaggatgctagatgactactcttataatatgtctaaatatattattatttttattttgttgaggcagagtctcaatcatcaccccagactggagtgcagtggtgcaatctgggctcactgcaacctctgcctcccaggttcaagtgattctcctgcttcacctcccaagtagctgggattacaggcatgtgccaccactgcacccagctaatttttgtatttgtttgtttgtttgagacagagttttgctcttgttgcccaagctggagtgcagtggtgtgatctcggctcactgcaacctccgcctcctgggttcaagcgattctcctgcctcagcctcccgagtagctgggattacagctgtgtaccagcacgcctcgccaattttttgtatttttagtagaaacggggtttcaccatgttagccgggctggtctcgaactcctgatctcaggtgatctgcccgcctcggcctcccaaagtgctgggattacaggcatgagccaccgctcccggccattaatttttgtattttttagtagagatggggttttgccatgttggccagattggtttcgaactcctgacctcaagtgatctactcgcctcggcctcccaaagtgctgggattacaggcatgagccactgcaccgggccagaatatgtgtaaatatattattaatcatacttagtactaatttattaaattacttcttttacagttggcaaacatgaattgactgggcataaagtagctgtgaagatactcaatcgacagaagattcggagccttgatgtggtaggaaaaatccgcagagaaattcagaacctcaagcttttcaggcatcctcatataattaaactgtaagctctgtttatattaaatatagtccagtcatcttttcatcttttttgttaacctacttaatgtgacaagtgagaaaaatgactgacacttctttttgtttcctaagggttttgaaaagtttcttcctaggctgtgtgcggtggctcacacctgtaattccagtactttgggaggctgaggcaggcggatcacctgaggtcaggagttcgagaccagcctggccaacatggtgaaaccctgtctccagtaaaaatacaaaaattagctgggcatggtggtgggcgcctgtaataccagctactcgggaggctaaggcaggagaatggcttgaacctgggaggcggaggttgcagtgagctgagatcgtgccattgcactccagcttgggcaacaaaagcgaaactctgtcccaaaaaaaaataaaagtttcttcccattcatgtatttttctaaccccattgatggtcatttaagcctgtgttcatgttttgcccttgtgcttatcagctgttatcttctcattctttcctgtctcctggaaagatgctcttctggtaatgtttggtgccccattgctgtaaaaccaacagtgatctgctagtaaaaactcttgacctccaaatgcccacatgatgtcagttagcctcactagtgagaatgcggtagtagaaagggtttttccccatcctgcttatacctgaacatatagataacaaaatttcaggaatccaaggtttcaaaagggcagtaatcttactgttgttttacagttgccagttatagagtctacaaataactatttcctgctcagcttctgctttgttatgcaggcaataacttaaagatgcttaggtttttctcctgaactggctgactcaaacttgtttcactcttacctcttctcatttgttgagtgctaggttttaaataccatccatatgctgaccacccctaaatgtacatctcttgctttaagatctcttcttacaccagacttatttgctcactgctgactttacatttccatttggatgttcgcaagacatttaaaactcaacccggcccaaaatgaactctttattactctcccaaacctgctcttcccacagttttcaccatcttggctaacagccaatgacccagggctaaaacttaggaaccatttttaacttccctgtttctttcactttctaccatgcatttcatttcttccttcacaatcaagctaggatttgattgcttctcagttcctttattgctgtcaacctggtctcagccaccatctgtctcatgaaatcctgaagtaacctcctgtggctacctttactgttgacagttaattcttcacattgctgccatagttttacttttaatatgccagatcacatgactgcttaaaacgtacgatagcttttcatcttccttggagtaaaagccaaagccttatcatggcttgtaaaattctgtgtcttctggcctgcagttaacacctttgactctacatcctatttctctctaatattcctcgaacatgccaagcaggcttctacttggggacctttgcagttgctattccctctcccagtttcgctttcctcctagataattacataatttgttcccattcttcttttaggctcagctcaaatgttactttattagaggctttcctttagcactctgtatacaaagattccccttcatttgctttatttttcttcatagcatgttccaccacctgagatattgcttatttatttagtgtctgtttcctggttcctggaacatgaactccatgagagcagagaatttttgtttcctgcagtttttctagctcctagcctagtacctggtatactataggtgcttagtaaatatttattgaatgaatgaatatatgtgttttaatatttgtagacaatgttttctctcaccaggtaccaggtcatcagtacaccatctgatattttcatggtgatggaatatgtctcaggaggagagctatttgattatatctgtaagaatggaagggtaagctgttctgctttaattctgtatgtattttgtaactcccctttatcctttactagcatcaaaatgtcagcaaccaattttaagaggtctatttaataaccagttcccttagtcatatatttgtttagaatcataaactatgtagaactagaaaggatcttaaagattatctccttagcctgtttatacagatgtggatactgagcctcgcggcttatatgattgctcacagtaacgtgatttattaatgacggaattggcttgagcccccagaactcataatcctcagacttatgcttccagggtatacaaatactttgaatatgtatcttaatgtaattaatcgttacaaaatatattattattacttaaagatctaggccttgctagtcaattctagccacatttaaattgcattcattttttggtttcagaaatctgatgtacctggagtagtaaaaacaggctccacgaaggaggtaggaattagatataaagaatttacagctggaaggaactttgtaggacattttgaacactaccttaagttacagatacaaaaactcaacactgccctctgcccatactttttctcatacccaggttatgtggtatgcaaaagcccctttgtgggagagctgtagctagccctgaaaagagagcttttctctcaattttaagttatttacattactcattcatttgttctatatagcatgtctatttacttttatcaaaatcaaacttattaaccaagttaattttgattttactatttcttaacatgattcatttctatttcaggtactcccctttactcctgcttctccttaccaaaaaaaaaaaaaaaaaaaaaattctgcctggagaaatgggaaacaggcacaattgatatatatttttcttatcttttctgttgttgtttatttcttggttttaccttgtgggtatttcttcagttttaccagttgaatattaaaatttcagcacccgtattttctatttcaaaagtttcttattttctgaaattttcatttttttagtctgctgttatttgcctcacagatataataacctagtctgaggatggcattttaaaaaaagtcttcctctgttccgtcttgttctgtaccttctgtgctctctgcattcattttattcatttttgtctttgatgcatggcccttcttcagatatttggtgattcttggctgtccactaaatatttaagaatagggtattaaatgccaggctcatgtgggtaggacttactgattgctgggttttctcatagcttgaataggtagggacttgtctgttttattactgtataccaaatgctaataataacaaatatgttttcttggatcagatatttgctccagaagaaaccttcccatttccttaaaggccttagcttagctgccagtgctccaggagctgagtggagaaaagagatgcaagtctcactagttagtatgttgactttgtcttagcccccatgttttccttaggatgccttatccctgccttggtgtccttgagagcagagctggttcagccttactagagtaaattataggtcttattccccaatatgggtgagtttaaaagcttcttacttcaagcacttgtcctgttttcagctcatctctcacttctaccttgagcagttccctgtgtttccaatttctaaggcttcccaggctttgtatgcagatgtttattttttactggtttctacccctataggcttaggttttagctttctcttgtaggcttagtctttattactgtttatctattgtcatccttggtgactcctcttgattactgctgtctcttttgttctttttgtctttatatgcctgttttattgctgatgtcattttagtgatgtttcaagagttggagacaaaagatttaatctgttacatttaattggaaatgtattttgacttttctaaccttcctttatagacatccctttctccatcctttgtaattgtacttgttactaatacagtataattttcatttttgtagcctgtctattttactttttatattttgtttaatcaagttttctcctattttttcatatttgaacagatactcttttttttccccatgaacctacaaatctagaaataaaagtattagaatgctaaaggattagtatttttctagaggaatggtatcttataatagtttcttgtttcaaaataaattactgatttgtattttctcccatattatccatgccctttaaggtgtaagtctggttttagaatgctaatttgtgacctgtgttagagaattgcatattggagtccttcgcctagaggattaatagcttatttattaaatatgacttcttgggagcaggcatgtccaagtaatggctgtcacttatgttgaaaaaagtggtaataatatatggatacatagagaagtttaaaaaaaatacttcaggctgcatgcagtggcacatgtctgtaatctcagcactttgggatgctgaagcggtagattgcctgagctcaggagttcgagaccagcctgggcaacatggcaaagtcctgtctctatcagaaatacaaaaattagtgggcgtggtggcatgtgcctgtggtcccaactacttaggaggctggggtgggaggattgcgggaccccagggaagccgaggctgcagtgagccgtgatggcatcactgcactccagcctggatgacagaacgagactggatctcaaaatatagataaatttaaaaccccgcccccccaaaaaaacacaaaaaacaaaaatgaaaaggtagttgctatgtaagattttttttttagcaagcatattaaagataaaatgctatgatattttattaaatgaattaaggtgtttgttgttaaaatgtcttctattttaggacatatagcaacatagttgcttgctggtttatgaatagtgcttaaatattacttcctcatggtctaaaatagtgtccctcaccccactatcactcactgcacctatattttgctttatttttcttcaaaacagtatcactccttctgactatatttattagtctattttcatcaactagattagcctttgttttattcattgctgtgtaatgagtgtctaaagcaatgtgtagcacgttgaaggtattcagtaatttgttaaaagaatgaaagagtaaacatttgccgcttataaaaggaaatatgccaaatttcaagtagatattgaaattatttgaaataactcatgagatatagaggaaggcaagctgttacaatgtagtcatatgcaaatgataatattagaaacttgagttactgatttgggttccaagaccatcttagcatttctgttttgtgctgcaggtatctcctcctcatgtcaaaagtatctcataagtgaagttcattgggaagattttcatgtattttgacaattttataggttggagaattatagataggacaatttactttgaaagacacacctttaaaaagcctctctaacttttcttagctggatgaaaaagaaagtcggcgtctgttccaacagatcctttctggtgtggattattgtcacaggcatatggtggtccatagagatttgaaacctgaaaatgtcctgcttgatgcacacatgaatgcaaagatagctgattttggtaaggataattttatagtttcttaacgttcatttctaatgttcttatagtttcaatgaacctacctagaattcttcagataactgtaaaagattacataaagtaatagactgagtatatcaaagtattctgttttgtctatgaagatacaaaaagaagaaaagctaagaaatcatcttttcttagctttaaatgtctttattactattattttatagaggcagggtttcgctttgtcgcccaggctggagggcagcgacgtgatcatagctcactgcatccccaaactactgggccaggtgaccctcctgcctcagcctcctgagtagctgggactgcaggcgtgcactaccatgccaggctgttttgtctttttgtagagacaagttctcactatgttgtccaggctgctcttgaactcctggcctcaagtgatcttcctaccacagcttcccaaagtattgggattacaggtgtgcaccactgcacctggctctttaaatatctttaaaattaaattttaaacaacttaagttggtagtattagagagactatttgaaaagagtattatttgtgaaagagaaggtagcagctttatttccagtatgttcaaaagaatcaagtatggagaagaaggaaagtgagtgggatggaattatttaaaaccttaaaaaccagaagtgaactatgtgaatttaattatttaaaattatttaaaacaattttttaattaaaaaaatttatttaaaaatttaaaaatgttttaaatgatagtaaattataatttgtttaaagaacattttgattgttaaaaatgaatttattttggctgggcgtggtggcttatacctgtaatcccagcattttgggaggccgaggcgggcggatcacctgaggtcaggagttcgagcccagcctggccaacatggtgaaaacccatctctactaaaaatacaaaattagctgggcatggtggtgcgtgcctatagtccccactaccctggaggctgaggcaggagaattgctggaacccaggaggtggaggttgtagtgagttgagatcgcctgtccggcctgggcgacggagtgagacacggtctcaaaaaaaaaaaaaaaaaaaaagaatttattttttctgtatttcctatataaattgccattgaccttactaaacctaagagaaaaaggaatctcttcttttctttaggttggttttagttcaaatcagataacttttttttgtttgttttttgttttgagacagagtttcactctgtcacccaggctggagtggtacgatctcggctcactgcaacctctgccttccaggctcaagtaattctcccaccttggcctcccaagtagctgggaccacagatgtgggccaccacatgcagctatgttttttttaatttttggtggagatggggaatcactatgttggccaggccggactcgaactcctgagctgaagtgatccgcctgtcttggcctcccaaagtgctgggattacaggcgtgagccaccatgtctggcccagagaacattcttataaaaattttcctcagttttgactacatctatgtatctatatctataactatatctatttaaatgttcagagattaactggaaaatgccaaccaaacctgagctggttgttttggtgttttgtttttttttaaaatagtaattggctaaattatttgaatttcttattcctcagttgattatttttatagggtgcatttttgagggagcaacagtttctttttggagtaaaactgtgagggaactttgaaattcaaaattactgtttttttttttttttttttttttaaagaatcagaacaggcttaataggaactttgaattttaatccttctattcatctgttatagattattttccctagtgatttctgtattaataaaacttaaacatggcaagttttttctaataagcaaaataaccaacagcttaatatatttgtattaaactctaacagtgcactaactttaaatgttgaaatagattacacattttagggcataatggcagaatatttggctacaatagaccataggattttgttgaagcaaataacaaaatgatgatttatcattttaatgcaaactcaattttattgtttaatgggattttaatttttgtctttgggaaatcttttgagtagctgattttgtgcactttcaggtctttcaaacatgatgtcagatggtgaatttttaagaacaagttgtggctcacccaactatgctgcaccagaagtaatttcaggaaggtagtatttgataccctgcctccctcaatacatttgaaattgtctttttctcctagattttgttagtctatagtgtcatatttaattctaatgaaaggaaagaaagataaggcttattcttaaccacatttatatgtgaatgagggttaaggactacaagtcaacattatattaaagttgttagaagagagtacattaatttttttcccaggtggaagaaatggaaagtttaaaactagggtgtttaaaaagtaggtaagacactggaaacttgaataatacagaaatatctagtagttagaaaaggattactatttacttagaggaaaaattaaacatgtaatgtgtagctttaattttttacatagatggcattttgtagtacctttatgtttcatgataaaatgtcttggggaactgggctgaagtaatctttagacttcatttatgttgaatctttgttctttaaaccttttagagactgcaatattataagaattttaacctctcaatttactaactaccagcattgagaacatgaagatatttgtacagtgtcgctttttgaatagtttggaaaacaggagaatttaatatttttaagaataactctttgtccttcactatactactgaaattgaaaacagaagctgaagtttgctagatttataatgaacttttaataacttttcacccaaaccatgcttatttgtgtgaatgttttgcatcttgattaactcaatgcagaaatactgtagtattttctatttttataagcttgttggcctagactgctcaaagaaatgagatttgtgtaaaaatatggctgtgagtaaggcaggagtacctaattttagatttgtcaagtttcatcttttttttaaatattaacttaatgtcaaaaattatttaaaaaatttttaaaaaaatggtgttgtctatcttaattcttttaggaataaaacaattcaggacatggagactgtggaaagttgttatttaaataaataaaaagaaatgttataactgtgcatatatgcaatgggctattactgaaatttaatttttctagtttggataaagtctttcttcaagctcttggtgtatgagaacttttactttcaaaataatatttatcgatcagttcagcagtacataaatttaaagaaatccttttcctgaatccaggctttgaatgggtgatctaactagtctgcagctagttaaggcacttgactacaatgcactgcaaacgggatttaaaaactctgtgaaccaatttgcctggctttctttcacagcctcaggatcctttcaccttggtgtaaggggtcttgtgttattgggattgtgggctcagagtccattactaaagaacattctcagttgatgaaatatcacttaatctctcctctgtaacaaaaaccaatggttttaaattgaatagtgatatgtttgttcaagatttggccctattgtcagatcccatcagggccatagtaaatagtagaacagaattttagccatggtgtgtaatttacaaacttcttgacttttgttttcaaagataatactgatggaattaacgttgtaacatgtagtagtggctataaaaaccatattctgcttaagaattctttatgaaatatccatatttgaagtttttgatgaactgaatcttaggttaaaatgattctttaatccaattgttatttcctgttacagattgtatgcaggcccagaggtagatatatggagcagtggggttattctctatgctttattatgtggaacccttccatttgatgatgaccatgtgccaactctttttaagaagatatgtgatgggatcttctatacccctcaatatttaaatccttctgtgattagccttttgaaacatatgctgcaggtggatcccatgaagagggccacaatcaaagatatcaggtaataaagcagtttggaagttatcagatctgatagtatccatgataaaagttatgtgaaaaaaaaaaagttgcagaacagaatatacagtgtaatcctgtttttatgtgaaaaaaatagagtgtatagacacatttattttattttgttattagaaatacatagtaaactggttaccttagggaagtaagattcgtaagagggagggctttcactttttacttacacatctttgttttgaaatttttacagtgaacatcatattactttttaaattaacaaaaaagctaatgaaagattggtgctgtggctcacacctgtaattccagcactttgggaagctgaggaaagaggatcatgtgagctcaggagtttgagaccagcctgggtaacatagcgaggccccatatatatgtatatcttttatttttatttatttattttttttgagacaaggttttgctctgtcacccagcctggagtgcagtggtgtgatcatagctcactgtagccagtaactcctgggtcaagtgatcctcccactttagcctccctagtagttgagactacaggcatccaccatcatgcctggctgttttttgttgttattgttttgctttttgtttttgtttgtagtgacaggtcttgctatttttgcccaggctggtcttgaactcctggcctcaagtgatccttgtgcctttccctcccagtgttgggattacaggtgtgagccagtatgcctggcgttaggattaatacttttcagtagtaaatttgtgggtggctattttatttcttatctcatgaattattgtattttttttctttttttaatcccaaggaatgagatttaattgacatgtttttcctggtagtatacattgaattacatgcaaaattcctgttttgtaggtaaaagtcagtataaccagtttcatctggttcaacctaatagtttaaattagacaaaaatgacgatgacaaattttcttctcaaattagagtgagccatttctgatgaagacttaaacaattttattgcaagccttgtttcttttttttcccccctgtggaaattttggtccttttggtcttctaatggctagactgcacatttatctgagaaggaagaaagaaatcagatatggatctaggaatagtaaatatgaaagcattagtataatgaagaagaaggaaagattatatgtggaacttgaagcttgattactttccacttactacacgttttagactagctaaaaaagagaccatgaatggcacggcatgattttatcaccaaagggaaaggacaaatcattctctaaaatttatattttaagatatctaggtaagaaatgtttttgtttgtattttacctattttcttccaattaaaatataatacatgacaattgaaaaaacttagaaaaacaccaacaatagagaagagaataaaaaattatctttaatcccatgacccagaagataaccattgttcttttcttgttttttttttcgtctctggattttatttagttttagcaaagtgacatagttcaggtcaaacatattcttaaatatacgaagttagggaattagaataggaaatcattcagggcatggcctttccagtcacacagaactgggtcataatcctggttctgtcacttactgtctttgtgaccttgagcatgttccttgattttttttttaacctcaattccttcatttaaaacaaagagatattatcttcatataattgtttcgatgatgaggggagatagtgtatatgaagtgtttagcataaaacttagcatatagtaagtactcagtagttgtctactatttttcttgttgttacattatcttcacttaacattatatcaaaagagtattataatgaagctacctaatatgttctctttctaagctggaaataagctgttcttttcattgtttgtcgctgtcatttgtcccataacttttttccccccattgctgtgtcaatacattctccctcttaaaactggagggaaattggagcatttccctcaacatacacaatgaagtgcgagctagaagaggaaaatttcagtgcaaaaagtgacaataatacagtatgaatataaatataaattaagtcatattctaaattccctaaactgttactttcagtctcagctctattcaaagtccttctcctgatcctgccatttttctctcagggaacatgaatggtttaaacaggaccttccaaaatatctctttcctgaggatccatcatatagttcaaccatgattgatgatgaagccttaaaagaagtatgtgaaaagtttgagtgctcagaagaggaagttctcagctgtctttacaacagaaatcaccaggatcctttggcagttgcctaccatctcataatagataacaggagaataatgaatgaagccaaagatttctatttggcgacaagcccacctgattcttttcttgatgatcatcacctgactcggccccatcctgaaagagtaccattcttggttgctgaaacaccaagggcacgccatacccttgatgaattaaatccacagaaatccaaacaccaaggtgtaaggaaagcaaaatggcatttaggaattagaagtcaaagtcgaccaaatgatattatggcagaagtatgtagagcaatcaaacaattggattatgaatggaaggtaagaaagaaataacattttgattattagcatatttggcaaacccatagtctataaaatgttttatagaagaattacttttgacttggtttttgttataccatgtgctaggttgtaaacccatattatttgcgtgtacgaaggaagaatcctgtgacaagcacttactccaaaatgagtctacagttataccaagtggatagtagaacttatctactggatttccgtagtattgatggtatgtacatcacacaaaacaacatagattagaccttgttactaacttggtattttacgccttgattcttttgaggcttcttgacttgttcctagtaattcaactgcaaaggaataaaaaatgtgatttcttgtgcctttgcaatattaacatttatgaatcttatttttcttgtaatcttatagcatattgtccttttaagattatcatcttgtaaaatccttaaagccaggtgtagtctgatcctaaggtgatagttttctgctgcatttgtttttttggtgtagttcattttgataagagacaatgttttatttagaaataaatattgactcttctgtaagcttttatttattattaaataagttttcagttaagaatgaagttatggcaattcttcattggccaattcaattgcattaagctacgctgttgagtgcaggtgtggtggcttatgcctgtaaacagcccagcactttgggaggctgaggtgggaggatggcttgagcccaggaatttgagaccagccttagcaacatactgagactctgtctttacaaaatattaaaatatatatatatagtatcacctttgcttatggaaggttgcatagaattattagatgaggttcacgtttgaatttttttcttctttataaactcaaagatagtacacacatagtagcagaaagacacaggtttgagccatgatatgttggccaaaccagtttgtctggttatctttaggtccatatagtacgtatctgctaacatatactaatgcagtctgaaatacggaatgagttttatttttcttgtatttggatcaaatttgcaaccttagatttactagtactggggtataccaattgaatgcccattttgtttttgtactgtgttcccaaccttagtttttcttcgatttttattcattggaattgttgctcttttatgaaatactaaatgaaatatgaagggaaagtggaaagtaaaaagcactgagctgagacttaggagagttgggttctagacttacctttctgttcatttgttaccttgggcaagtcatttctctgggtttgttttcttatcaataaagtgaggggctggatgagatggtttccagtataccctccaaattttaagtgcatcgattctatgattttaatatagagggattactttttattgctatagaataatatttattaatccctagattgttggtttactgggctcttaaccttggattgcaactgatgagtagctatactgtacccaactttggttagctatcttgagaatacatactatatgtaaaaaagatgaatagtttaatacaggctcattgactgttttagaaggtatttagaataagcgtgctcttgatagctggccagcagccccacttaaagaagcaaattcaatactgttacaaaaatttttgggagaaggtcatagactataataaattgaaattctttttacccagatgaaattacagaagccaaatcagggactgctactccacagagatcgggatcagttagcaactatcgatcttgccaaaggagtgattcagatgctgaggctcaaggaaaatcctcagaagtttctcttacctcatctgtgacctcacttgactcttctcctgttgacctaactccaagacctggaagtcacacaatagaattttttgagatgtgtgcaaatctaattaaaattcttgcacaataaacagaaaactttgcttatttcttttgcagcaataagcatgcataataagtcacagccaaatgcttccatttgtaatcaagttatacataattataaccgagggctggcgttttggaatgcaatttgcacagggattggaacatgatttatagttaaaagcctaatatgcagaaatgaattaagatcattttgttgttcattgtgcagtatgtatatagcataatatacacagtgaattataggtctcaggcttacttgatttttggctattttatatttagtgtacacagggctttgaaatattaatttacataaaggccttcatatattattacgtgttatatattacgtgttataaatttattcaataaatatttgcctagaattcccaagacctttataggtgattttgttttctgggctccttaacttcataaatagctagtatcttccagcagtagtaacagtctggataacttcttccatatccctccctctttgtttttttgagacagtgtcactttgtcacccaggctggagtgcaatggtgtggtctcggctcactgcaacctccacctcccgggttcaagtgattctcccgcctcagcttcctgagtagctggaactacaggcgtgtgccaccacacccggctaatttttcgtatttttagtgtagacggggtttcactatgttgcccaggctggtctcgaactcctgaccgcgtgatccaccacctcagcttcccaaagtggtgggattacaggcgtgagccaccgcacccggcctccatatcccccttttaaaattctgtagtgtatggtaagtcatatcagatatcagacctaatttaaatttcattttagctttacaagtccaaaaacacagaatttatatattcagatactctagcactaattttagtcttaaaatattcccacgatattctgtacacaaaatgttctttttgttacaagagctgagttgcatatactgtagataaatcatattatttttgccaatttcacaaattcctctggcccatcatgtcagtcattattgagtatatgcacacattgctacttatttgattatgtatcttttaaattgattcagtgcatagaaaactatctcttacaaactttaagtgctctgatatgacttcccccccaaattttattatgaacatttttaaaaacagaaaaattgaaaaactgtttggtaagcacatgtatatctaccatttagattcagcagttgttaatgttttgtcatttgttttctctatacctatatatgtatagatacagctagttatgcatatatatgcatatatgtgtttgtttgtgtatgtatatatgcttttttccccctgaaccatttggatgttacagacatacttatcaccgtgaaaatacttcaagtatctcctacagataatgacattctcctaaaaatccgtaataccattgtaaaagtaataattccccaatatcatctaatcaagccatatttaaatttctgaagttaactccaaatttctttatagctgattatttcaaactaggatccaattaaagtttacatatgacacttggttataactctttagttggatataacattattattattttgataaaatatggaacaaatcaattctattaataagtggtcacatttgttttgggcttaaattactttttaaagatactggattttcctaagatttctgatttacactgatatttttttttgtcattcttaattgcatcacacaatagatgtaaatgaagatgtagtcacctcagataaaattggtatcgtgtatgataatattgtatcatttatatttgccttatgttaactttaagaaattgatttttttgtattaatcattttcccattgcaacagagctatattttttctattttaagaatcatattttaggattatttttggcaaatacagtgagcacttatgtaaccagatgataatgaactcaaatgtcatgatagcttgcataaatggtgactctagtagatttgactcaagcacttctagaatcatgcactgaattcaaaagaaaaatcttgctgctttttgtccagggcttgttctattcaacttctaatttgaaagctgtacaaagtaatagaagttccatttaaatatgagttcaaaactgtatttactttttatgtggccctctctttaggggattctaattttacttagggtctctaagtgcagcataatgttcctgatgttaacagaagactgtatttttaaagttacaaatttgtatatggaattaagtaatggcgctatatacgctgttgtggggaggggggaagaaaaggaggaaccaattaaataggaccttttaaaaattgttaattttgtaaactttgcttctcttataagttattgtgattcattttagttactgtgttttattttgaaaatatttaaatattgcacttctataaatagtatgataaatgcacagacaattgcagtaaattcttttttaagctaggatatttgaaatgacaacctttggttaagtgtgtcaaggttgcaacagaattttcacaatttttttgttgtttgcaaattgttactaatattgaagaggtaagggaggcaatgcaaatgatttttaatctttttttattatcttttcagcagtttatattttttgtgactttatgcaaccatatttttactttgtcttgacaactgaaagatgtataaggttttttgccagaaatgtactgtatacatagttttaagtataacagattttactgatatgtaaaaattttgccattaaaataaatgatttctcactgagaggaacttttctaccaggttggggcatatgggagcttaatatatcatatctaatttaaaataatttcactgaaataaactccattgcttttacctaatttttttcttgagatgcttttgtagtttttcagagttttagatgattttatacaaaatcctctgcctagcactgctctttttgatgttgtagtgacaccatttacattgaattaatgcttggtagcctggggctagatgtggaactccatggatctgtgttctgactggcacctttggaatgaaagaaaagtgtgtgctgtccaaattttttccccttaattctttccctcatcttctcacccataatagaaattttatttccattgtgagttctgacaagaatgaaattccacatacaacataactgtaaattgttggtaggtagaagttaatatttgtggttcatgtatattttgaccagagtatatttaagtatataatttcagcttccttgatttagaaatatgatataataaagaaaaactccatttatcatctgtta

SEQ ID NO: 36 - DNA, 39241 bp, Pan troglodytes
  variation 141..343: note = n is a, c, g, or t
  variation 12935: note = n is a, c, g, or t
  variation 13090: note = n is a, c, g, or t
  variation 13116..13353: note = n is a, c, g, or t
  source 1..39241: mol_type = genomic DNA
cccgcagcgccatgcgcagactcagttcctggagaaagatggcgacagccgagaaagcagaaacacgacgggcgggtgaagatcggccactacattctgggtgacacgctgggggttggcaccttcggcaaagtgaagggnnnnnnnnnnnnnnnnnnnnnnnnnnnnnnnnnnnnnnnnnnnnnnnnnnnnnnnnnnnnnnnnnnnnnnnnnnnnnnnnnnnnnnnnnnnnnnnnnnnnnnnnnnnnnnnnnnnnnnnnnnnnnnnnnnnnnnnnnnnnnnnnnnnnnnnnnnnnnnnnnnnnnnnnnnnnnnnnnnnnnnnnnnnnnnnnnnnnnnnnnnncattctggggacacgcgggggtggcacttcgcaagtgaaggggagaaccccggggactaggcttggccccagctgaggagccgcacgacttccgctttccgcacctcttcatcctcccccgcccgctgcgtccttcttttccagggctgggcagcccctgtcccggatcctgcgggagctctccccagcggccgcggggctgcggcgcggccagcacaggccgggtgggggtggggtggggtggggtgggggccagtcgccatggcgacggcgccgcggcctgaggggctggtaggtgcgaggggctgggatgcgaaggtgcaaactttcccaggtggggcaggcgggcggcgcggcgcgctctgggtgctgggagggggcgtcctgtgcgcccgggttgtgctcccttggctcagggccagcccatcgcttccttggcggtccttggcgttgtcggtatttgcgtccgctgtaggaggctgtcgatttaccggcccctgctgtttcccgagtgcgaaatgtgtttccgcagaagtaaggtttctttgtgggtagccgacatcattttttttaaagaccatgtcgtcggaaaggatcactggtttccttcggagcagttaatgagtataaactggttcagtatttgcgatgcatggtttacgttctgaatgagactgtgcctttagtgtttccgaattaacaggagtttctccgtgcgaaacttggttgttagttaagatgttgtctccagatagtatttattactttattagtacagttcgtttccacttattttcaaaggttatttgtattctaataaactctttaagtgcacatcattcgaacttttgttttaagaaaggtgtattgggtgcattgtacagcattcgggtgacgggtacactaaaagcccagacttcaccactatgcagttcatctatgtaaccaaaagccacttgtacccctaaagctattgaaattaaaagaaaagtgtggactctttcaaaacaatattctggaaataaacttgctctacagtccaccaattctggcaaaaaaacgtttaattgcaagttttgtaaggcatgatttttttttctttaacatatttgactttgctataagggatgcagagaaaggaagtttggaactgataaaaataattcatgcattggctttggataaataatagactgacttgcatatactaagttcttggtaaatatttgacttgaaagaaaaaaagtttgccaaagtctgtacggtaactcaactgagccttactcttccagagctaaataaacagtttctgattttatttagggttagaagagaagaacgcttccttctgttgcgattttctgagtcatagaattggaaaattgttgtatatcccacagggaagcaactgcctgaaccttcttatgaaaatcagcaaggcagacaatgtcaggaggaagtaagaagcaaatgccagaattgggtaataacagctattaggacaggtccatataaggccagtaagatgtttctgtgccatggaagttttaactttatctttggctatgatatttcttgttagcaattacaaactgctttttagtttacaagtgtttgtaaaaaaaaaaaaaaaaatgttcatttttgcccccatcccttcccagagttctgcctggattagggtgttcatcattcccctaatatagacttgaatgcttgaataaagtcaggtctatttttttttcttttttcttttttttttccccgagatggggtcttgctctgttgccaaggctggagtgccgtgtggtgtgatcttggctcattgcaacctccgcttcctgggttcaagcagttctcctgcctcagcctcctgagttgctggaattacaggcgcccaccaccacacccggctaatttcatatttttagtagagatggggtttcaccatgttggcccggctggtttcgaactcctgatctcaggtatctacccacctcagcctcccaaagtgctgggattacaggcgtgagccactgtgcccggccaggtctgttttcgtatttgctaagtggtttttggcatggcaggtagtaaagcaagaagagatttttcatcttctggatttgatctgtgatatggctgtgacacgaatgtctccagtgactttgctgtttcttaaccttcacttccccacccacactaacttctcttggagtaccatattctgttaaagtcaacaaactctccaaatgtacaaaggccaatattagtccaaggatcataggtttcatagatatggttaaatttgttcataatcacatttgttgatgttgctcagaatctttaacctgttcattttttaagttaacagttgggatgctttttgccacaagtaatagaagatctagctttgcctagtaaagaacttatctgtggttctctttccacagataagtccttccagcagggaaggccagcatatctcttatgagtctcattggctcatccagtccctctggctaggaatgccatgtgccagttggcttatgcttgtattcctaagcaggcattagcaagggggatggcattgcccttggaggaatatgacccaccctttgatgtgtgtgtgcaacagaggtgggtgggtgggagacatctttttttaaaaatttgttttattttttaaatttttctttaagttattggggtacagatggtatttggttgcatgagtaaattctttagtggtgatttgtgagattttggtgcacccatcacctgagcagtatatattgcatcatatttgtagtcttttatccctcacccctctcccactcttccccctcaagtccccatagtccactgtatcattcttatgcctttgcgtcctcatagcttagctcccacatatcagtgattagaacatactgtgttggttttccattcctgagttacttcacttagaataatagtctccactcttatccaagtcactgcaaatgctgttaattcattcctttttatggctgcatagtattccattgtgtgtgtgtgtgtgtgtgtgtgtgtatatatatgtatacaccacagtttctttatccatacattgagtgatgggcatttggattggttccacgattttgcaattgtgaattgtgctgctataaacatgcatgtgcaagtatctttttcgaataatgacttcttttcagaagagattgctggatcaaatggtagttctacttttagttctttaaggaatatctacactgttttccatagcagctgtgctagtttacattcccaccagcagtgtagaagtgttccctgttcacccttttcaacaaattgtgctgggataattggccagccacatgtaggagaatgaaactggattctcatctctcaaccttatataaaaatcaactcaagatggattaaggacttaaacctaagacctgaaactataaaaattctagaagataacattggaaaaacccttctagacattggcttaggcaaggatttaatgactaagaacccaaaagcaaatgcaataaaaacaaagataaatagatgggacctaattaaattgaagagcttttgcacaggaaaaggaacagtcagcagagtaaacagacaacccacacagtgggagaaaatcttcctaatcaatacatctgaaaaaggactaatatccagaatccacaatgaactcaaacaaataagtaagaaaaaacaaatagtcccatcaaaaagtgggctaaggatatgaatagacagttctcaaaagaagatatacaaatggccagcaaacatgaaaaaatgctcagcatccctaatgatcagggaaatgcaaatcagaaccacaatgtgataccacctcactcctgcaagaatggccatcatcagaaaatcaaaaagcagtagatagattttagtgtgcatgtggtgaacagggaacacttttttttttttttttttttggagacagttttgctcttgtcacccaggctggagtgcattggcgcaatctcagctcattgcaacctctgcctcccaggttcaagtgattcttctgcctaagcttccctagtagctgggattacagacgtgtgccaccacgtcctgctaatttttgtatttttagtagagatggggtttcatcatgttggccaggctggtcttgaactcctgacctcaggtgatcccacccgcctcggcctcccaaagtgctgggattacaggcctgaaccaccgtgctgggctgggagacatcttctaagtacttggatagtgtggggggacagggtagacacctacacataaatggatgttgttagaagagagaaagggggacatggatactcagtgaacacacagaaatggccactattgtggtgatgttggtaattaaacaccaacagccttaattatgcaagaattcttgcaaataatagggttagccatatatttagacaatttggagtaaagaaagctttaaaaattacttatacatattggtaaatttaacatgaagagggatctaataaaatatatgatattgatatgcagaaaaagtctaagtatgatattccatgcttataggaaatttaattttgcggggagagtaggctggaagttcggagtgattgtttcctgttacaggccaaaaaatttgtttggttacttagtggtagcattttgagaggaaagtttacagaaaactagagttattttgtgattatgcttgaattgtctttattgtttccaaggcatcttttttttttccttctagttatcaagatgttaggttccgtgcccttgtgggccttccctctgcccaaaaaaagcatggatgagcagagtcatatcattaaaatggcagtctttgttagtttttctagagaagatggtctctttggtaggctgggtgtatcttcggcaaatgagttatttatacatataaactattaagttggcaagtatttcttttttttctttttctttttttttttttttttgagatggagtttcactcttgtcgcccaggctggagtgcagtggtgcgatctcagctcactgcaacttccacctcctgggttcaagcgattctccagcctcagcctcccaagtggctgggattataggcgcccaccactacgcccagctattttttttttgtatttttagtagagatggggtttcaccacgtcggccaggttagtctcgaactcctgacctcaggtgatccacccacctcagcctcccaaagtgctgggattacaggcgtgagccaccatgcttggcctaagttcgtaagtatttctgtgtaaaactgcaatttcagctacataggtactttgtgaatgaatcatagtagaagttatttaaaaattcctttaagtaaaaattataaacatgaactagagctatatatatcagtgtgaatgaatcttaaaaatataaggttagacctcgaaagcaagttgtataagaatatgtatagtctgctgttatttatataaattttagaaacctacagaaccactcgtacaatgctggtagagtataaattggtatcctacctctacatgagagagtgacagcatttattaaaattaacctaacaattcaacttctaggaattattttatagatgtactcgtgtatgaaataatgggttattcgctgccatattgttgtaaatattaatacaaaactttcgaagtaacctttctaatagtaatagttatggtttatccatatagtgaaataccttgcaaatattaaggaagaaaaagggaggaactttgtatattttagagaacaatttccaaggtgtatttttaagaggaaaaagtagaacagtgtgttcaatatgcctaccacttatgcataaaaggcaggggcaaatctgtatcttaagtgtgactgcttttatatatagagtatgtctctttaaagatacacacaagactggttacattagttgctcagtataggggactaggtaaaggaggacattgtgttgcaccatagatgcttttgtacttttgaattgtgtgtatagtgcaggtattgtgttatcaaaatatatgcaatgacatttgtaaaaataaatatgaaaaataatgttactatattttttatggattcatacccatgtaaaaatatttaaacgtgggaaacacaaacaccaaattcaggatagtggttacttctgaggacagatgaaggataagggaatctgggaggagtcatgcagggcttgagttatatttgtaatgttttattgcttaagctgatggtggctcatgggtatttggaatgcccttggtgtgcttgaaatgtttgtttgctttcttaaattacgatctatagcttttaaagcccacccttccccaggattaagctatttccttaacacgtttttattctttcaattttaaagtgggaatgaaatggttaggtgtctagaatatctttagtagatatttctatctttgctgcttctctgtcctattaaaatcctctgtttcaaagtatgatcttgtttcccttcaggattatatatctaattagaagaacatttgttacaatgttatgcagttagacaaagttccctttagatagcaatagcatggttgttagctaatatttagttgactaatctgctattcttgtgagggggacattgtgaatgctggtaatatttgctctgagtaatgtgcaagtcttccgtggccaaaatatctgtcttccgtttcatttaaaagcaaaaccttagcactattctaaaaactgacagtctgaagaataaagtttgaattttgaaaaaggggggaatcccttaatagtgcatatgcctgacagagtccatttactacattcattgattgactatggaacagcatttagtttggctacaactgagtttactcactggggagaatatttagcctggttttgagaaaacagtttagtttctgataccatgccaagccctttgtccctctcactgcacagtgatggtggggagagtggataggtcaaaagacttgggagtcagaagacctgtcccaacttgatcacaatagctttacttccacaacttacagaatatcttagagcctcagtttctttatctgtaaaagacaatacctccatcataggtttatgctcaaatgtgataatgtgagtgtctcctaagctattagatgccatattttaaaaagtattatgctactgaaggccgggtgtggtggctcacgcctgtaatcccagcacttttgggaggctaaggcgggcagatcacgagctcaagatattgagaccatcctggccaacatggtgaaaccccatctctactaaaaatacaaaaatcagctgggtgtggtggcatgcgcctgttgtcccagctactcgggaggctgaggcaggagaattgcttgaaccccggaggcagaggttgcagtgagccgagattgtgccactgcactccagcctggcgacagagcgaggctccatctcaacaacaacaaaaaaaaaaaaaaaaaagaaaaagaaagagttgactcctgatagactatgaaggctgggatacaaattcaaaaagcggaaaaccacacgagctggaacattataggctgggagcaaaaagccctatcctgctaaataactcccactgctgtcactgtgtgagggtataaggagcagttgatactcataagttaacatttgtttggttcccagtcttcatgtacatgtgttccatttaagaagtcatgatcatgtgtagtacaattagaaaacctgttttcaaaaaatattacttttgttaacttgttaattttaatggtgaatatcatagtttagaaaatccaccctccttttcttgtcagggactgagtgtgtggtcctgctcctgttatgtatggaggcaaagggaaagggctccggccccctcaaaatcatgtctttggtgccagccggttctgttctcagtcacctggatactgaacttccctgagcagggcagaactgagatccagtgggcttctccccaggatacttacgctttttcatttgatttcaggtctcctctttcgcttcctattgcaaccaatgaaggccattcctaccataagtaaataaaaaagaaaatctatctttaataaataacaattgtatatatttatggggcacaatgtgatgttttgatacatgtatacattctgcactgatcaaatcaggccaagtagtatatccatctcctcaaatatttatcatttctttgtggtgagaacatttaaagttcccttttttaactcttttgaaaaattaatatatttactgtaatcatgatgctatgcaatacaacaccaggatcctgttcctcctgactgtaattttatgtagccattgaccaatatcttccttttcccctccagccccacttaccccagctactggtaatcaccattctactctctacttctgtgagtttgacttttttagattccaaatataagtgagtctcagacacctctgacatactgatttcaattcctttggatatatactcagtaatgggattgctggatcatatagtaattctatttttagttttgtgaggaacctctacactgttttacaaaatggctgtatttatagtttcaccagcagtgtataagtgttccatttctctgtgtccttgctaacacttatctttcacctttttgataatagccagtctaacaggtgtgaggtgataccttattgtggctttaatttgcatttctcttatgattagagatgttcagcattctttcatctatctgttggccatttgtttgtcttttttttatttttatttttgagacagtgtctcactctgttgcccaggctggagtgcagtggcgtgatcatggctcactgcagccttgacctcctgggctcaagcgatcctcccacctctgcctcccaagtagctgggactacaggcatacatcaccacgcctggctaatttatgtatgttttatagagacaaggtctcactgtgttgcttagactggtcttgtattcctgggctcaagtgatccacccgcgtcggcctcccaaagtgctgagattacaggcatgagccaccatgcctggccggatattagctatatatctgatgcatgatttgtaaatacgttttctcagtctttgggttgtctcttcactctatttgtttttgcttgtttgtttgtttttttgagatgcagtctccctctgtcacccaggctggagtgcaatggcgtgatcttggctcactgcagcgtccgcctcccgggttcaagcgattctcttgcctcagcctcatgagtagctgggactacaggtgtgcaccactacgctcagctaattttgtatttttagtagagatagggcttcaccatgttggtcaggctggtctcgaactcctgactttgtgatccgcctgcctcggcctgccaaagtgttgggattacgcgtctggcctgtttgtttgttttttgctgttcagaagctttttagtttgatgtcatcccatttgtttattattgcttttgttgcctgtgcattagggggtcatatacaagaaatgattgcccaaacctgtgtcatggagcttctcgcctaagttttcttctagtagatttgtaatttcaggtcctaaatttaatccattttaagttgatacttgttaaggggtgagataagggtccatttccattcttctgtatgtggctatccagttttccaaatgacattattgaagagactgtcctttccacattgtgtagtcttggcacctttgtcaaaaatccattgattatagatatatgcatttattctgggctatccatcctattccattggtggacatgtctgtttttatgtcagtgccgtgctgttttaattactataggtttgtaatatattttcaaacatggtagtgtgatgcctccagctttgttctctttggacctaaagtctattttgtctgaaataaatatagctatctctgttctctttttgtttgcatttgtatggaatatctttttcagtcccttcattttcagtctatgagtgtcctttatggtgaagtgagtctctttataggcagcgcagagttgggtcttgttttttatccatttagccactctatgcctattgtttggagaatttaatctgtttacattggaagtaattattgataggtaaggacttagtagtgccattttgttaattgttttctagtgtttctgtagaacctttgtccctttctctattactttccccctttgtggctcgattgctttctgtagtggtccactttggattttttctttttatcttttgcaaaagcaaaggcttttgctttgtagttaccctgtggcttacacaaaacatcttataactggtatataagctgataacaagttaactttgatcccatacacacatgctacatttttactccccctcttccatgttttatgttcatgatgtcatgatatacatttaaaaaataatttgtatctttaacaaattattgtagctttattattattattattttgagatggagtttcactcttgttgccgggactggagtgcagtggcgtgatcttggctcaccccaacctccacctcccaggttcaagctattctcctgcctcagcctcgtgagtagctgggattacaggcatgcgccaccacgcccggctaattttgtatttttagtagagacggggtttctccatgttggtcaagctggtctcaaactcccaacctcaggtgatatgcccgctttggcctcccaaagtgctaggattacaggtgtgagccaccgcgcctggctagctttaactatttttaatagttttctcttttaacctttatactagatatataattcatttacttaccaccattacagtattagtgtgttttggggttgacagtatacttactttttccagtgagttttatacttttcatgttttcctgtcactcattagtgtcttctttcttcagcttgaagaagtttctttaccatttctttttctgtttctttttgtttgtttgagacaaagtctcactttgttgcctaggccagagtgcagtggtgagatcttggctcactgcaacctctgcctgctctgttcaagtgatcctcccactcagcctcccaagtagctaggattacaggcgtgcaccaccacttgcagctattttttttttttttttttttttgtatttttagtagagacagggtttcaccatgttggccaggccagttttgaactcctaacctcaagtgctctgcctgcctcggcctcccaaggtgctgggattacaggcgtgagccaccatgcctgaccactgtttttcattctttatccttttttcttcctcagattgtatgatttccagtggcctgtcttctaattactaatcttttcttctgcttgttgtagcctgtggttgaacccctttattgaatttttcagttcagttatactattcctcagctctatgattactgtttggtacttctttaggaaatccacttttcaactgataaactaactatatccatttctagggttgccgtaacaatgccacagactcaatgacttacagcaacagaaaattattctttgccagtactggaggtgagaaatttgaaatcaaagggccatcagggccatgtttcttctgaaggctctagtggagaatctgttccttacctcttccagctgctgctgctttttttttttttttttttgagacggagtctcactctgtcacccagaatagagtgcagtggcatgatctcagctcactgcaacctccgcctcctgggttcaagtgattctcctgcctcagtctctcaagtagctgggactataggtgtgttccaccactcctggctaatttttctatttttagtagagatggggtttcgccatgttggccaggctggtctcgaactcctgacctcaggtgatctccccgcctcggcctcccaaagtgctgggattacaggcgtgagccaccgtgcccagccctcttccaccttcttgtggctcctgatgttccttggtttgtgatagcataactccagtctctgcctctgtcttcaaatggctgcgctcactctctctctctctctctctctctctctctgtgtgtgtgctctcctcttcttgtaaggataccaggcattagatatagggctcaccctaaatccagtaagatttcatcttcaaatccttcactagtcacgtctgaaaagatcctatttccaaataagataacaatcagagattctgggttgatatagattttgtggggacgttatttacttcactacacttgtttttatattttgtatacttttagttttatgctttctttcttagtttttgagtaacttttaaattggtttgatagaatgtattagtaaaatgtctgtgggctgggcgtggttggttaatgcctgtaatcccagcactttgggaggccgagggggggcggatcacctgcggncaggagttcaagaccagcctgaccaacatggggaaaccccatctctactaaacatacaaaaattacccgggcgaggtggtaggtgcctgtaatcccagctactggggaggctgaggtaggaaaatcgcttgaacccaggaaggcgagggtgcagngagctgagatcatgccattgcactcnnnnnnnnnnnnnnnnnnnnnnnnnnnnnnnnnnnnnnnnnnnnnnnnnnnnnnnnnnnnnnnnnnnnnnnnnnnnnnnnnnnnnnnnnnnnnnnnnnnnnnnnnnnnnnnnnnnnnnnnnnnnnnnnnnnnnnnnnnnnnnnnnnnnnnnnnnnnnnnnnnnnnnnnnnnnnnnnnnnnnnnnnnnnnnnnnnnnnnnnnnnnnnnnnnnnnnnnnnnnnnnnnnnnnnnnnnnnnntgccattgcactccagcctgggcaacaagagcaaaactccgtctcaaaaataaaaaataaataaaataaaataaaatgtctgtggaatcctaagacattgaaattgatatgaggcaggttttcagtacactggattcatattctgatacaggaaggaggtcatagtagcagtgcctggcacatagtaggtgctggtactcaaatatttcttgaatgaatgaatttgtatgattgaacgcatttctggataattcttattactacaagggattcagtctattcttttcaaaactgtatatacattaagaatttctctgatatgtttaacttccatttatgttttattaaaaggatgtgtatttttacatgtcttctgaggattatctttttaaaaaaatcaaatttcacttaaccatgttcggaaaaagcataactttaagagtctgacctgggttgaagttttggcttttccactcattagctgtgtaactttgggcaagttatttcatctttctgtgcctcaatttcctgtaaaatgttgctaataatgccaaatcttccaggttggtgagagtgtgtcagtatgtttgggtacaaagtgagtatgctgcaaatattaactagtaagttgtatactttaattatgtattgtaaaggaactagatttatgttgtaaaaaattgtttttgttaaaaaaagagcccttgtttattaaaactcacatcaaattaagctgcttttttcctctgtgttcttctgtgaccaaacaagtgttcctgtagtaggtgaaatcactgtcaaggattggtgttatgtgtatatatgtctgatagtaatctgttgaacattaaccaaagtcaggaaatgagttgaactttggaaggtagaaatctgaggattggtggtagtggtggtggggtgggagtggtggagcgggttggagggattgaagtatatgggaatgggagctagatacattaaaatgacagctattatttatttagcacttatgtacctggataaaggaatgctattgcatctacatggataggtatcaccaatcagagctgagataaaactggctattcagagattaaaacaaataattcagggctgattagatacagatgggggaacaggtctgggagcagtggaaaataaataaccctaaataataaaggctaccatttatttatcaatcacttcctatgtgccaggcattgtggaaagtgctttacaaacactatttcacgtatctgttatagtcacccttatggagtatgtggtattcttattttacagatgagtaaatagaaggttgtagtttctttaacttgcccaagtcaaacatctagtaagtaccttcaaagaggaataaaaccgaggtctgtgcgactataaaatctatgctttgtatacatactgctttcacatgtgcaattggaattaggggttcaaccctattcaactctacttccaaaaaaggtgaatctgctaatactacttccaattgtttttttcccctttggaaatttttttttttgagatggagtctcgctctgtcgcccaggctggagtgcagtggcatgatctccgctcactgtaacctccgcctctcgggttcaagcgattctcctgcctcagcctcctaagtagctgggattacaggtgcgtgccaacacgcctggctaattttttttgtatttttagtagagatggggtttcagcatgttggccaaactggtctcgaactcctgaccttgtgatccacccacctcgtcctccaaagtgctgggattacaggcttgagccaccgcactcggccttggaaattttttttctaactgataagaatacaaagcagcaagtaaaattcaaaaaggatcacagtggaataacttttcattttagcatattaacatttttatatgaatttttttgtgtagctaaaaaatgtaaaatgcatatataattttttttatgtttataagaacattttctatagttttcctatgagagtctgttaggttggaataacaatgtattaaactgttctctgaaattggtcagccttttgttcttacataatacactgtaatgaacatatttatgcacttttttaaatcaacttttaaatcaaattcttagaaggaaaactacagattaaaaaaaaaaagatcctgatcatgtaatttgtgtgtgtgtttatgaatttgaatgatctcttggcatggctgtcagggcactgcctctattcctgccactgtgatacgatcatacttttgtgatttcttctattacttcaaaagggaagaagttataccaccatactttaaaacaattaatttataatttgatgaaatgctcaagtattagaaaaaagttttatggtatatcttgatcggttatggattttgttctgcttattatgccttcttttgggtggttggggagcttctgttatttacaggtggattaatattctgctccgtattactcatgagttaaattatactcaattccctattccgtagttaccccttccttcctatttttgctaatttcctcctcattttttgttgtgtgttctataaaatttcccgtcacattattattgctactacctactgttttctaaatgattttaattgtattgtaaaattcttcttgctctgctctaatttcatacctcctatatgttcttatcactctgaaaatagtaaattttgctaatacaatcatgcatttcatggatgagtttaatgtctattcatttttttgttttattcttttgtattataagactttttgctttttctcactttactgttatttttgtcatcattacaggccgggaaggtcccatagcccaggttgcttttggtcaatactgttttccccagcagcattaactggcatgtaggagatgctcagtacataagccaaaataatgaatttgagagaatgctttgaattcctattccagttccttattaaatgacaggatatatgtccagagttttggataagctccagtcatttcttaaagttaattggggttgaagttcagttgagcagggtatcataggagtttggttggtttgtgatggtttgggagttcaggcccaaattggattctgtcttagtattctttccaagtcttgagtccaccagtattatccagtattgtggctatttcccagtcctgtttcagctgagcagctggcaagagaaagtctgtgccaagccagagcttggagattcttggaggatgtgtttagcaccatgcttaggtttcaacatacttgttctaagaaaaaagatacttcctgaagcaagctttaacagtcaagttggctgctcttaatcacatctaattagtactggagattggagaaagccttattagaaattagaatgtgcttcatttccacagttgatttcagctgtgattatagggttgccttccttctttctcttatacatttcatactacacccccatcctcctaatatagttatatcgtacttttaataaaacctatatttggttttttcataattgtggctgtgtaaatactatttgctaagtcagtatctatgactatgttttatttcttacagaactttaattttactggcattcatgaattatctcattttttttcatttgtttaatttttttacctaaagcttaatttcttacatcttccagtgcctttgtaaaatccctcagaaataactatcttggattctctgtcacattcctgtctggatttgttgccttctaggccttctccatatgttactgtgactttgcttcaccattttgagattctcttagtttttctcctatatcggatcccttctttgctggattccatgccatctttcttgggtttcttcctgattttgatggaatatatattctccagtaggttcctgagaaagggtgcacaaaggttaaatttttggagacttagcctcatgactgtctaaattctactggtgatcatatccccaaaagaccaaatccctaatgccataatcccaaatgttgaaatactgaaagatcaaaatctctaaaaatcagaatccctaaattctaaaaatctcacacatctgaaatcctgaaaatcagaatcatgaaagattaaaatcccaaatgttgaaatgctgaaagccaacacctggggtagaaattagtgcacattcggttgtatgaaagatagttgcatcattttacttgcatcatattaggtggaaccgattgcctttttattgtatttatttggaaattaagtatggtttaaggagatggtttatgggtgccaaattgacgaggggtggattcatggatttaattttaggtgtcaacttgactggattaagaaatacctagaaacttgttaaagcattattttgggtttgtctgtgaggagattagtatgtgagtctgagtggactaggtggggaagatctgccctcaatagcggtggccaccattaaatctgctgggggcccagagagaacaaattgttgcctttctgagagctggaacggacttttcttctgctgaattgaacatcagaactccaggcttgttggcatttggactctaggacatacaccagcagccccctgggtcctgggctttcagcctcagactgagacctggtttggcttggttctgaggtctttggactgagccaagctaccagcatgccagggtctccaccttgaaaatgacctgtcctggaacttatcagccagtataatcgcatgagccaattcccctaataaatcgtctctcatatatctatgtatatatatatcttattggttatgtctctcaagaatgctgtctgtcgagaattatgtctgtcgagaatgctgactaatacggatttggtattgagaaagccaaatatcattccttcttactgtattccttacagcacagtggaagagacctgtgaaattgttcccttgcaaaaaggctgtgataaattaagtataccaggctacttaatggtgaaagagaaaagtttaaaagctaattattattggtgttgtgaagacagaaaatcacttaattgcaatggccaagcaataaccagatttctaaatggtcagcatatacttacaaaatatttaggccacaaccgctctagtctaaacacaagcgaatgttttgaagatcatagaagtgaatatgcaggtgaaaaatataagaaagctcccctgccaaattattcaatcaggtatgacttctgccctttcacacatagtgccaatttgctatgctatgtattttatctttgcatcatttctaatactgcaggtataaattctgtaaaggcttttagagaattctaattcattttatgcacttttttgcatatttgactccatgaaagtgcattatcacaatgtgacgtaatgtgtaagcattgtgcatgtacataaaaatgttgaaacttgctcagtaagtgaagagatgtccgttttgttcatctgtatttgtgaaagataaaatttctcaagatcttggctctttgggtgactctattgcagtttttgtgcaaacggtagtgacccattgcagtttttgattgatcttgtccgaagattcaggttgtctggtatttcagatgaccgcagttatgaatctgggtgcacctgattaccaaccatagtgatatgtgtttatccattttgctttttaatctatttcttcatgaatacattttctctgttcctattatacccatgcaatggttgttagtatacctgagtatttatgcttgcaaaaatatgttattagtgcctattttattgtgtaaaggggcctatgaactgttccgttgtgtttttatgtttctcaaataaatcttttaaaaatggaaataagtgtcttttagagaactttttacaaattatttttccaaaattcaattttttggattttgttcttttgggattgtgatttttggaattttagattttagggattttgatcttttgggatttcaacatttgggattatggcatttgggattgtgtcttttgggattatgtcctaaacccaaattctgtcaccaccgactgtctagtgatagcatttaaaatggaaagataaaatgacttgattttttttttccctttctttttaactgcatttaaaaaaatagaggctgggcatggtggctcacacctataatcctagcactttgggaagttgaggctggtggattgcttgaactgaggagtttgagaccatcctggtcaatatggtaaaacatcatttctacagaaaaatacaaaaaaattatctgggtgtggtggggcctgcctgtagtcccagctacttgggaggctgagatgggaggatcacctgatcacctgagcctggggaggttaacgctgcagtgagctctgattgtgacacggcactccaccctgggtgatagagtgacaccctgtctcaaaaaaaaaaaaaaaaaattaaaaaacaggaaaaaaaatttaaaacacagagaaaccaagaaaactagaaactacatgcacatgaaccagaatttcaaaggtataagaggttatggatggggaaatgtatctatgacatgagagagtcttttgggatgatggaactgttctgtatctgactatataatgctggttacaccaatttctatatgttttaatatccatataaatgatactaaaagaaaaatttcagtctgtatgtatgataggttaaaaggtgaaaaattaaaagaattaaaaaatacaaaaaggtatacagcaaaaaagtctccttcccctcttcctttagtcttctagctttctcttctggaagaaaccactgttaccaatttcttatgtattctcctatgtaatcactcttaaacatctgaacatttgggatgaatctggcaaaagagaaaagaacttatatttgcttagctattttctgaggatgctagatgactactcttataatatgtctaaatatattattatttttattttgttgagacagtctgaatcatcaccccagactggagtgcagtggtgcaatctgggctcactgcaacctctgcctcccaggttcaagtgattctcctgcttcacctcccaagtagctgggattacaggcatgtgccaccactgcacccagctaatttttgtatttttttgtttgtttgtttgagacagagttttgctcttgttgcccaagctggagtgcagtggtgtgatctcggctcactgcaacctccgcctcctgggttcaagcgattctcctgcctcagcctcccgagtagctgggattacagctgtgtaccagcacgcctcgccaattttttgtatttttagtagaaacggggtttcaccatgttagccgggctggtctcgaactcctgatctcaggtgatctgcccgcctcggcctcccgaagtgctgggattacaggcatgagccaccgctcccggccattaatttttgtattttttagtagagatggggttttgccatgttggccagactggtttcgaactcctgacctcaagtgatctactcgcctcggcctcccaaagtgctgggattacaggcatgagccactgcactgggccagaatatgtgtaaatatattattaatcatacttagtactaatttattaaattacttcttttacagttggcaaacatgaattgactgggcataaagtagctgtgaagatactcaatcgacagaagattcggagccttgatgtggtaggaaaaatccgcagagaaattcagaacctcaagcttttcaggcatcctcatataattaaactgtaagctctgtttatattaaatatagtccagtcatcttttcatcttttttgttaacctacttaatgtgacaagtgagaaaaatgactgacacttctttttgtttcctaagggttttgaaaagtttcttcctaggctgtgtgcggtggctcacacctgtaattccagtactttgggaggctgaggcaggcagatcacctgaggtcaggagttcgagaccagcctggccaacatggtgaaaccctgtctccagtaaaaatacaaaaattagctgggcatggtggtgggcgcctgtaataccagctactcgggaggctaaggcaggagaatggcttgaacctgggaggcggaggttgcagtgagctgagatcgtgccattgcactccagcttgggcaacaaaagcgaaactctgtcccaaaaaaaaataaaagtttcttcccattcatgtatttttctaaccccattgatggtcatttaagcctgtgttcatgttttgcccttgtgcttatcagctgttatcttctcattctttcctgtctcctggaaagatgcccttctggtaatgtttggtgccccattgctgtaaaaccaacagtgatctgctagtaaaaactcttgacctccaaatgcccacatgatgtcagttagcctcactagtgagaatgcggtagtagaaagggtttttccccatcctgcttatacctgaacatatagataacaaaatttcaggaatctaagatttcaaaagggcagtaatcttactgttgttttacagttgccagttatagagtctacaaataactatttcctgctcagcttctgctttgttatgcaggcaataacttacagatgcttaggtttttctcctgaactggctgactcaaacttgtttcactcttacctcttctcatttgttgagtgctaggttttaaataccatccatatgctgaccacccctaaatgtacatctcttgctttaagatctcttcttacaccagacttatttgctcactgctgactttacatttccatttggatgttcacaagacatttaaatctcaacccggcccaaaatgaactctttattactctcccaaacctgctcttcccacagttttcaccatcttggctaacagccaatgacccagggctaaaacttaggaaccatttttaacttccctgtttctttcactttctaccatgcatttcatttcttccttcacaatcaagctaggatttgattgcttctcagttcctttattgctgtcaacctggtctcagccaccatctgtctcatgaaatcctgaagtaacctcctgtggctacctttactgttgacagttaattcttcacattgctgccatagttttacttttaatatgccagatcacatgactgcttaaaacgtacgatagcttttcatcttccttggagtaaaagccaaagccttatcatggcttgtaaaattctgtgtcttctggcctgcagttaacacctttgactctacatcctatttctctctaatattcctcgaacatgccaagcaggcttctacttggggacctttgcagttgctattccctctcccagtttcactttcctcctagataattacataatttgttcccattcttcttttaggctcagctcaaatgttattttattagaggctttcctttagcactctgtatacaaagattccccttcatttgctttatttttcttcatagcatgttccaccacctgagatattgcttatttatttagtgtctgtttcctggttcctggaacatgaactccacgagagcagagaatttttgtttcctgcagttttcctagctcctagcctagtacctggtatactataggtgcttagtaaatatttattgaatgaatgaatatatgtgttttaatatttgtagacaatgttttctctcaccaggtaccaggtcatcagtacaccatctgatattttcatggtgatggaatatgtctcaggaggagagctatttgattatatctgtaagaatggaagggtaagctgttctgctttaattctgtatgtattttgtaactcccctttatcctttactagcatcaaaatgtcagcaaccaattttaagaggtctatttaataaccagttcccttagtcatatatttgtttagaatcataaactatgtagaactagaaaggatcttaaagattatctccttagcctgtttatacagatgtggatactgagcctcatggcttatatgattgctcacagtaacgtgatttattaatgacggaattggcttgagcccccagaactcataatcctcagacttatgcttccagggtatacaaatactttgaatatgtatcttaatgtaattaatcgttacaaaatatattattattacttaaagatctaggccttgctagtcaattctagccacatttaaattgcattcattttttggtttcagaaatctgatgtacctggagtagtaaaaacaggctccacgaaggaggtaggaattagatataaagaatttacagctggaaggaactttgtaggacattttgaacactaccttaagttacagatacaaaaactcaacactgccctctgcccatactttttctcatacccaggttatgtggtatgcaaaagcccctttgtgggagagctgtagctagccctgaaaagaaagcttttctctcaatcttaagttatttacattactcattcatttgttctatatagcatgtctatttacttttatcaaaatcaaacttattaaccaagttaattttgattttactattgcttaacatgattcatttctatttcaggtactcccctttactcctgcttctccttaccaaaaaaaaaaaaaaaaaaaaaaaaaaaaagttctgcctggagaaatgagaaacaggcacaattgatatatatttttcttatcttttctgttgttgtttatttcttggttttaccttgtgggtatttcttcagttttaccagttgaatattaaaatttcagcacccgtattttctatttcaaaagtttcttattttctgaaattttcatttttttagtcttctgttatttgcctcacagatataataacctagtctgaggatggcattttaaaaaaagtcttcctctgttccgtcttgttctgtaccttctgtgctctctgcattcattttattcatttttgtctttgatgcatggcccttcagatatttggtgattcttggctgtccactaaatatttaagaatagggtattaaatgccaggctcatgtgggtaggacttactgattgctgggttttctcatagcttgaataggtagggacttgtctgttttattactgtataccaaatgctaataataacaaatatgttttcttggatcagatatttgctccagaagaaaccttcccatttccttgaaggccttagcttagctgccagtgctccaggagctgagtggggaaaagagatgcaagtctcactagttagtatgttgactttgtcttagcccccatattttccttaggatgccttatccctgccttggtgtccttgagagcagagctggttcagccttactagagtaaattataggtcttattccccaatatgggtgagtttaaaagcttcttacttcaagcacttgtcctgttttcagctcatctctcacttctaccttgagcagttccctgtgtttccaatttctaaggcttcccaggctttgtatgcagatgtttattttttactggtttctacccctataggcttaggtttcagctttctcttgtaggcttagtctttattactgtttatctattgtcgtccttggtgactcctcttgattactgctgtctcttttgttctttttgtctttatatgcctgttttattgctgatgtcattttagtgatgtttcaagagttggagacaaaagatttaatctgttacgtttaattggaaatgtattttgacttttctaaccttcctttatagacatccctttctccatcctttgtaattgtacttgttactaatacagtataattttcatttttgtagcctgtctattttactttttatattttgtttaatcaagttttctcctattttttcatatttgaacagatactctttttttttccccatgaacctacaaatctagaaataaaagtactagaatgctaaaggattagtatttttctagaggaatggtatcttataatagtttcttgtttcaaaataaattactgatttgtattttctcccatattatccatgccctttaaggtgtaagtctggttttagaatgctaatttgtgacctgtgttagagaattgcatattggagtccttcgcctagaggattaatagcttatttattaaatatgactccttgggagcaggcatgtccaagtaatggctgtcacttatgttgaaaaaagtggtaataatatatggatacatagagaagtttaaaaaaaatacttcaggctgcatgcagtggcacatgtctgtaatctcagcactttgggatgctgaagcggtagattgcctgagctcaggagttcgagaccagcctgggcaacatggcaaagtcctgtctctatcagaaatacaaaaattagtgggcgtggtggcatgtgcctgtggtcccaactacttaggaggctggggtgggaggattgtgggagcccagggaagccgaggctgcagtgagccgtgatggcaccactgcactccagcctggatgacagaacgagactggatctcaaaatatagataaatttaaaaccccgccccccccaaaaaacacaaaaaaacaaaaatgaaaaggtagttgctatgtaagatttttttttagcaagcatattaaagataaaatgctatgatattttattaaatgaattaaggtgtttcttgttaaaatgtcttctattttaggacatatagcaacatagttgcttgctggtttatgaatagtgcttaaatattacttcctcatggtctaaaatagtgtccctcaccccactatcactcactgcacctatattttgctttatttttcttcaaaacagtatcactccttctgactatatttattagtctattttcatcaactagattagcctttgttttattcattgctgtgtaatgagtgtctaaagcaatgtatagcacgttgaaggtattcagtaaatatttgttaaaagaatgaaagagtaaacatttgccgcttataaaaggaaatatgccaaatttcaagtagatattgaaattatttgaaataactcagatatagaggaaggcaagctgttacaatgtagtcatatgcaaatgataatattagaaacttgagttactgatttgggttccaagaccatcttagcatttctgttttgtgctgcaggtatctcctcctcatgtcaaaagtatctcataagtgaagttcattcggaagattttcatgtattttgacaattttataggttggagaattatagataggacaatttactttgaaagacacacctttaaaaagcctctctaacttttcttagctggatgaaaaagaaagtcggcgtctgttccaacagatcctttctggtgtggattattgtcacaggcatatggtggtccatagagatttgaaacctgaaaatgtcctgcttgatgcacacatgaatgcaaagatagctgattttggtaaggataattttatagtttcttaacgttcatttctaatgttcttatagtttcaatgaacctacctagaattcttcagataactgtaaaagattacataaagtaatagactgagtatatcaaagtattctgttttgtctatgaacatacaaaaagaagaaaagctaagaaatcatcttttcttagctttaaatgtctttattactattattttatagaggcagggtttcactttgtcgcccaggctggagggcagcgacgtgatcatagctcactgcatccccaaactactgggccaggtgaccctcctgcctcagcctcctgagtagctgggactgcaggcgtgcactaccatgccaggctgttttgtctttttgtagagacgagttctcactatgttgtccaggctgctcttgaactcctggcctcaagtgatcttcctaccacagcttcccaaagtattgggattacaggtgtgcaccactgcacctggctctttaaatatctttaaaattaaattttaaacaacttaagttggtagtattagagagactatttgaaaagagtattatttgtgaaagagaaggtagcagctttatttccaatatgttcaaaagaatcaagcatgtagaagaaggaaagtgagtgggatggaattatttaaaaccttaaaaaccagaagtgaactatgtgaatttaattatttaaaattatttaaaacaattttttaattaaaaaaatttatttaaaaaattaaaaatgttttaaatgatagtaaattataatttgtttaaagaacattttgattgttaaaaatgaatttattttggctgggcgtggtggcttatgcctgtaatcccagcattttgggaggccgaggcgggcggatcacctgaggtcaggagttcgagaccagcctggccaacatggtgaaaacccatctctactaaaaatacaaaattagctgggcatggtggtgcgtgcctatagtccccactaccctggaggctgaggcaggagaattgctggaacccaggaggtggaggttgtagtgagttgagatcgcctgtccggcctgggcgacggagtgagacatggtctcaaaaaaaaaaagaatttattttttctgtatttcctatataaattgccattgaccttactaaacctaagagaaaaaggaatctcttctttaggttggttttagttcaaatcagataacttttttttgtttgttttttgttttgagacagagtttcactctgtcacccaggctggagtgcagtggtacaatctcggctcactgcaacctctgccttccaggctcaagtaattctcccaccttggcctcccaagtagctgggaccacagatgtgggccaccacgcgcagctatgtttttttaaatttttggtagagatggggaatcactatgttggccaggccggacttgaactcctgagctgaagtgatccgcctgtcttggcctcccaaagtgctgggattacaggcgtaagccaccatgtctggcccagagaacattcttataaaaattttcctcagttttgactacatctgtgtatctatatctataactatatctatttaaatgttcagagattaactggaaaatgccaaccaaacctgagctggttgttttggtgttttttttttttttaaaatagtaattggctaaattatttgaatttcttattcctcagttgattatttttatagggtgcatttttgagggagcaacagtttctttttggagtaaaactgtgagggaactttgaaattcaaaattactgtttttttttttttttttaaagaatcagaacaggcttaataggaactttgaattttaatccttctattcgtctgttatagattattttccctagtgatttctgtattaataaaacttaaacatggcaagttttttctaataagcaaaataaccaacagcttaatatatttgtattaaactctaacagtgcactaactttaaatgttgaaatagattacacattttagggcataatggcagaatatttggctacaatagaccataggattttgttgaagcaaataacaaaatgatgatttatcattttaatgcaaactcaattttattgtttaatgggattttaatttttgtctttgggaaatcttttgagtagctgattttgtgcactttcaggtctttcaaacatgatgtcagatggtgaatttttaagaacaagttgtggctcacccaactatgctgcaccagaagtaatttcaggaaggtagtatttgataccctgcctccctcaatacatttgaaattgtctttttctcctagattttgttagtctatagtgtcatatttaattctaatgaaaggaaagaaagataaggcttattcttaaccacatttatacgtgaatgagggttaaggactacaagtcaacattatattaaagttgttagaagagagtacattaatttttttcccaggtggaagaaatggaaagtttaaaactagggtgtttaaaaagtaggtaagacactggaaacttgaataatacagaaatatctagtagttagaaaaggattactatttacttagaggaaaaattaaacatgtaatgtgtagctttaattttttacatagatggcattttgtagtacctttatgtttcatgataaaatgtcttggggaactgggctgaagtaatctttagacttcatttatgttgaatctttgttctttaaaccttttagagactgcaatattataagaattttaacctctcaatttactaactaccagcattgagaacatgaagatatttgtacagtgtcgctttttgaatagtttggaaaacaggagaatttaatatttttaagaataactctttgtccttcactatactactgaaattgaaaacagaagctgaagtttgctagatttataatgaacttttaataacttttcacccaaaccatgcttgtgtgaatgttttgcatcttgattaactcaatgcagaaatactgtagtattttctatttttataagcttgttggcctagactgctcaaagaaatgagatttgtgtaaaaatatggctgtgagtaaggcaggagtacctaattttagatttgtcaagtttcatcttttgttttaatattaacttaatgtcaaaaattatttaaaaaatttttttaaaaattgtgttgtctatcttaattcttttaggaataaaacaattcaggacatggagactgtggaaagttgttatttaaataaataaaaagaaatgttataactgtgcatatatgcaatgggctattactgaaatttaatttttctaatttggataaagtctttcttcaagctcttggtgtatgagaacttttactttcaaaataatatttatcgatcagttcagcagtacataaatttaaagaaatccttttcctgaatccaggctttgaatgggtgatctaactagtctgcaactagttaaggcacttgactacaatgcactgcaaacgggatttaaaaactctgtgaaccaatttgcctggctttctttcacagcctcaggatcctttcaccttggtgtaaggggtcttgtgttattgggattgtgggctcagagtccattactaaagaacattctcagttgatgaaatatcacttaatctctcctctgtaacaaaaaccaatggttttaaattgaatagtgatatgtttgttcaagatttggccctattatcagatcccatcagggccatagtaaatagtagaacagaattttagccatggtgtgtaatttacaaaacttcttgacttttgttttcaaagataatactgatggaattaacgttgtaacatgtagtagtggctataaaaaccatattctgcttaagaattctttatgaaatatccatatttgaagtttttgatgaactgaatcttaggttaaaatgattctttaatccaattgttatttcctgttacagattgtatgcaggcccagaggtagatatatggagcagtggggttattctctatgctttattatgtggaacccttccatttgatgatgaccatgtgccaactctttttaagaagatatgtgatgggatcttctatacccctcaatatttaaatccttctgtgattagccttttgaaacatatgctgcaggtggatcccatgaagagggccacaatcaaagatatcaggtaataaagcagtttggaagttatcagatctgatagtatccatgataaaagttatgtgaaaaaaaaaagttgcagaacagaatatacagtgtaatcctgtttttatgtgaaaaaaatagagtgtatagacacatttattttattttgttattagaaatacatagtaaactggttaccttagggaagtaagattagtaagagggagggctttcactttttacttacacatctttgttttgaaatttttacagtgaacatcatattactttttaaattaacaaaaaagctaatgaaagactggtgctgtggctcacacctgtaattccagcactttgggaagctgaggaaagagaatcatgtgagctcaggagtttgagaccagcctgggtaacatagcgaggccccatatatatgtatatcttttatttttatttatttatttattttgagacaaggttttgctctgtcacccagcctggagtgcagtggtgtgatcatagctcactgtagccagtaactcctgggtcaagtgatcctcccactttagcctccctagtagttgagactacaggcatccaccctcatgcctggctgttttttgttgttattgttttgctttttgtttttgtttgtagtgacagggtcttgctatttttgcccaggctggtcttgaactcctggcctcaagtgatccttgtgcctttccctcccagtgttgggattacaggtgtgagccagtatgcctggcgttaggattaatacttttcagtagtaaatttgtgggtggctattttatttcttatctcatgaattattgtattttttttctttttttaatcccaaggaatgagatttaattgacatgtttttcctggtagtatacattgaattacatgcaaaattcctgttttgtaggtaaaagtcagtataaccagtttcatctggttcaacctaatagtttaaataagacaaaaatgatgatgacaaattttcttctcaaatctgagtgagccatttctgatgaagacttaaacaattttattgcaagccttgtttcttttttttcccccctgtggaaattttggtccttttggtcttctaatggctagactgcacatttatctgagaaggaagaaagaaatcagatatggatctaggaatagtaaatacgaaagcattagtataatgaagaagaaggaaagattatatgtggaacttgaagcttgattactttccacttactacacgttttagactagctaaaaaagagaccatgaatggcacggcatgattttatcaccaaagggaaaggacaaatcattctctaaaatttatattttaagatatctaggtaagaaatgtttttgtttgtattttacctattttcttccaattaaaatataatacatgacaattgaaaaaacttagaaaaacaccaacaatagagaagagaataaaaaattatctttaatcccatgacccagaagataaccattgttcttttcttgttttttttttttcctctctggattttatttagttttagcaaagtgacatagttcaggtcaaacatattcttaaatatacgaagttagggaattagaataggaaatcattcagggcatggcctttccagtcacacagaactgggtcataatcctggttctgtcacttactgtctttgtgaccttgagcatgttccttgatgtttttttttaacctcaattccttcatttaaaacaaagagatattatcttcatataattgtttcgatgatgaggggagatagtgtatatgaagtgtttagcataaaacttagcacatagtaagtactcaatagttgtctactatttttcttgttgttacattatcttcacttaacattatatcaaaagagtattataatgaagctacctaatatgttctctttctaagctggaaataagctgttcttttcattgtttgtcgctgtcatttgtcccataacttttttccccccattgctgtgtcaatacattctccctcttaaaactggagggaaattggagcatttccctcaacatacacaatgaagtgcgagctagaagaggaaaatttcagtgcaaaaagtgacaataatacagtatgaatataaatataaattaagtcatattctaaattccctaaactgttactttcagtctcagctctattcaaagtccttctcctgatcctgccatttttctctcagggaacatgaatggtttaaacaggaccttccaaaatatctctttcctgaggatccatcatatagttcaaccatgattgatgatgaagccttaaaagaagtatgtgaaaagtttgagtgctcagaagaggaagttctcagctgtctttacaacagaaatcaccaggatcctttggcagttgcctaccatctcataatagataacaggagaataatgaatgaagccaaagatttctatttggcgacaagcccacctgattcttttcttgatgatcatcacctgactcggccccatcctgaaagagtaccattcttggttgctgaaacaccaagggcacgccatacccttgatgaattaaatccacagaaatccaaacaccaaggtgtaaggaaagcaaaatggcatttaggaattagaagtcaaagtcgaccaaatgatattatggcagaagtatgtagagcaatcaaacaattggattatgaatggaaggtaagaaagaaataacattttgattattagcatatttggcaaacccatagtctataaaatgttttatagaagaattacttttgacttggtttttgttataccatgtgctaggttgtaaacccatattatttgcgtgtacgaaggaagaatcctgtgacaagcacttactccaaaatgagtctacagttataccaagtggatagtagaacttatctactggatttccgtagtattgatggtatgtacatcacacaaaacaacatagattagaccttgttactaacttggtattttacgccttgattcttttgaggcttcttgacttgttcctagtaattcaactgcaaaggaataaaaaatgtgatttcttgtgcctttgcaatattaacatttatgaatcttatttttcttgtaatcttatagcatattgtccttttaagattatcatcttgtaaaatccttaaagccaggtgtagtctgatcctaaggtgatagttttctgctgcatttgtttttttggtgtagttcattttgataagagacaatgttttatttagaaataaatattgactcttctgtaagcttttatttattattaaataagttttcagttaagaatgaagttatggcagttcttcattggccaattcaattgcattaagctacgctgttgagtgcaggtgtggtggcttacgcctgtaaacagcccagcactttgggaggctgaggtgggaggatggcttgagcccaggaatttgagaccagccttagcaacatactgagactctgtctttacaaaatattaaaaaatatatatatagtatcacctttgcttatggacggttgcatagaattattagatgaggttcacctttgaatttttttcttctttataaactcaaagatagtacacacatagtagcagaaagacacaggtttgagccatgatatgttggccaaaccagtttgtctggttatctttaggtccatatagtatgtatctgctaacatatactaatgcagtctgaaatacggaatgagttttatttttcttgtatttggatcaaatttgcaaccttagatttactagtactggggtataccaattgaatgcccattttgtttttgtattgtgttcccaaccttagtttttcttcaatttttattcattggaattgttgctcttttatgaaatactaaatgaaatatgaagggaaagtggaaagtaaaaagcactgagctgagacttaggagagttgggttctagacttacctttctgttcatttgttaccttgggcaagtcatttctctgggtttgttttcttatcattaaagtgaggggctggatgagatggtttccagtataccctccaaattttaagtgcatcgattctatgattttaatatagagggattactttttattgctatagaataatatttattaatccctagattgttggtttactgggctcttaaccttggattgcaactgatgagtagctatactgtacccaactttggttagctatcttgagaatacatgctgtatgtaaaaaagatgaatagtttaatacaggctcattgactgttttagaaggtatttagaataagcgtgctcttgatagctggccagcagccccacttaaagaagcaaattcaatactgttacaaaaatttttgggagaaggtcatagactataataaattgaaattctttttacccagatgaaattacagaagccaaatcagggactgctactccacagagatcgggatcagttagcaactatcgatcttgccaaaggagtgattcagatgctgaggctcaaggaaaatcctcagaagtttctcttacctcatctgtgacctcacttgactcttctcctgttgacctaactccaagacctggaagtcacacaatagaattttttgagatgtgtgcaaatctaattaaaattcttgcacaataaacagaaaactttgcttatttcttttgcagcaataagcatgcataataagtcacagccaaatgcttccatttgtaatcaagttatacataattataaccgagggctggcgttttggaatgcaatttgcacagggattggaacatgatttatagttaaaagcctaatatgcagaaatgaattaagatcattttgttgttcattgtgcagtatgtatatagcataatatacacagtgaattataggtctcaggcttacttgatttttggctattttatatttagtgtacacagggctttgaaatattaatttacataaaggccttcatatattattacgtgttatatattacgtgttataaatttattcaataaatatttgcctagaattcccaagacctttataggtgattttgttttctgggctccttaacttcataaatagctagtatcttccagcagtagtaacagtctggataacttcttccatatccctccctctttgtttttttgagacagtgtcactttgtcacccaggctggagtgcaatggcgtggtcttggctcactgcaacctccgcctcccgggttcaagtgattctcccgcctcagcttcctgagtagctggaactacaggcgtgtgccaccacacccggctaatttttcgtatttttagtatagatggggtttcactatgttgcccaggctggtctcgaactcctgaccgcgtgatctaccacctcagcttcccaaagtggtgggattacaggcgtgagccactgcacccggcctccatatcccccttttaacattctgtagtgtatggtaagtcatatcagatatcagacctaatttaaatttcattttagctttacaagtccaaaaacacagaatttatatattcagatactctagcactaattttagtcttaaaatattcccacgatgttctgtacaaaaaatgttctttttgttacaagagctgagttgcatatactgtagataaatcatattatttttgccaatttcacaaattcctctggcccatcatgtcagtcattattgagtatatgcacacattgctacttatttgattatgtatcttttaaattgattcagtgcatagaaaactatctcttacaaactttaagtgctctgatatgacttcccccccaaattttattatgaacatttttaaaaacagaaaaattgaaaaactgtttggtaagcacatgtatatctaccatttagattcagcagttgttaatgttttgtcatttgttttctctatacctatatatgtatagatacagctagttatgcatatatatgcatatatgtgtttgtgtgtgtatgtatatatgcttttttccccctgaaccatttggatgttacagacatacttatcaccgtgaaaatacttcaagtatctcctacagataatgacattctcctaaaaatccgtaataccattgtaaaagtaataattccccaatatcatctaatcaagccatatttaaatttctgaagttaactccaaatttctttatagctgattatttcaaactaggatccaattaaagtttacatatgacacttggttataactctttagttggatataacattattattattttgataaaatatggaacaaatcaattctattaataagtggtcacgtttgttttgggcttaaattactttttaaagatactggattttcctaagatttctgatttacattgatattttctttttgtcattcttaattgcatcacacaatagatgtaaatgaagatttagtcacctcagataaaattggtatcgtgtatgataatattgtatcatttatatttgccttatgttaactttaagaaattgatttttttgtattaatcattttcccattgcaacagagctatattttttctattttaagaatcatattttaggattatttttggcaaatacagtgagcacttatgtaaccagatgataatgaactcaaatgtcatgatagcttgcataaatggtgactctagtagatttgactcaagcacttctagaatcatgcactgaattcaaaagaaaaatcttgctgctttttgtccagggcttgttctattcaacttctaatttgaaagctgtacaaagtaatagaagttccatttaaatatgagttcaaaactatatttactttttatgtggccctctctttaggggattctaattttacttagggtctctaaatgcagcataatgttcctgatgttaacagaagactatttttaaagttacaaatttgtatatagaattaagtaatggcgctatatacgctgttgtggggaggggggaagaaaaggaggaaccaattaaataggaccttttaaaaattgttaattttgtaaactttgcttctcttataagttattgtgattcattttagttactgtgttttattttgaaaatatttaaatattgcacttctataaatagtatgataaatgcacagacaattgcagtaaattcttttttaagctaggatatttgaaatgacaacctttggttaagtgtgtcaaggttgcaacagaattttcacaatttttttgttgtttgcaaattgttactaatattgaagagataagggaggcaatgcaaatgatttttaatctttttttattatcttttcagcagtttatattttttgtgactttatgcaaccatatttttactttgtcttgacaactgaaagatgtataaggttttttgccggaaatgtactgtatacatagttttaaatataacagattttactgatatgtaaaaattttgccattaaaataaatgatttctcactgagaggaacttttctaccaggttggggcatatgggagcttaatatatcatatctaatttaaaataatttcactgaaataaactccattgcttttacctaatttttttcttgagatgcttttgtagtttttcagagttttagatgattttatacaaaatcctctgcctagcactgctctttttgatgttgtagtgacaccattcacattgaattaatgcttggtagcttggggctagatgtggaactccatgcatctgtgttctgactggcacctttggaatgaaagaaaagtgtgtgctgtccaaattttttccccttaattctttccctcattttctcacccataatagaaattttatttccattgtgagttctgacaagaatgaaattccacatacaacataactgtaaattgttggtaggtagaagttaatatttgtggttcatgtatattttgaccagagtatatttaagtatataatttcagcttccttgatttagaaatatgatataataaagaaaaactccattta

SEQ ID NO: 37 - DNA, 38039 bp, Mus musculus
  source 1..38039: mol_type = genomic DNA
gcggcgccatgcgcagactcagttcctggagaaagatggcgacggccgagaagcagaagcacgacgggcgggtgaagatcggccactacatcctgggggacacgcttggtgtcggcaccttcgggaaagtgaagggtgaggacgcccgggccagcgcggacccggcgaacggcgagcgactgcgcctttcgcactccgcatcctcccccgcgcccgccttccgggtgtctgggctccgtatccccggtccgggcggcgctgggagcggagcccgaggctgccgcgggctgcagagctgtggggtccgccgcggtggggtgggggcggtcgccatggcgacggcgcggcgccggaggggcggggatggctctgggtgcaactttcccaggcgagggagttgggcactgagcgcgcgggggcgcccggcgcggacgagggggtctcttgtggtcttctgatcccctgtgtgcccttggcgcagagccagcccatcgcgccctggcggtcctcggagttgtcgctgcctcgcttttaggaggttgtggactaaagtgcttcttcggtttcctgaatcgaaatgtgttcttccaaaagcaaggtagctgtggagatacctttcagaaatagtaatgcccttgttaggactattgatctccgtcaggacttttgatgcatatgcctgtgaactggcgcggtgtttcctatgcgtggtttacagttggatgcagatgctgcttttaagtgattccgttttcggaagttttgcggtttccgagagctatacctggtaggtagggcatatgttaactccagatggtatttattagcttataggtatagtttccgtttattctcacagtatatttatattttagtaattcagtgcacatcatttggactttttgttcgttttggtagaatcccctgttaccgccttagcaaaagcacaagcattctgtcttcaactaactactctagcccaccacctgtgacaaggaaaattctgattacaacctttgtgaggtggacttttttcccctttaaaatatttaagcctgctattaagtatttagaggaaggaagtttggagctgataagaaataattcatacattggttttggagaaataatagactatggcctgcatatatagtaagctccttagtagatatttgattgaagtgaaaaagtttgtcaaattacacagcaagctaactgagctccgttctcccaggagggcagaaagagcccttccttctcttgccctttcccagtcctaaacggaaagttgctgtgttaccctcaggggagcaaatgcctaaacctacctaggaaaatcagcaagccagacagtgtgaaggaggagtaggtgtggtctagggcctagcactgatcatggttcagccagtgttcgtgaacactctcagggttttgctttgtctctttttatgcatgcatgcatttatttatttcgagagagtgttacaatgctgtccaggctggctttgaacttgttattcttcgtgcttcagcttcctaagtagttggcattaacaggcagctagctcttccagtgttttgtttacctttagctaggcatccttgtttgccattagaggtggtaagaagtgctaattaaggctctgatggaagtgataaggcagacttgaactcagaaggctccttccgaaggccctgcttggaatgaatgtggcatccagtccgccattcctttgacacagaccagagcggatcaagcagacaagaaaggaagaagggattgttttcccggcctgggatttgacctgggaagtagcagtgcctcgaacctccctcccagtgactctgcttttccttaaccttcacttctccacccacccacacagccttctcttgaaatcctataccatcagtcataagcctcctccaatacagagggccagtgtgagtcagaggatcctaggcttctcggttataattaaacttgtccttgaacttgttagttgatgtgggtctaaatattcagccagttcattttaaaactgttaaatggttgggatgcttttttttttttgacattagtaataatgtcaaattagtaaccacaggatttgctatgatcctctccttactaaggaatggctggactgccatatcccatttggtttatgcatcagagtggggatagcatgactgtcttagttagggttttactgctgtgaacaaacaccatgaccaaggcaactcttataaggacaacatttaactgggttagcttacaggtccattgtcatcaaggtgggagcatggcagcatccagacaggcatggtgcaggaggagctgagagttcaacatcttcatctgaaggctgctaacagaaaactcacttccaggcagctaggatgaatgtctgaagcccattcccacagtgacacacctactccaacaggaccacactttctaatagtgccactccctggaccaagcatatataaaccatcataatgaccataggaggaatgtgacccaggtttggatatgtgtgggaggggggggtgtctttttttttgttttttttttaacctggctacagtgcatatttatgtgtgtgcttgcctttgctgcagggatactataaagaatgagtattgttaggtaggtgagaaagtgggaggcaggaatgcacagagagtgggccaaaataaccactgtgtctggtcatattggaaattaaccccaggcttagtttgacaagaactcttttttttttttttaattactttatttttatgtgcattggtatttgcctgcgtgtgtgcctgtgtaaagatgttggattcccctgggaccagagtcacagacaggtgtgagctgccatttgggtgctgggaattgtacctgggtcctctggaaaaacagccagtgctcttaacctctgagccacctctccagcctccatctctaagaattcttagagataatagcatcatccataaattctttgtttctatatatctgtgtatgtatgtacataccgatctatatttctatgtatgtgtctatctatatctatctatctatctatctatctatctatctatctatccgtcggtttttgagagagatttctctggggagcccttctatcctggaactcactctgtagatcagactggacttgtactcaaagatccaccttcctctgtctgggtctaaaggggtacgccaccaccaccctagccttaaattctaattcaaaaaatgtagagtacatttttcaagtattatgcgtgttggaaaatttaacataagagattctaacagaaactgtgatggtgatagatggataaatcatccgtgtgctatttagtcctttcagggaatttaagtgtgttttggttttcttttttctattttttttttttttttttgttgttgttggcttgtgttgttgtttgccccccccccccttttttttttttttttttgagatagggtctcagttagacaggctggctgttctcaaactcactctgtgaatgaggacagctttggactttgatccttgggtttctgcctccctagtgctgggattagaggcctgtgcaccaccatgcctggttatatcgagtgttgaggactgaacccagggcttcatgctaaatgctctaccaagtgagccacttccctagtcctagaaattgaattttggggctaaattggtagtggctgtcatgttatgaagttaatagtaatgaaaataattgggttacttaatgatagcatttggagggaaagtttgggcagaaaacaagggtttggggttgtgcttgaattattattttcaaggtattctttttttccgtcctgtctttttttttttttgaggcagggagtttgagacaggtttctctgtgtagccctggctgtcctggcactcactgtagactctggcctcaaactcagaaatccgcctgcctcagcctcccaagtgctgggactaaaggtgtgtgccaccactgcctggcctctctcctgtttgttaaggtgtcagtctctactcctttgcttgctgtcttctacctcccataaaacagttatacacgcacagacgaatagtcatgcacagtcaaatggctgttcttgacagtttttatgggttgtgtcttcacgaagcaagtaagtcgcttctacatataacctgttaagttggtgagtatttccacattaagccattacttcaggtaaatagatacccttctctttgaatgaataaggaaaatttccttaaggaaaaaaagaaaagatgtacatatgggctggagagatggcttaacagttaagataaccgactgcttttccagaggtcctgagttcaattcctacaaaccacatggtggctcacaagtgtctataatgggatattatccccctttctgctgtttgtgaagatagagcatgcacacacacacataataaacaaatatcaaaaaccctacatgtaatatgtacatatacatatgtcatatatgtggcatgagtgactctttagaaaataaagttaggcatctagtgctcctaaccactgagcatctctccagcctgccacagtcatttttaagtaccgacattttatgaaaaggacgaggtgttgctatgatttaatggatttatatgtaataaaataggttagtgtgtgggagagggacactgaattcagagttactggtcacctctggggagagatgaggagaggcgctgggacttcacatgtgtctgtaatgtgttgcttaagctgctggtatttgaaattttgtatgatttaaaaataaaaacgttctctttttatttagtgtgcgtgtggtgggggaggggtggtgttggaggtggttctttcattgcgttcaccatgtgggtcctggggtgtgacttagagtctgctgcctaacagagcagtcccgtgttctctcactggcccttgtatgttcccatgttcctaaaagaaatcctttaagctcccctctcaataggattaaactatttccttacagttttattagtggaattttcttctaattttagaaaggaaacggaaatggttaggtggctagaatgctttcaggggatctttctatctccgtggcatctctagcctgttaaaatcctttcttttaaaaataggatcttgttacacctcagcattttgtatatgactatgaaacatcgtcatttgttgacgatgttttgtagttaacagactccaaggttgagagaacaatgagtttgtggttagctcatcattagttgattaagctgttgctcttgggaggtgaaccttgtagatggctaatgccggtgttgcagtttgcttaaaagcaacagttttagcactgttgaaaacaaagtaacagtctgaaatataccacttaagcttcaataaagggcaggcagggccggcccctcagggaatatatactcttggcaaagtccttttattacattcactgattgatgggagcagcaattctggggagcagcaattactttgactccgccttagtttactcaatagagactctttagcccagttttgagaaaaacagttctgattctcacatgatgccattccctccccgcttctcactgcatgtggttggtaggacagagtggatgggttgaaagactaaagagtcagaagaactgtagaacttgatcagaatagctgtctttaccctggcaaactatggaccctgagcgtcctcagtttcttcatccttaaaataacaggctttgaagacatatcattaggcctgagatactatgtttaaaagtgttacactgccgaaatgttaatgttgccaatcatttgttcaaagcaaaggtttctgtgtccctataggtcaacattggcaacattgtaacaccatagctttaaatgacggacttaactgggaagaaggaaggtgggaaggacggataaaaggaaggagaaaatacctagatgtgtttgtttgtttgtttgtttgtttagacaggatttctttgtggtgtagggctggctgtccaggaattctctgcagacaatgctagccttgaactctgcagtatatacatctgcctctgagtgctgtgattaaaggcatgcatcaccatgcccagctgagataaggcctatggtgacagagaaaatattttatgatcatcagggtctagacattgtttgaaaactttggaaagcgaagtttgtattactttgatttatttatttatttatttatttatttatttatttatgaatctgtgtgttagtgccccttttctccccagggtctgtcaccttaagtcagagctcacacctttggctagtgtagctaaccagcctgctctaggggatcaaagccagttgaaacaagtgtagcaggacctactccacacttagctaaccaatgtgcgagttgagctctagcatatggcagaataatctgcagcggtcccgttagtctcctttagttctcacggatgaaccatgaaggtttaaaatgaaaacaaattggagggaaaatgttgccattctcctttccagggccacgatgctcccagatcaagtgccttagtggcagggatggggaagtaggagcggcttagttactgtccagtcgctctgcagagacaccaagaccaaggcagctaataaaagaaagaattttgccaggcagtggtggcacatgcctttaagcccagcacttgggaggcagaagcaggtggatctctgagtttgaggccagcctggtctacagagtgagttccaggacagccagggctacacagagaaaccctgtctcgagtccccccccccccccaatttttttaaattgagttttagaggatgagtccacgtcccctccttatggtggggagcatggcagcagacaggcaggcatggcactggagcaataataactgagagcttacagctgattcagaagcaggaggtgaggaacggggccagagacacagacagacagacagacagacaaacacacagtgaacctggtatgggcttttgaaaccttaaagtccaccccagtgactcaccttcactaacaaagccatatctactaatccttcccacatcgtccaccaagaaccaaacattcaagccatcaccaagaaataccatatttaagtacagtatactttatgtttgaacaatgtaccttaagaaactcagttccagtacttttagctgtgtgacttttccagctaataagaagtacttagagcatggagaaggggccgtgaaagctgactcgtgataggctgcgcaggatgcaacttaacttcgatagcaaaatcccataggagcatccgctagtcatgggaagtcctctgagctgaacaactcccagggaagaatcatacaaaggcatgttgtgtgtgtttacttaagatgaacatttgtgtccctgtcctcgtgaatactgtattttttttttttttgcattttttaaaaaatttttattaggtatttagctcatttacatttccaatgctataccaaaagtcccccatacccacccacacccactcccaaaattcctaactccatcagaataaatgttatttgttttttaatttatttttatttttattatatgtaagtacactgtagctgtcttcaaacactccagaagagggagtcagatctcattacagatggttgtgagccaccatgtggttgctgggatttgaacttcggacctttggaagagcagtcggatgctcttacctactgagccatctcaccaggccccgaatactgtatttttgaaaccttggaagtatataatccagtatagaaagccttttttattcaactcctgtttttaaagcttatttttaaaattatgtttgtgtgtgtttatatatatgcttttgattgaaggcgggtgtggaggtcaaaggtgttggagccagctgaagctggggtaacagagggttgtatgcctcctgttggtggtggtcctgtggaggagaagtttgtgttctgaactgctgagccatctatctatcacccttgagtcctatagcttggtctggcctgatctcccaattctcctgcctactcctccagagtgctggccagtgtttattttttatttatttctattttcttaaagatttatttatttattatatgtgagtacactgttgctgtcttcagacacactagaagagggcgccagatctcattgcagatggctgtgagccaccatgtggttgctgggaattgaactcagtcagtgctcttaactgctgagctgtctctccagcccactgggcacttcttacatcaataagcatatcaccttgctagggctgcaatagcagtactaaaggttgggggcttaaaactagagaaaattattctcggacagtcgaaggtcagaggagggaaaatgggagtctcaagggctgtgctccttctgaaggtcagtggcgaatgtgtgccttacctcttagcctctgttattcctggtttctccgggcctagcataactccaccctctgctgctgcccccaccgtatggctactctcctgtttctgcgctcctcataagagagcaagtccttagataactgtgctcattctagcatcataccattttgagagccttttctaaattctatttttaaaattatttatttaatgtatatgagtacactgtagctgtcttcagacacaccagaagagggcattggattccattacagatggttgtgagccaccatgtggttgccgggaattgaaactcaggacctctggaagagcagtcagtgttcttaaccacagaaccatcttttcagcccctactaattttaaagattttaaagaactgcttgtaagtaagacaacattctgaggttccaggttgacgtggttttcagctcgccagactccctctactctttcatgttttgttatttatttgtggacacagatcctggtgtcaggtgtttacctgtgttgctctctgtttttcaaggtcccccactgaacctgaagcttactcaccttttcagctaggctgcttggcattctgggatctgcctgcctctgccctctagatgctgaggttacaggcatgggaactgaaacgttgaactcagggtctctcactttctttttaggaaggtctctcaaggttaaagttgtatgccttttcaaaagattctttaaaggacttagtaaattgattgtgttgacttttttttttttttttttttttttgagcaaggtttttctacgcagatctggatgtcctggaacttattctattgagatcagattgaccttaaactcagagatcggttacctttaatcctgaattctgaaattaaaattgtgtgacatcatgccccttttcttgattttagggtaacttttttttttaacatttattatcattatcattatttaatgataattttaaatatttattcttctctcatatacccttccctcttcccagcctgcccctctcctccttagcactcctctccccagatgttctcttcccccaggggttaacttgtaacttgatttgagagaatgctttaatcaaatgccaatgtctctataatatctcttgagatttttaaatttcaaaaactagaataaaaagattttgaaattgataggtaggttttcagcaggcaaggcttatggtctaatacaggaaaaagatcaaatgaaagagtgaaattttagagtgattttttttttttaagtatggaaaattcaatctattttcaaattttcattataaggtatcagaagatgtttctgatatgtgcaacttttatatgttttattagaaggatgcatatatatgcattatatatactgtgcaacttctgttttgatttatcttttcctgttttttttttttttttttttttttttttttttttggtttttcgagacagggtttctctgtgtagctctggctgtcctggaactcactttgtagaccaggctggccttgaactcagaaatctgcctgcctctgcctcccgagtactgggattaaaggcgtgcaccaccacgcccggcgatttatcttttcttaaaggctaattttattatcattggcataattttaggtagggtttcattctttagaccgtgaggccttgaactcggagattcacttgcccctgctttcttcgtggtagatattacatgtctggctatttcattattttaaatcacgtacatgtctgtgggtttgtacttgtgagtgctggtgcctacagaggccagaagtcttgggtctctctggactggggttactggtagtgacgcagcccagtgtaggtgttgggaaccgagcagatccgttgcagaatcattacgagctcctaactcctgagttaccgctccagctcctagagttcttctaaaactatattattatggtctggccttgactctgtgggtaccaacccgcctggaaggacggtactgtctcctgaagcttagcctctgccctctctgcaagtgcactgtggcacgaggcttcgccacactcatacgtggataccatgcattcagtaataatacttaaaataaagaatttaaaaatgtctaaagagtgctgtcatgtttcctctcctggagggagcttccagtgttgaacccaatctgagttagagctttgggctgtgccacgcaccagccgtgtacttaggacacattgtgtctgtgggtgcctcagtgccccgtagaatggtattcataatgccagccttccaaagttgatgactgttcccgtctgtggccatagaaatgttcttgaaaaattttagatagacagcgacctcgttgtagaggactggtgctgtgtgtatgagcgacctgttgaatattaactgttgaggaaatgggctgaactttggaatccaaaaatctcggctcggtgcttggagtggtgggatttaagctgccgagagagggtggcccctgaggctcttgataagggcaggctgttgaatacaactgaacagaaggcactattggaagagctgagatccaaagcacctattcccacatccaaatggatagttcagggatgattaaataggaacgggggactggtttgggaatggtggaaacttatccctcagtactaatagctacagttgtctgttcacttaggatgtgctggtaggggggaaggtcctttacaaacacggtttcatgtgtcatgtggccacccttgtagagcaggagatcacatttaccaagggttttatatgtgtaagtcagaagtctgttaagtaccttcaaagaggaacagacctgaggctacagagtgcacgcacactgccttctgggttggaaggacacctgggtattcagtctgttcctgtaaagggctggatctgccaatgcctagcgttgatgccctccccttgggtgggcgagctttctttctttccttttctttttctttttaactgaaaaaaataaaaataaaacaatacaatttgaaagacggtggctacagcatacctttcttcttatttcttctgtagctggcaactgtggcagcctgtgtaactttattcaccatggtgattagaaggaacatttctcatagtctcctacaagagtctgctgtattgaaacaatacagtggattagctgttttctgaaattagtcattaggagatctgcaggcttttgttcttacacaataagctgtaataaaccgagacatatttatgcatgttttcagcttcgtagttcaatttggagacgtatgttttttctttttaaatacagtgccacctttaattctcaagaatttttttttttttttaaatttggttccctaaagtgttcccttggttcctgcagccatccccgtcaaaaacaacagcaaaaggaatcactatggtaactttctgttaagcagacggaaagccagtgctctcactttctctgttccgtccattctggtcccttctgtgtaccaggaggtcggctgaccacttgctttatgatggctgacgtggctccttcgcctcccagttaactttctcagtttttgtttgaacacagttttacttaatgtgattttttatttttttgcacttcagtcagtagacccatccccgttttcatttatatgtgtgtgtgtgtgtgtgtatgtgtgtgtgtgtgtatgtgtatgtgtgtgtgtgtgtgtgtgtgtgtgtgtgtgtgtgtgtgcatactgcagaagtctttcctccccgtcagcgagtgagagaataggggttgaacgaaggtccccgtgcttggaggccagcagtttacccactgaaggctctctggagttgttttgaaagtgaggacttatatctaagtgctcctaattacttttgtagtttggtgaaacactcaagtatgagaacaagatgcagtatgcttggatggatattggcatccttccttcattttgctttttaaacagggggacgtcgtgtttgcaggtgaaatactgagataccccttgctgaaactatatacttgattatatacttgaaatgatatacttgattcctatcccttggagacctttatccttgttaaattctctcagttcttagtatccgaccatagaatgtgccacattattgctgagtcatactaactactaagtggcacgaactgttctattgtagaattttcattgtgccctttgtatctctgtactcttaaaaaaatagtgtatgtttgtgtatatgtgtgtatatgtgtgtgcatgtgtgtgtgtatatgtatggatgtgtgcatgtgtatgtgtgtatatgtgtgtgcaagtgtgtgtgtatgtatggatttgtgcatgtgtatgtgtgtatatgggtgtgcacatgtgtgtgtatgtatggatgtgttatgtatatatgtgtgtatatgggggtgcacattgtatgtgtatggacatgtgtatgtgtctatatgggtgtgcacatgtgtgtgaatgtatggatgtgtgcatgtgtgtgtgtgtgtgtgtgtgtgtgtgtatgagtgtgtgtaggctttatatccatgtcaattaaatgggatcagggatcacttttgaggtcctttccctctcattagcctatgatgctacacaaattcatgctaaggggacatattactaaacagacctctgaaaattgcttgctgacactgtaatgcaataagggggacagagagttaccaaactgtgtacaggatgaaatgagaactgcttacccttccatgttgtgttagtggaggtcagaggagaactctgaggagttgctttttccttccactttgttggtcccaggaactgaacttatgtcatcaggctgagtcaagctaaaatctctctctctctctctctctctctctctctgagaaagggtcttacatgctaacttctattggccttaaactcatggcaatcctcctgtctcagacttctaagtgttgaaatcataggcatgagccaccatacccagcttttctttaaaatgtcagtcttatgtgtcccaggctgaccttgaactggctgtatattggaggatgacccagaacttgtgatcctcctgcctccctcctgtgggctggcaccatcacacccagttcaaacccagtgcctgttgtctgtgctgtgcaagtactttaccaactgagctacatctgcaaccctgctttgttattttgagacgggcttgctctgtagccagagtagtctcacattcttggcagtctttttgcctcagcttcctctgctaggaggacaggtgtctgccaacactcagattgcttttttcttctccccactaaataatttatttatccactttacatctctatcacagcatcctctcttctcgcagcccctcctcacactgcctttcctctcagctccccgacccttcatctctgagaaggcggaagtccttcctggggaaccaacccaccttggcacctcaagtttatgcaaaactagttacattttcgcccactgaggccagacaaggcagcctagttaggggaaccagatccactggttaagcccctcccccagttttgggggggacctgcttgaagaccaagctgcacatctgctacacagtccagggtctctaggtccagcccttgcttgctccttggttggtggttgattctctggaagcccctgtgagtccaggttagttgactctgttggtcttcttgtggagtctgtttgtcctccgagtacctcagtccttcccctaactcttccaccagacttcccaaacttggtgtaatgcttgggtgtgggtctttgtgagcctctcggaggacagttatgccaggctccttcctgtctgtgaatccaggctgacagatacaaacagcctgggactccaaagaggtagaagggaggacagtagtccagaaatgtgtctgtagcctgggctagcctagaactcactatgtagaccaggctggcccgcctctctctctaagttgctgggattaaagatgtccacttaggtttttgagacagggtttctcactggcctggaactcatggactaggctagattggatggtttacaataaatgctaagtatataatcccaaatgagtcaaagagaatgttcagagcttcctaccctagtttcttacttgatgaaagaaattatatctacagttttggataaacctcaagtgtttttgagaaacacttattaatgtgtgtgtgtgtatgtgtgtatgtacatggtaggggcgtgtgtgccacagtgtgcttgtgagaggatggccttaggaagttatttctctccttctattatgtggaccccatactttcaaaggcataggattatctctgttgcctcaaaataaggacgctggctcctctgcgggttgccttgcctgggtttgctgctgtgcagaccagcacagctgtcgccgtttggaggtttctcaatttgcctcctgcattggattcctgctcttttggggacagagtctaagtcaccaaggctggtcttcagctatctttggagccaaagtgaccttaaactccctgtctcttctcacatgctggcaattcaagcatgtactaccacagctggctttgtttgcttttccaggcagcggccctaccccgtgctgcagccaacccttgctggcctgaagctaccatcgctagcagcaatgctcccatgaccaggacatcaagcctgagctggcactctcttcactagatgtgctgacttcttgctgacgtttttgtttctcttctgattttgatagtatctatgtttttccataagttcctgagaaagggtacacagacgccagacttttggggactttgcctcagcagcagtatctgaattcttatgtgcacatagactgtctgggtgagtctgggcaagatggaatctctttaaacatgatttatctacttttatttgcatagatgttttgtctacatatatacccttgcaccatgtctgtacttagtgcccaagaaggctagaagaggttctcgtatcccctggaactggagttatagatggttgcaggtcgcacgtgagtgccgagagtctgacctggactctcgagaagcgcagctcgtgccactgagccatctctttagcctaaaatccatgtatttttaaattttctatttgaaaatggaaactacatgccattgagccaaaactgaaaacagaacaaaaacaacagcagcagcagtagccaatcacgggggctgttaatgataggggatcatgtgcagtagccaatcaccagggctgttaacgataggggatcatgtcagtgtcccaggggagttcgtgtatgtagttttgggcatatgtgtgctgtatgtgtatgtcaggccagaggacatggcttgctttatcattttctgcttttgtttccttgagacaagatctcttattgaaactagagctaggtagttagccagtatcaccaggaatccccctgtctctgccaacctgtgctctttctcccagtgttgggctgataggcagggatcatgctaggttcttctctttttctttttaaaagtgtgttgtgggaatttgaatttagagcctcctgcgtatacagctctttgttggtgagccatcatctctccggccctgcagggcagttttctgaggggaagatacacctattctatgttatggcttttgtttgattttcttgttttgagatccagtgttaccacatagcctgggccttcccttagttctcagtcccccgactgtgcatctgacgattgcaggcataggctaccatgtctggatccttgccacatgattattttaatggtggtagaccagttcctctgttcttcagttctacagaaggttttccaataaaagatagtttcattttctatgtacagtagttgagaaatgaatagtgagctaaagggatttgagtacctgaaggcatacaggaagaatttttcctctttctctcttatgactggtccaaattcccttttcctaaaatccgctcttggtgagcagttccttgtgtgtgtcaaactaaggaggagggcggcaaagatgctccagtatcttctgagtgtttagctttctagtataatacaccaaagtatattatccatcagaaccggtgcgaacacactaaaaatgattccttctgcagtgggcaagcacgagttgaccggacataaagtggctgtgaagatactcaaccggcagaagattcggagccttgacgtggtgggaaaaatccgccgggagattcagaacctgaagctgttcaggcaccctcacatcatcaaactgtaagtccacctcttatccctctgctctccctcacatcatcaaactgtaagtccagctcttatcccgctgctctccctcaaatcatcaaactgtaagtccacctcttatcccgctgctctccctcacatcatcaaactgtaagcccagctcttatcccgctgctctccctcacatcatcaaactgtaagtccagctcttatcccgctgctcaccctcacatgatcaaactgtaagcccagctcttagcctggtcctcaccctcacatcatcaaactgtaagcccagctcttagcctgtcctctccctcacatcatcaaactgtaagtccacctctcatcccgctgctctccctcacatcatcaaactgtaagtccacctctcatcccgctgctctccctcacatcatcaaactgtaagtccacctctcatcccgctgctctccctcacatcatcaaactgtaagtccacctctcatcccgctgctctccctcacatcatcaaactgcaagtccagctcttagcctggtcctctccctcacatcatcaaactgtaagtccacctctcatcccgctgctctccctcacatcatcaaactgtaagtccacctctcatcccgctgctctccctcacatcatcaaactgtaagtccacctctcatcccgctgctctccctcacatcatcaaactgtaagcccagctcttagcctggtcctcaccctcacatcatcaaactgtaagtccagctcttatcccactgctctccctcacatcatcaaactgtaagcccaactcttagcctgtcctctccctcacatcatcaaactgtaagcccagctcttagcctgtcctctcatcccgctgctcaccctcacatcatcaaactgtaagtccacctcttatccccctgcttcccctcacatcatcaaactgtaagtccagctcttatcctgctgctctccctcacatcataaaactgtaagcccagctcttatcctgctgctctccctcacatcatcaaactgtaagcccagctcttagcctggtcctcaccctcacatcatcaaactgtaagcccagctcttatcccgctgctcaccctcacatcatcaaactgtaagtccacctcttatcccgctgctctccctcacatcatcaaactgtaagtccagctcttagcctgtcctcaccctcacatcatcaaactgtaagcccagctcttagcctgtcctctcatcccgctgctcaccctcacatcatcaaactaagtccagctcttatcccactgctctccctcacatcatcaaactgtaagcccagctcttagcctgtcctctcatcccgctgctcaccctcacatcatcaaactgtaagtccagctcttatcccgctgctctccctcacatcatcaaactgtaagcccagctcttagcctgtcctctcatcccgctgctcaccctcacatcatcaaactgtaagcccagctcttatcctgtcctcaccctcacatcatcaaactgtaagcccagctcttagcctgtcctctccctcacatcatcaaactgtaagcccagctcttagcctgtcctctccctcacatcatcaaactgtaagcccagctcttagcctgtcctctacctcacatcatcaaactgtaagcccagctcttagcctgtcctcaccctcacatcatcaaactgtaagcccagctcttagcctgtcctctccctcacatcatcaaactgtaagcccagctcttagcctgtcctctccctcacatcatcaaactgtaagcccagctcttagcctggtcctcaccctcacatcatcaaactgtaagcccagctcttagcctgtcctctcatcccgctgctcaccctcacatcatcaaactgtaagcccagctcttagcctgtcctctccctcacatcatcaaactgtaagcccagctcttagcctgtcctctcatcccgctgctcaccctcacatcatcaaactgtaagcccagctcttagcctgtcctctcatcccgctgctcaccctcacatcatcaaactgtaagtccagctcgttagcctggtcctcattctcacatcatcaaactgtaagcccagctcttagcctgtcctcaccctcacatcatcaaactgtaagcccagctcttagcctgtcctctcatcccgctgctctccctcacatcatcaaactgtaagcccagctcgttagcctggtcctcaccctcacatcatcaaactgtaagcccagctcttagcctggtcctcaccctcacatcatcaaactgtaagcccagctcattagcctcgtcctctcatcccgctgctcacccctgtacttaacccacctgacctggcaaaccagagcgaggctggaggtgtcttcctgctcttgtctctgaccccggttcactgccagtcacagggcccgccctcgggttttagcatggctcacatccactgtattcctgttcttcctgttgtctggaaagaggcccctttgacagtactctgggctactgtttttacaggttgggttgctactagaagtttctgtagcaggtgccaggccctgtttggtctcctgtaccacctgaaaggaaaaaaaaaaaaaaaaaaaaaaaagaggcgagaagttcttgagtttaaatttcaagttttttgcatgctgggaatcaggctcaggagagactgtgtactagaaatcttttttctgtaccctgcttgtacttgaccatacagaccgggctttgaggaatccagaatttcagaaggacagtaatcctaatggtagttttgagaaagcctcactaaggcttacaggtaacgtacttcttaccttcggtgttaccttgtaggctatactttaacgctgccaggacttctccgttaaactggaatcgtggagctggctccacagttgttttgcttttagctctcattcattaaagtgtttggctctatcatgtgtcctgatggcccccaactgtacagtccttgctttgagactcattctctgaactccagaccctgtgcctgctcctcactcattggggtgtccgagaggtctttcaaagaacctgttccaggtctcatctccccatcatctcctcagctcttcttcctacactgttctcaccatcatcgcagttaattgtcacttaaccccgggggtggggtggggggtggggaggacaatgacgaagacggatgtaggagcatctttaacaatcctgtttatccctcttcccaccatcactccatctcttcctccagaatgtatctctgaccttttcctccgtcctttaacgccatcacactggcctgtgctacctcaccgctcaagggcatcttctgagcgttctctccggtcttcataccgccactgcttactcttttgacgtgactgccagcataaaaacatcccatagctttccacattcctttaaataaaggccgaagatttcttccctcccggcttgtggagctctgcatctttggtctccaacgactagcttcatgtcctgttttctctcctggcttgttttgctcttaccttaccataagtgtgccaagcaggctcccaactgggccctggccctggctgttccttccccctgcccacttcaccttcctcctggccaaggtagtctgctcctcccttccttggggctctgctctggtgtactctgtgaccttcctggcatgctctgcctcttacttaattactgtctgtgtcctggcccctgcatcaagaacataacaaacttgcttactgtctgtctcctggcacctgcatcaggaccataacaaaaacaggagattggctttgctcccccacagacttctagcagctagcacagtacctggtatcttataggtgcttagtaaatctttactgaatggatgaatacacgtgttttaatattagtagataatgttttctctcaccaggtaccaggtcatcagtacaccatctgatattttcatggtgatggaatatgtctctggaggagagctatttgattatatctgtaaaaatggaagggtaagcagttctcatttaattctgtacacagtttggtaactctctgtcccccttattgcattatagtgtcagcaagcaattttcagaggtctgtttagtaataagtccccttagcatgaatttgtgtagcatcataggctaatgagaaggaaaggacctcaaaagtgatccctgatcccatttaattgacatggatataaagactacttgttgagtatttgttcaaggtcacgtgatttactagtgatttacagagttcacgtaagtccctaaaatttattatcctcagatttaaggtttttagcaaaacaaacttttatttatttttttggagacagggtcacactatgccactgtgactgccatgtagatcaggctggcctccagtgcatagccatgcccctgtctctgtctcccaagtgctgggattgaaggtgtgcctggtctgtgctcacccttaatgtgcttcctaaactttcctaacacgctttcctatgtgggcctcccaaaatacgtcagtaagtacttaaacgatgtaggccttgttcttcaaccctggccacatttcagttgtgctcgtgtgttggtttctgatgtgcctgcagtagaaaggaatagggattttgaaggagctaggaagtagacttacagggcttagtgtttgaaggaaccttgaagacgtttagttctaagcacaaattctgagcaccgtcccctgcccatacgcactctcacgttatctgactggcacagcgccctgctgaaaggccccacacctaggagagaagagagcctggctccccttcagtcggaagctatttgcattcttcattctttcatgttacgcactgtctctctttaatcaggatcagactcattaagcacgctagtctgttttttctcaatgtggttaatttctacctaaagttttccctttctcatccttcaaggccctattcctgtccactggaggaattcttccaaattgatcaatgcctgcatttctcatctctctctttttttcctcccatttgtcatttctagtcattttgctatacattgtggggacgtctttagtgttaccttttgaatgccaaccttccagctgtcacatgtttgtatttcagatttctgccttattttctgaaattccctttggatagctgcctgtttggccttacctgtttgagaatgacattttggttttaaatgtcttttggccactgcaccgctccgttttccgtgctttccgctcgcctcctcttttttttccccccttctgttcattttgtctcccccccccccaaccctcccatactcttagtcagatatctggccattcttagctgtccacttaaatttcagaacaaagtcacaccacatgccaagccagtggatgtgtgctgtttatggttttccctcaggttgcattgttggagacattaattttggtagggtaaattctttgctcacaagcacaagtgtttttcttcgtttgatttggtatctgctttttcctattttcttgaaggtattggtttagctgttggaactgagtcgggagatggggtcaggtctttcctgttagtatgcacataatctacatcttccttaacggcctggccaacccgaggagctacaggtcttactcccccttggtggtacctacagctttctgcacaggcctgctgtcttgtttccgtccgcccctcattgcttcagaaagtcatggtgcacccactgctcagcgttcccagggttccgctgtgcacttgcgttcattttctcctctaggatttggttttgcttttctctcttttgctgagttttcatctgctgtccatacattcctcttgatggccgctgtctctccatctttttgttttatgggccttgtgtgttgctgacagcaccctggggcgacacaacagggagtgacacaaaagactcagtgtgggatgtttatcagcttggagtgttcttttacatggctcatcttcctttagtcgctgccattctttgtactgtatttttataaataaaattcttttcacctttgcagcctttctgttacttatcatttgttaagttttctcttcctcttgcataatttttttttaaataaacatctacttgaacaaaggtgtgagattgcaaaagtattaatgtctttttcttaagggagaggaccttacatttcagggtaagggtatgctacacttcagtagcatttttaattttgtattcaaagcaatggctggtttctctttgtcccacgttatccatgcggtgaaggtgtggggttctggatttagaatgctcactcctgacctgccaaggacctcatgtgagcatccttgcctgggccagtagctcacttatcgaatcccctgtcctggaacccgggcaaagcagtgctgcttcccctgctgagcaaacgccagaaaatgcagagactggaagatgatttttaaaagattgtacttaaaaattgtaattgtagtgtaagtgttttccttcaggaaagatgcaaagggtaaatgtgctaaggattttcttttggtgaagtgaaaacatcttagacctgaagagatggcacccatgtcaggtggctctcgattgtaactccgggtccagaggacccaacattcttagcattcttgtctctgtaggcacctgcaggcagatgcacacacacacacacacacacacacacacacacacacacacacacatatacacacacacacacatatacacacacacacacacacacacatacacacacacacatacacacacatacacacacatacacacacacacacacatacacacacacacacacacacacacacacacacacacacacacttaaaaatagcttaaatttcagagtacaggctatctttgcgttgtggctcaattccaatacttacctgtcacttctttgtggtctgtaatcgtcccccatgcaagcatcacttggtatattctctttttctttcccttttctccgattagatttgctctttgacagttgcgtccatgtgttctgcgccctctgtgtacgctcccaccctgacccccttctcttccttcccctcctccctgcaggtccctggtttacactcatgactttgttctgttctgggaaccactgagtttgactagaagcatctgtttccccctgggtttggatctgctcattggaacgctttctgtatcactctgtgacccttttttcccactgttacgctcatgtttggtttggttttggccttattttgtctactagagtagggccttcctctcactcatctctgtgctatggatatctaaccagtacagcatattgaatatctaatactatggatatctaaccagtacagcatattgaatgtgctcagtaaatatttgttgaaggagggaaggattaaacaccactaattggaaaacattcccagtttcaggtagaagttgaaagtactagaaatagcccatgagctccagaagaagatgtgtttttaagtgtagtttatatatgtgatagggtcaaagagttgagttgctgatttggtccccgtaagcccttgcttggcatttcagtgtagggctgcaggccttacttgcccatttcaaagtacctcatgggtgaagttcgcctggaagctttcaggcgttgacagtccacaggctggagaattataagaatgttttcattgagagacacagcttaaaatgcctttcttcttttcctagttggacgaaaaggaaagccgccgtctgttccagcagatcctttccggtgtggattattgtcacaggcatatggtggtccacagagatttgaaacctgagaacgtcctgcttgatgcacacatgaatgcaaagatagccgactttggtaaggatggttgtgatgtttaatgagcataagtatcatcttctggtagtgtttatggggtgcactagaaccccactctgcaagtgaacattcagaagggaaaacagtaaggtacgcgcgcgcgcgcgcgcgcacacacacacacacacacacacacacacacacacacacacacacacgccacaggatagctttgggggatgtttctattcttccagcacgtgggtcttagagggtggatttaggttgtcaggcatggtggtaagcacttttacctgctgagcctacctgccagccctgaaattcagttttgtgatcttaaatatttcaacttcttaacattagagagatcatttgaaaagaaaagactattatttgtcaagaaggtagcaacttgatttctaatatttctttttggtggagtatggagaaaatggaaagtgggatggaattattgacataacattggaatctagaaagatgaattatatgaggaaactttttttataaaattaatatttaaatgctgtaaagttggttttcagatgtagtggtaggtgccttcagtctaagaattccagagatggaggccggtagagatctttctgttcagctgggtctattttgcctagcagtatccatattaaaaggtagacatttcaaggatcttctagtattcaaaaccaccactagcttagcacatacacattaaactctagatgttgaaattcattgtacattttgtgtataaggtcagaatatttaagaaataaagactataatcaagttaaaagtttttgtttttttgttttttttttctgtttttattttattttattttattacatattttcctcaattacatttccaatgctatcctaaaagtcccccataccctccccccccacttccctacccactcattcccattttttttggccctggcgttcccctgtactggggcatataaagtttgtgtgtccaatgggcctctctttccagtgatggccgactagaccatcgtttgatacatatgcagctagagtcaagagctccaggatactggttagttcataatgttgttccacctatagggttgcagacccctttagctccttgggtactttctctagctcctccattgggagtttttttttctgttttacttgctttttgtccttaagaactcttgactggtcactttttgtcatttcaggtctttcaaacatgatgtcagatggtgaatttttaagaacaagctgtggctcacccaattatgccgcaccagaagtcatttcaggaaggtattgctgccattaggctacttttgatgtgcctgttgttgcttatttctcttaagtttgttagtctgtactgtcgccttgaggatgtgatgtcactaacgaggacataaaagtaacacattggcctgtggtaactgtcatctccgaggctcgctgcctcagtctgctaacgtaggtctaggcctggaagcttctagcttgtgtacaatctaatctaggcctagaaagacttcagctgctgaggcttgctgctgggtaagcgcgccccttccttgttctttctgatctatggctgattcaactcagatgttttggctctcaaactcctctccacgataactgattcaatctggcttctctgggcttctcctgaatttgccctgcttgacctccaactctgtcatcgttctaatctggctccttctcagtctctgcttgttctgtcttcacctgtgtctggcttgtccttcctctgcaagctgtctctgtacatctgtcctggtacagtggcctcctctccctgcactgaccctcaagtacttcctctctcttcccgtgagaggttgggcatatcctattctgtcaggtctttttctgatttgtcatttgtctgccactcaattagaagttactttcaaacatgggtgctttcttctatgaactaactttgccacagggattaaaagtgtgtgctgaggccgaggcacatcacaactagaagcagctttttcagtaaataacacaatcttgaggttttacaatatgataagatatcctgcaacagaaagaagggaatatatttctgtacttgcagattttctattttatgaataatcacaaggagctggagagatggcttattggttaagaggacttgctgctcttctagaggactggaatttgggacctggcaaccacaatctgggtggctcacagttgtctataactttgcctccaggagacccaacacactcttggtttttgcaagcagttacatacatggatgcacctcaacacacacacacacacacacacacacacacacacactaataataataataataataataataataataataatagaaataaataaaaaaaacaagtggaaaaacaagtccatctttggaggagagtgttggtttgcaagtcacagtaaagtagttagaatgaagtgctttcatttttgtctctggtgggcgaattgaaagccaaccagctgtaaaggtggataagccgctgagaacctgcctactgcagtactcactcccgaggaatgctttacttaggcgaacattaaaaaatgtaacatgatgggcaatccttgctggtaattctacaccttctcatgacaccatctcaagaaaaccaaaccaaactagaccgcacagagagcagaacagagttacaagtgtaacgtcacgtgtagttgtataagtattcaaatagctggcattcatgtagtagcttcatgttttatgaggaaggaaactaaagaagtggtcctttaaaaaaacagaccagctgaatgtattgcatgcctatagcctgagtatcgcacatggatgccaagacagggctatataggcctggtatcaaggaaaatcgaggtgaggtgaggggcaagagggttataaaaagggagaaggaaggagagagactcatttatgttcagtcttgatctagatctgctagagattgaagtgtaagactgctgaactctgaactactatctagcactaaaggacggatgtattttcattagttactttttaaatagcgtgaaaacaaaatttaatttgtgttttatttccttgttttgttcaaggttcaagttcctcctcctcctcctctccttcctctccctcctcctctccttcctctccctcctcctctccttcctctccctcctcctcctcttcctcctctgtgatagagacagttcattaacaaagagaaggcacgcctaaatttggaagtggggtagtggtctgggaaaagatatttgcttaaagttgtaaaatttaatttaaaagacagactttattttaaaccatatatgtatgtgtgtttgtgtgagggtatgtgtacattagtgtaggtgctgacagaggtcagagccccccaaccccacccccccaatcctcacccttcagctattgctacgggcagttgtaagctgccttgtgtgtgtgtgtgtgtggggggggtgagaactaaaccagggacctctataaaaacagcgcaggttctcaatggctgagacatccctccagctcagagaatttattatttttttccattttttaaaattaggtatttacttcatttacatttcaaatgatatcccgaaagtctccaataccctcccccaacctgctcccctacccacccactccccctttttggccctggtgttcccctgtactggggcatataaagtttgcaagaccaatgggcctctcttcccaatgatggccgactaggccatcttctgatacatatgcagctagaaacacgagctccggggtactggttagttcataatgttgttccacctatagggttgcacaccccttcagctccttgggtactttcactggctcctctattgggggccctgtgatccatcccatagctgactgtgagcatccacttctgtgtttgctaggcacccgcatagcctcacaagagacagctatatcagggtcctttcagcaaaatcttgctggcgtagagaatttatttttaagatcaacgctttggctaggcttggtggtgcaccttacccaggaggttagacagcagtttgtctccagctcaggctccttagtgagacagggccagcttgggaataaataaaatgctcttgcaaaaacaagcaagcaaagaaagaaataaaaaacaagtaaaagtcaaagcaaacaaaaacacattgcttcctcattgctgctgaaacactaatgaggtaggggaggcctgttgctcgccagtgcccacaatcccgtccacctcaaccatttccttgtttaaatgcttcaaatggtgatggacctaatttaaaaaaaaatccctgtgctttctatgttcatgtgcttatttttttttgactgctcaaagaaaaggtaatgaagtgaattaaaaagattcatttgtgttttctatcttaattcctttgatttgagaaaaattcaaaatctagatgctacagggaatataactaaagaaaaaaggcatgcgtcatgttcaagcatgcataaaatgggctcttggggaaatgtacagtttggatgtctttccttgaggtctgtgtgaataggagcactcattttgagaacagtgtttactgctgtctataggaaggaagcactctcgtcactctgagggttcgttttccccctgaaggcagcctcggatgattcagctggtttgcagctagttagaatccgtgtctccagtgcttccttcacgtagacgcactcacgcacgaagagggcgagtgttctgtgagctccactgcccttggcttgcttctgcagctccagcttcctgaactgtgatgtgagggttttaggagaaatgggttcagagtctgtcactacagacttgaatcatgggcccagcgagttggctcagctggtaaaacatttgctgccaagtgcctagagtctgacccctgaatcctgggtaaaggtaggagagaactgattccacagagctgtcatctcagctccacacccactgtggcatgtgcacaccatacacacgcacatgcatgtgcacacacacacacacacacacacacacacacacactaaaagttacttaaaggtgagggtgggggaacaaaaaaggtacttaaaaaaaactatccctgtggctcaaatcaacattgatcatgatggctcaagggttgaccttattggtaggaagtttgagggtcatagtaaggtagtacaatttgacccatggatcacaagttacaaaatagcttatttttaaacaggtaatactgataagactagtatctttatgtgtgatgtgcaacaaccactatagataccatattctgaccactgatttctttaaaaattattttcttatatttttcataaagtatttgtatttgaagagtgttgaccgatgctttttgatattgtgattaatacagttagcattctctatgcagattgtacgcaggccccgaggtggacatctggagcagcggggtcattctctatgctttgctgtgtggaaccctcccttttgatgatgaccatgtgccaactctttttaagaagatatgtgatgggatcttttatacccctcagtacttaaacccttcagtaatcagccttttgaaacatatgctgcaggtggatcccatgaagagggccgcaataaaagatatcaggtaactcactttatctgcctacttgaccaaccagccaacaaaccatctgtctgtctgtctgtctgtctgtctggactgtgtagtcttggctatcctggaactcactctaaagacaaggctggccctgcctccctctgccacccgagtgcagtgctaggattaaaggcgcgtggtattaccattgcacagcaatattaggtgatttttaaaccaatgtatttttctaccttttcgagtctctagataccagagaaatttcattttattttttatttttatttttattttttttttttggttttttcgagacagggtttctctatatagccctggctgtcctggagctcactttgtagaccaggctggcctcgaactcagaaacccgcctgcctctgcctcccgagtgctgggattaaaggcatgcaccaccacgcccagctgaaatttcattttattaatgacacacttttcttgtggcaatatactttgagtcataggaaattgattattgtgctcaattgagtattgagaaatggctgcattgtgtatcatggtttaacctgatagtttaaataaggcatgactgatagtggcagctgtgcttcccgggttgcggtaagtcacgtctcatgaacactcagtactccctggccaccgtactctgtcatcagtgtttctttatttttgttttccttagttctttgatcttctgatgtctagagtacacgtttttctgatactcaaagtagaaggaactaaagacgaataataagtagaaaacattagggcacatgggactttgagctggattccttgccactgactccttatgctagaagtcctgttgaagctgggtgtggtggtccacgcctttaatcccagcacttggaaggtggagccagggagatcctgttagttcatagccaatctggtctacataatggtttcaggacagtcagctctgtagagagaccctgattcaaaaacaataacaaacaaaaagacctgctgaaaagaagtctccatgtcgcggcatggcagatggggaggcaaactcagttaattaaatggatattataaaatatgtaagtgggatgtatattcgcacatgttttagatatttttcataactgaaatgtgatagcaaatgctggatctggtggcgcacacccatgatcccaggacttgacaagctgaaagagtatgaccgtgagtgtgtttccagcctgggctatggagtgaagattccacctcaaaaaccagtcagatacccttaaaaaccattattcttttcagtgtttgctttgtttgtttgtttttaagttttagtatagttcttgttatggttccatgtcctttcatatatagaattaatgaatacaatatgaaattgttcagaggttggtcttttgagtcatagaactgggttgaaaggacgagggtagattttaaatggatgaattgtttatcgtgaaactcagcatggagtaagaatgcataggatgatattgcacactgtttttgttagtaagctcttttcctataacatgaaatagtgtaaaaagtgaagccacacaacatagtttctttctgggctggaaaaagactgtcctcagtcattgtcctttgggtagacataccaaatttggctgccttgatcctcaaaaattagtggcaggggactagagagatggctcggctgttaagagcactggctgcttttccagaggtcctgagttcaattcccagcaaccacatggtggctcacacccatctacggtaggttccaatgccttcttctggtgtgcaaattgtacatacagacaaaatacccatacacataaaagtatataaataaaaaataggttgtagactaatgtttttctcagcatattcaatgaagtatgagctagaaggggaaaccagtttaaagagaacaactgtaataatgtagcatgagtatgaactcattcatatcctaaactctggaaactattacttttattcttggtttaactgaaaacccttcttccaccattgctgtctctcttagggaacacgagtggtttaaacaggaccttccgaagtatctctttcctgaggacccatcttatagttcaaccatgatcgatgacgaagccttgaaagaagtgtgtgagaagttcgagtgttcggaggaggaggtcctcagctgcctgtacaacagaaaccaccaggacccactagccgtcgcctaccacctcatcatagacaacaggagaataatgaatgaagccaaagatttctacctagcaaccagcccacctgactctttcctggacgaccaccatttaactcggcctcaccctgaaagagtaccgttcttggttgccgaaacaccacgggcccggcacaccctggatgaattaaacccacagaaatccaaacaccaaggtgtacggaaggcaaaatggcatttgggaattcgaagtcaaagccgacccaatgatatcatggcagaagtttgtagagcaatcaagcagttggattatgaatggaaggtaagaaggcaagtgctctctctgtttggtgagcctgtagccaaagccctttgtaggagaactgatgtgatgatgtgcctttgtttttgtccatatccaatgctaggttgtaaacccctattatttgcgtgtacgaaggaagaatcctgtgacaagcacattttccaaaatgagtctacagctataccaagtggatagtaggacttacttgttggatttccgtagtattgatggtatgtacacgcagaaccctggaggtcatgtagttatatagcctgcttacctcatttgctttatagtctttgttttctttctttcttttttgaataaaaactaagcatgcaaagtagtaagcttcatatggcgccttcctcccttctctctctctagcttttctatcctccctccctccctccctccctccctccctccctccctccctccctccctccctccctccctccctccctctgcatgtgtctcagaacacatgggacaggctgcagaagtcaatgtcaggtaccgtcctccttcaccttccatcttgctttggagacaaggtctctttgcacacgggtggttgcccttcagggtacactcacgggccagcaagctccagggatcatttaatttccgacttccagctttggcgtaatgggcgtgccctcgctggcctggctttgacatgggtctggggatcagcggcagggcctccttatctactgagccttctccccagccccccagtgcacgctgccatacatgtcctgcgtccttggcatcctcctcactgccctccacctcagctatgtcttaggaagcttcctggccttttcctgctaattcataggaaacatgacttcctatgttctgcaagactgacgtttgtgaaacctgttattcttgctccatgtagcatattgatttatagattattggggctagggatttaggtcagtattgaagttcttgcttcactggcttcaatcaccatcacctgactattgttctgtaaaatctttaaaaatatacagggtttttgtttgtttgttttgcttatgctctaagtgatgtttgagaagctgcagggtaagagcgctgatctgaggtggggagggtcgagctcttgagaggtgggaactgtccctttggtgccttggacaagtccctcaacttctggctttttatatctgtaaaatggttcctaggtgagacaagttccaagatacctttcatactgcaagtgatcgattctgtattttttgttttgttttgtttttgagacagggtttctgtgtagctctggctgtcctggaactcattctgtagaccaggctggcctcaaactcccagagttgtctttgcctcctaattgatgggactaaaggtgtgcttgccactacccagtgagtctgtggttttaataaatatctcctagcagtgatattaatttacaggttattagtttactgtttcttagttggtgtgaaagtcaagagtgctatactatgtatcccatgttgactggccattgtatgtattttttgtgctgtgtgtagaagtggtaaggtgctttacaaaggcacgcttgctctatttgagaatgtaaataaaaccagtgtgctttggagaactggttagtagtctcacttaggtgctgcttaaacacttgagggagaaatagataataaaacattgaaattctttccacccagatgagattacagaagccaaatcagggactgctactccacagagatcgggatccatcagcaactatcgatcttgccaaaggagtgactctgatgccgaagctcaaggaaagccctcagacgtctcccttacctcatctgtcacctccctcgactcctcccctgtcgacgtagctccaagaccaggaagtcatacaatagaattttttgaaatgtgtgcaaatctaattaaaattcttgcacagtaaacctaaaattttgcttatttctttgatgcaataagcatgcataataaataatagccaaatacttccacttaccaagttatatatatgtgtgtatataactgaggattggccttttggaatgcagtttgcacagggactggaaaacgattgatcgttaaaagcctgatgtgcagaattgaatgaggatcactctgttatcccgtattcagtaggtacacacagcgtaacacacacacaatggactgtaggtctcaagcttacttgacttttggccatttgaatttgctgtaacaggtctcagtcgaccataaatttaccataaagccttcacatattagtacatgttgatgtattttatattagcttcatgaatttattgagttgcctggaatcctcatagaccttattagataatgctgttttctgggctccttaacttccaaaatagctactagtttccatttttggttacattgtgaactatttccatattcctcttaacatgctatttttgtgtagtaagtcatttcagagagcagtctggatttaacatttttctttggcttgtgagcccccaaagccccagaatttatatgttcagaccctccaagccctgaatttactttttcaggtttgcccttttatatatgaagtgctgctttggatccaagagccgagttgctcacactgtagtgaatcgtgttgcttctgtcagtgcacagagacgctatcatgtcagccagtgttgaatgtctttggtattttctaagccaatccagtgcatagaaaggacagtgtttatacgctctgaatgctaggattggggttttagcccctgattttattctggacaatttttaaagaaagaaaagttgcaagaatttagtgactgcatgtgtatttactacttagctcctacaactactgtttggccatatttgctctctagatccacacatgtataatatacagatatgcacatatattcgagtatatgtttgcttttattctgaaccactgagatgttaaggtatatatatatatatatatataccagccctgaatacttcagcacttcctaaaaataataataatgtcctttagaaaccttctgaaaccattataaaatcaataatttccagatagtgcctggttttccagattagctgtaactgcccagaattccatttaagttacagcctgattttatttgcagttctttaatcaggttaataacactattttgaaaagatgtagaagaaatcctttcttcaaactggccaagtttatttcaggttttaattcaaaataatgagtggctaaagaagtgtgatttttcttcaatctctgatttatatgcctctctccttttagtggtagcatagcataatgggtgtaagtgaagatttaagtcacgctagacaaagccggtattgtgtgagctaataattaatgtcatattggccatatttggtttcctttaagtttaggaaattggtcagaggctctagcccagtggtgaggctgggtcatctccagcaacgtgaaacaaaatgcattttctttaaacattaaccatcccccctttgtaagagagacttttccccccactgcattcatttaaaaatattttgccccatccccaaacctgtccagcacttatgtaagaacgcatttggaggacatgatagcttgcataaaagatgacgctatagtttatgcactgatttccggacaaaaatgatgcttctttttgttcggggcttgttttattcaactccgaattgaatgctgtataaagtaatggagactccatttacctgagttcctgactgtatttatacctgtgtgtttgtgccctctgtgtggggctccctgatgtcacgtatgctgtctgaatgcagcgctgtattcccgctgtgtagaacagaaggctgcatttgtaaagttatagatttgtaaataaaactgaggaatatctctataaactgttggggggacggggcacaaaaggaggagccaactaaataggaccttctaaaatttgttaattttgtaatctttgcttcttttataagttattctgtgattccttttagttaccgagttttattttgaagacattaaaatattgcacttgtataaatagtatgataaatgcagactattgcagtcaaattttttaaaagctaggatatctgaaatgacaactttcagttaagtatgtcaagcccaggacaggattttcacaaatgtattgtagtttgcaaattcttacactgaaaatgtaaagggagtcaatgcaaatgatttttaatcttttttttattatcttttcagcaatttatattttcttgtgattttatgcaaccatatttttactttgtcttgacaactgaaagctgtgtgatgtttttgacagaaaagtactgtatacatagttttaaatataacagattttgctgatatgtaaaaattttgccattaaagttgatttctcatgaaaggaacttttctaccaagtcgggagacgcaagagcttaatatatctaatttaaaataatttcactgaaataaacaccattgcttttactttgattctatttttttcttaagatgcttttatagtgtttgggagttttagataattttatatgaattctctccctaccttgccccatcctttggatctttgataccattcacaaataaactcatgtggctgggtgtgtaaagatatgtaccccaaggggcatcttgggaaagaaaaccataaattcttctccttaactcctccctctgcctgttcattgtgggctctgacatgatgaatggaatgccacacacagcctgactgtaagccgttgttgggaggagtccaccattgtggcttatgtatgtttgcccagagtaacctgatttagaaagatggcataataaagaaaaaagttcgtttttcatttgtta

SEQ ID NO: 38 - DNA, 58478 bp, Homo sapiens
  source 1..58478: mol_type = genomic DNA
gcggcggcggcagcggcggagaagggagcgggaccggaagggtcgcagcgccccggcgcccctcacacccactgcggcggcggcggcggcggcggcggcggggcggagcggagcggggcgggccggcggcggagccggggccgcggagccaggagtgactagcacgcagcgccgccagtccgcccgcccgccctctccccgtggcgcggcggcggggaggcgaggtgagcccggcgggcgggctaggcctggcggcggctgctcgggccgggcccgcggggaggggcggtgagggaaccgcgcggccgggggcttcggggcgggccgggggctgcggggccctggcagccgcagccgtcgcccctgtgctgggggatgccgcaggcgcccccttccgcccggctgtcagcagccccgggctgcgggcctgctcaccggcctggcccggccgacctgcccgtggggtctgcgggcgccatccctcccggaggtggggcagacagctgcactcctgcgccgggtgcccaggggcccggggtcgcgtccccgcgaccttggccaaggcactgaccctcgctctgccgcggttttgccttcgggaaggtggggaaatgtctcttctggacagggttgttgtcaggctgtgtgaatgtatgcagacgcctgggcaggaccccggtgtgcatctgtggaagactgggcagggtgctggcccgtgctggtgtgagtggtgtaggaaccccctccccacccgcccagcctcccgcctccccgcgcactcctctcttgccttgtcattgcacactcggtgtccagcagtgccagaggggacccagcccgaatcccttaccaccgcgcccctcccccagaagactgctgccccgtcccactcatctcgcccgccttgaacatgccagcccgcatttgccccaggacctttgcatttgctgtttccccgtctttggagttgtctccgtgatcttggcacaagtagctctttctgctccttcctctggtcagatgtctcgttttgggtgaggccctcctcgaccaccctctttcttcccttagtcatgctatttcattatttaaaaaatttccttcctagctctcatctggtttgaaactattctatttatttgcctgcttattttctgtctccccgactaggatgtaactttgtgaaaacaggtagctgtctgatttgtccactgctttatccccagtgcttagaaagcacacaggaagtattcagtagtatcagctcaatgaatgaatgaatgatcaaagaaatggcccagcctgcctgttgtctctgctttatctgttcatttagtgacttctgattagcgtgtgaaacttgtaagcagatggaagcttgttctattttgtgaaacattttggtgtccttgacccctttaattgctaactgttggaacaagctgtgatataaaatctcacatttttataatagtttagctgtagctttcttccacacatacaagagacatttactgaattctgcattatctaggtcatgctttctgctagaccctacggacacaaggcagatagcaacggggtccctttcccgagagagcccaggagcccagtagagaaggcaggcatgcagacacttagttccaggactgtacaacccttgctataggggaggggctatgccatggaaatgtggaggaggtgacaggtggtgctggggggccttgagggtgataagaaatttgctaggcagggagaggcacagaggtgtgaaggagcagggccaaggaaggaccgtaggccactgtggagttgagaatcagtctggagggccaggtgtaaggacacagagtcgtggggaccctaaagaacaggaaccttacccagcagttttctagaagaaggtggaatttggctgggtgccatggctcacgccagtaatttcaagacactttgggaggctgatgtgggaggatcacttcaggccaggagttcaagaccagcctgggcaacgtagcgagatctgtctctacaaaaaattttaagaaattagctaggtgtggtggcatccacctgtagtcctagctgcttgggaggctgaggtggaaggatcccatgagcccaggatttggagcctgcagtgagctatgatcacaccactgtgctccagcctgggtgacagagcaagaccctgtctctaaaaaggaaggcagcactccacatttgttctgatttttaaatgttggcaatagctaattaaatttttttttaatgctgtgagccaagccaaatacagattcattcagcttggttgcaggatcgtcatcctccaggactggctgtgtgggagggaggagctgtgaggagagcaggaaaggtagcctaaggccaggggagccaggccctgtttgcccaggtgccagcccagatactcatttgattgtaactggagccctgtggaaacggaagctcaggagtctaagtagtctgtttcttagcaagcagctggtgagtggagttcgaacccagatcacttcccagataaggattctttcctgggtccctcagctctgagtattctcttttggcttttaacttgttctggaagaatgaccaccaatctatttaatgttttcctccatttaacttttttttttcttcaaaaggatcctgcagagttaaaaacaatactatttttgcatagacttctcttttgacagctttgattttcctggcaatttaattttcagggtgccaggactttaatttgttcacagattaaaatctgtttatttggtcccgtaaataaacaacagaggggatacttgaatgtgtctaagataaaatattcttaattttctggataaagaaaaggaccagacaaaccagttaatagcgagtaaaccagttgttttcatgaggcataagataaaacagagaccagattttttttcttcttgagactattgatttgccaatagggcaactatttttggtctacatacatacagtagttacacctcacacttggttaggaaggtgccatttttacataattttccttcagaataattaattcctgatactttgtacttgattgtatgaaccagtttcaacatcattctttttattttaacttttattatgggaactttcaaacatatacaaaataaacagaatagtgtcctgctttaacagttattaactcctgaccaatcttgtttcatctctaatggtatccacttgcacccttaccacccataattattttcaagcaaatcctaaatatcatgtcatttcattcattattttttgggatactaattacacagtgggtgcccagtaaatgtttggtaaagacaaagctaaatgggagaataaatgtggtagggtagctcggagcagtgggtaagatcaggactttgagtcagactcccagtgggtctgctgcttatctgggtgatgtgcagaagcgattgcactcatctgtaaaacatacgggcacaacctcagggtgctcaggaggtgtacagtagttatacttcacacttcggtaggtctctaaaggtactgactcttttaaagttgaaaaagtaataattgcttaatatcatcaaataactagtcaatattcaaatttccagctgccccatgaattttaggtttccttaatagtttgaaagtagagcaagagaaggccatacgttgttgattggatgatacgtcttttaagtttctcttaatccatagatccccctcctatttctttgttttcttggtagtttatttgttgaagcaatcgagttgttccttagcatttccatagttggtatttgattgattgcatctctgcagtgtaattgaatgtgtttctctgtaatctctgtaagttagtaattggatctagacgaggcttcgtcagatttagggtgcattcctgcatcaagatgccttcctaagtgggctgtgcacttcttatctagaggtaccctgaggctctctgctcgtccgtgttgcagatgagtgcaatcgcttgctgcacatcacccagataaatagcagacccactgggagtctgaagtcaaagtcccgatcttaaccactgctcccagctgccctaccgcattttttctcccatttagctttgtctttaacaaacattttttgggcacccactgtgtaatcagtagaggattgagaaataaatcagacacattttctgcccttacagagtagaagtgtaagtagactcggaatgcaatctaaagcgaatactgggagggtggcaaaaatgggggcatgcccagcatggtttgaagggaaaggctggaggaggaaacatgtaagagaagcaagtgcttgaactagatttttgaaggagggtgaatgttgaccagcaggtcaaaaaggggagggaagtcatttcaagcagatggaacagcttaggcagaggcctgaaggtgtgcagtagctgggtgtgtccgctgatcccaggtggtttgatgttgcctaagattgggccagaggactgccatctcctgtgctgtgctagggaactgaatcttattctccaggcagtcagtcactgttgaaggagttcaaatgggagaatggtgtgatcactgcacactttcaacaaatctctcttttttctttccatattttgaaataattatagattcacaggaagttgcacaaatggcacagagaggtcccagtacccttcccccagctttctcccacggttacatatttacacaactgtagtaaaatgtctaaaccaggacattgggcatcggagcaaggtgtatagagttcattgtcattttttatcgtgtgaaaattcctataaccactaccacaatcaagattcaaaactatgtcatcatcccagatatctccttgtcccacccccttacagccacagcagccccttttccccaccattcataactgctggcaagtactaatctagtctgcatctctatacttttgtcttttcaggaatgttatatgcatggagttatacaggatgtgactttttgagattggcttttttcgttgactatcctgcccctgagatccacccaagttgtggtatgtttcagcagttgctgagtggtattccatggtatgggtatacagcagttagtttaaccatttacccattgaaggacaggtttgggttgtttctagtttggcactattaaaaataaagctgctgtgaacatttgtgtacatattctcacgtggagtgatttctctttctaaagtggcatgtgtgcagtggttcggaagtcacagaaatggtggctgggagaatgcttctgctgtcgctggtccaaggagccacgagaagcccttacccagggccctgggagtgggggattgagagggaaataggcaggcctgggtgcctggaagtggggctggtgacggagatccttgcagggtcctatggatccaacagtgggtgaagtgataaccaaatgctagttgttctgtattgtggtatatactgtggcttaagaactacagaggatggccctgagagctgcaaggttcttgattatcaaagaaagattacgttgttataccaagctattcttcataagaattacagtaggaggccaggcgcggtggctcacgcctgtaatcccagcactttgggaggctgaggcgggcggatcataaggtcaggagatcgagaccatcctggctaacacagtgaaaccccatctctactaaaaatacaaaaattagctgggtgtgctggcgggcgcctgtagtcccagctacttgggaggctgaggcaggagaatggcgtgaacctgggaggcggagcttgcagtgagccgagatcatgccactgcactccagcctgggcgacagagcgagactccgtctcaaaaaaaaaaaaaaagaaaagaaagaataaagaattacagtaggaaaatagaactttttaaatttttactatttttttttttttgagacggagtctcgctctgtcgcccaggctggagtgcaatggtgtgatcttggctcactgcaagctccgcctcccaggttcacgccattctcctgcctcagcctccctagtagctgggactacaggcgcccgccaccacacccggctaattttttgtatttttttagtagagacggagtttcaccatgttagccaggatggtctccgtctcctgacctcgtgatccacacgccacagcctcccaaagtgctgggattacaggtgtgagccaccgcacccggccagatttttactattattattattattattgtttaatatagagttgaagcctcaccatgttgcccaggctggtctggaactcttgggcttaagtgatcctcccaccttcggcctcccacagtgctgggattacaagtgtgagccatcttgcccagctggaaaacagaacaatttaatgaaaaaaatgtcggcagcaagcattgagacagagggtgattgtgagaatctgcttttaatcacaatagttagttgatttaaatatcgcatgtcctgggtactctgaagctttagtgtgatgaaaggttcacttgagtctgtggatcactgaatcgttgtcatcgttagaggaaaaagtgttttggtaggttttggtagggggagtcagcaaggtgaaatgtgcaggactgtgtgctggtcctggccagcccatgtgcaaatagcttcactttctaaagggatatcagaatggtgctttgggaggaacttgaatattgtggtgaaacactcctaaattcaaatctgagccatgctgggaatttggacaacttccttactggacaacttcctctaagcctcagtttcctcatttgcagagcggggatagtaatatgcttctcactagttgttataagggtgttgataaatgtgtacctcagagccaggcccactctcatgcctctagccttatctgcctgaagcccgtcttccatacaagtgtcaaatgatcattctgcagcttttcatttaacatgtgttgtttaatcagtttttaaatgtgaaatatgtacatttgaaaaacagaatagaaagttataatgggaagaaagtttctcatttcccactatttctctacttgccagcattgtgtatgtgcgtgtgtatgcgtgtgtgtgtgtttacgtagctgggcattatgtgttctcttcttcaacttggtgtatttcctttctgtatcttagacatctttccacattgatacataaagtccttgcattctgttgaatggccttgttgtacttctgtgccataatttattcagtccatccacagtgtgcattttagattacttctagttttttgcctgttacaagaagtgttacaaacatgcttgcacaaatatgtttggatacttgtacacgtatttgtcagatacacttagagaattgtgtttgccagtttaggatatgcagttaacatttttattagccagatctatattccatctaaaaaaatgttttaccacttctcagctctcactgacgtgtatgaaagtgcctgtttcctcatgcctcggtcgatactgtgaacaaacttgagctcaggtcttgcctcctccaggaaacctccttgtagcgttccctcccagttttgagttgctcatagcctggaagggaggcagaccctacaaaggctgtgacagtgcagcctggcgggcgctgctgagtgcacaagtggcaaggagggagccctgtgctggacggatggtggcagcacagcctgggagctgagggggaggaaccagcaccggctggtgtgggaagtggaggcagcgaatgcaggctttagtgtattgctaatgtggtttcatgaagaattcttgtacttcccgatttgtaaaactgttttctgagccccagttgatggtccattttgttgaaatatcatctcaatagagttgactcatgaatagctaaattacacaccttctcaggtggccttaagtttctttctcttgctctcacaaagcccaaacttgacagagaaggtggctttaacaggttttcacttaggtgacttttttctcctgcataataagggtaccttattttaattttataattattttaaatctttttgtttgtttgtttttgagatggagtctcgctgtggcccaggctggagtggcacgatctcagctcactgcaatctccacctcccggttcaaatgattctcctgcatcagcctcccaagtagctgggattacaggcacgcactaccacacccggctaatttttgtatttttagtagagatggggcttcaccatgttggccaggctgttctcaaactcctgacctcaagtgattcccccacgttggcctcccaaagtgctgggattacaggtgtgagccaccatgcccggactattttaaatcttgagatggaattacaattctaaaacctaatatgagtgaatatactccccaaatttaaaaaagttaacctaatattgtcatagtccaaatataggttgaaagcagttatagcagggagagttgcagagttggtcagcagggttgagattgatctgtcagtcccaacgtggacacggggtcctgaatggggggtggctctgtgccatgaggtagttaaggaatccagctggtgggcagctttccatctacagcatgtgacttccatctctgggtctgtgacagctgatccctcagccagcagcaaggaagaaagattggagggcaagcagctttctgtaaagaaaaataaaagtgatctggaagttgcatacatcacttctacccacatcttattagtcagaacttggtcatctggccatacctggctgctgggaaagctgccaggcgtcgtctctagttgggcagccatttatctagcaggaaggggaaggaaggcttctcttatgaaagcgaggaagggagggatggatcctggagcacctcagcgcctgtgtcgcacctctgatgttttgacggcttccacagccctcaggactgaggccagacggctctgcgtggcttctggggctcatagtgatctggcctccttttctctctccagcttcactcgccctctacccagcaagtccctagtgacttgtcacattccgaatgtgcctccgcctctgctgcttctcctcccattcccccaaatcttcttcaccctactgggtttaggacccttggtgtgcagggcctcctcctgagtgtgcgctcactgagggcaggcgagtgtcctggcatggtacctcaccatccacagcgggtgctcagtacatgcttgcaagtaactgtgttgctggtgtgttgacggcatagcagaggaacagccaccctccgtaaagcaggtggtagtgggtgcctgcctttttgctgagttgtctctaatcctttgcacttgtaccccgctagccaagctcagcagttcgctgtgtctggacacagtcagtttgagctctgtggctctactgtccatctctggcaaaagagtctgagggcggatgccgcctcctccttgaagccgtccttgtcttctgcccctgccagtgggtaggatctcttttgccttttgattttgtttacattgtgcttatggcccttaccgcactgtgacttgtaatatagataatggactcactgctcgcgcttctcccccaaatagtgaagtacatgttgtttcaagactggttgctagctgactatggcatatcttttgctatacttaccactttcgtgcataaaggtaccccctaaatgttgagtggaattgtttcagcctcttgcaaactgtaaataagctaatctttagaaaggatcttcctttagatatcagtaaaatggagcagcactgtggggaatcagatcaacaaaggtttattgaatgctcacagtgccccaaagaccagcttcctgtcctcctgtccttggagtatgagatgccatgagcaagacagacctgcctcgcacctcctatagcttagagcacagtgacctgccagcctggagagctcctgagtccccttctcacagcagtgtgggctaggcaggtgttccagctcactcagccctagattgctcccaggtaacacgggactgagactcctgcggtgcgggttgtatgagcagctgtttgtccagcatctaagcgctgtggcgtcactggagtcactccctggctggcacgctaacacacctcggcaggagtggtcagagtggcagccacactgcagccaccacccagaggacggggagaagaccgtggggcagtggtcacttggagaaattattaatttgactcagttctttatttagacttgttattaatccattttttccatgtttaaggaaaatcctagcatttgtgttgaaatataaatcatcaccacaaaaatctcattaggttgacgttaaatattagatactagaacataaaggcaagggatttgacagagctgtagaatacattctgtagtcttaaacggtatagaatgtttacctatatgattttattgttggctatgtagttttaaaagaccaaaataaatagcttgctgacttttaaataagcataaccagacacgagcctaggaaccacttgccaatttgtttgcttgttttctgtataaaatcatccaggctcctgcagagcagcagtctcagcctgtgcctcaaccacagaaaagctgctttctgggcctgctggcctacactcagacatagtggatagacttcctagtgttactatgatggactgtcagtcacagcagagttcttcatatacagatctctaccctgaagtccggtggtgatgtgggactctggggctgtgccagctgatgccagctctgggacccacctcctgaggcaggagcacgtgcttgggcacatgcagcacactgatgccaccaggcctctgacagcctgtcactttggcgtatgaatcttgctttttggttcatcatttcaaccagaatctatacactgagcagaagactggtccgtttgcttctctttaggcattctagaagtgatcatttttgaaacaatgcctccgtctctagacagctaggtgtaaatgaaccatttacacctagcttgcccacagggggcaagctgatgagacgcacagagtgatgtagtcttttcatagccagtagtaatgcatacattcttttctccaaaggtggttattttctagtccagccccttaaagtgtggtcttgctgggcctcaaaattccttcctttcataatggtctggtaccactgaaatgtctgcatttttttgtgtcttgcttaagttcagaacttggtcagattgactttatcaacttacagccacattgtcttacataccaataagttcagaactctcttacgtgagctgcgtatgtacttccggtaagaatgcacgttcattctgtttttctttgaagggatctgaaacttgcccacccttcgggatattgcaggacgctgcatcatgagcgacagtaaatgtgacagtcagttttatagtgtgcaagtggcagactcaaccttcactgtcctaaaacgttaccagcagctgaaaccaattggctctggggcccaagggattgtttggtaagtatggtctgttttaatagcgtggattgagtttttgctgtaataaaaagtaaaactaaagtgtcaggatttagaaacattgatgattaaaaaaaaaactctgttataggtttatgagctaaattgaatcaactgcttgctctagttctgtgtagtcaggctgtagggtacaaacccatattcttagaatgctgcaggaatttaaataggtagcaagttttcttttttgtttgtttctttttcctttcattttttttttcatttctcctgtcattatgatatcagagtagtaggtatgacagtgagttgtaacagaaatttggagttttattcatttcttcatcatggccaccttttcccccctccccttttattcccgatcactcctgttcatttccaggcgccatcattgcagtgccttgccattcattggcaggatgaggccagtcagtgtcattgtcactccatggattaaccaggaagggatgctgtgtgaggggttgggctggccatctcttccttggtgtctcacttcaactgtgtgtccagcccagaacgtcagaatcgttagtctgaccctgaacgttagtctcttgcatggtaagacggtcagccgccgcagcatcacgggccagctcaaggtaaagctcttcacatgtttcctagactgcagctatcagcacttcccacactttttaccccttatttttctgggcagaacttttttttttctttttctttttctttttttttggtcaatgaaaacaggattacctttgcgcctaaagaaaccgtggtgcagttaaacatcgcgtgtttacagctggtaggcagagggggttgagggagaagaaagctcttttcgatgctctagtagggtagtttacatttccttgtagagatgttgggtttggagaatctttaacgatgatttttaactgatcctttgttgcggagacctatgatcagggaaacagttgtttttttcagccctggcggctgaaggccctgggagctaagaggaaattgcagtccagagcttctttgagaagctaaggcgggaaagggactgtttggaaggaatgcccagcttgcatctaaagtaatggtgatcttaacttcctgatgacacatgctgtatcggcacttaaatccagtgtgccagaagaagtgttaaaggtggccgggcacggtggctcacgcctgtaatcccagcactttgggaggccaagctgggcagatcacgaggtcaagagatcgagaccatcctggccaacatggtgaaaccccgtctttgctaaaaatacagaaattagccaggtgtggtggcacacacccgtagtcccagctactcgggaggctgaggcaagagaatcgcttgaacctgggagatggaggttgcagtgagccaagatcgcgccactgcactccagcctgggcgatggagcaagactccgtctcaaaaaaaaaaaaaaaaaagttttaaagttagtggaggatggttcaaattaggaaactttgatggtaatggaaagttataaacaacaaagcattcttttggtttataacccatctcctatttggaattagatgataatttgacagataatttgatgtgtgcatgcgagagagagagagaaaaaggagagagggggcaagaagggagaaatgtcggaggtcttggggagttgtttgtggctatagacaggtagctgttttatttatttatttatttttttgagacagagtctcactttgtcaccaggctggagtgcagtggcgcgatctcagctcactgtagcctccgcctcctgggttcaagcagttctcctgcctcagcctcccggtagctgggactacaggcgcacgccaccacacccagctaatttttgtatttttagtagagacagggtttccccatgttggccaggatggtctcgatctcttgacctcatgatccacccaccttggcctcccaaagtgctgggattacaggcatgagccactgcgcccggcctacaggtagctgttttaaatacgtgcttcatttatcccagctggcatgtcattcacttgcttttgaaggttggtagtaatgtgaatagtgtatattgtagaatcaccatgagctctgccataaccctcactggtggtgaatcgaaggactaggaaggctcacttgcttctcccgtctcacggggtgttagtggtaggcctgggaccaaaacaagctgtgggcctttgggaccttattgcctgtaccacggagagacttgttgaagactttgaaccactgatactttgataggtcaaggcctctgacccaccttctgtttagaatcttagtaataatgaacaaatattcactaaacacctattaaacaattttcatttaattgtatttatctctataagacaattgttacattcaagaacagtttcaatttttatagctataactgactttcagttttatggtatccttctatcttatgttctaatagggaaagtaaacactttataagtgattttcgcttccttttcacctttctcttttctctgtatccttcaccaggctatgaggcaccaagtagaattgggaaataatctagttacggcacattcccgtttcaaaaaagaaaaaaaagcttgcttttccaaaaataagctcaacagtagattagctaacactgacaagaggaattggattttctatcatatttcgtattaaaatattggcattatgtagttaattgatgatctgaaacttcctttcatcactattgtacttgaaaatcatctgtcagtgattctttggggagtgtagcatgcagaataatggtcccgcctgagatgtccacgtcctaatccctggaatttgtatatttctttacatggcaaaaggaatttagccggtgtgattacattaatggtcttgagatgggagggttatcccaggtttagttgggtgggtccttcttacaaaagggagacaggaaggtcatagtcagagatgtgatggcagagcgaagtttggagtgatgtggggccacagccaagcaatacaggaagcctccaaccagctgagagaggcagggagcagactccccccagagcctgcagaaggagccacgcagccctgcttacctcttgaggcataagatgcattttggacttctcacctccagaactgtaagatagtaagtttgtgtggctttaaagcagtaaattggtggttacttgttacaatagcaataggaaactaattcacaagcatgtgtatttctacatttttgagaaatataacagcaacagtgtatggtttatgcaactagttaatcttctatttaaattagagctttatgaagggcaggtgtgcagataaaccaacgtgcaggtagggcctgtgacctgtacaggattaaatggaagagctggagccagaagaaaatattctggttcctaattttgaattgtttttatagttgtctttgatttgtttatttgtttttgttcctttaaatatgttagtaaaatttattaggaaataagtttttaaattttaaaatattttattttatttttgagacggagtcttgctctgtcaccaggtggagtgcagtggcgtgatcttggctcaccgcaacctccgcctcgcgggttcaagtgattctcctgcctcagcctcccgagtagctgggattacaggtgtgcgccaccacgcccagctaattttttgtattttagtagagatggggtttcaccatgttggccaggatggtctccatctcttgatctcgtgatctgcccaccttggcctcccaaagtgctgggattgcaggcatgagccaccgcgcctggcctaaaataagttttaaaatataattttgaagtattcataaatatcaactgtgttatagtacaattaaataattgtaagattttgaagctctagtggagaaaatgtatgtacatttctttcatacatatattcagtttttctttctccttcaaaaatctcaagtttggccaaaatagtaaagattatttgctttacgaaaccattctatgaaatgcttaacctttaaaaaagtgttcaatattgagtctggcggttcttagaagtaacagttacagccttaacatgaaataattggtatagcgtgttcctttttgtgtcctcaagttctgtataaacatgagtactggcctgttcttaacatggtttattttctattaatataaataaataaaaacataacaatgttcacaacaaaatttctgtgataaaggagacatggtttgaggcacaggatggctgtgattcagaagacttgagttctgagtccagctcttttcctcagcgaagagttctttgtgagcagggcaaatcagtttctttatgggcctcaatattttcacctgtaaaatgagtggtttggaacttctcatttaagatggtggcccgaacacctgtacaaagataagagggcagtaataagtggaagacagttttaacaaatttatgaaatatagaaagtagcttgaatcttgtgatacagataaaacagcagataaagtgagaataagcagctgaagtatgtgcgtaaggaagagaacctagctatagtaaaactacagaggctgtgggcatagagatgacaatgaagaagagatgaaatgagtggctaaaactagggctgttaattaaaagtgtgcctgtgaaacagctgtgccagttttctgccaacattcccactgtcccccatgctcagcattttcccctagagagctagtaagttagtgaggagttactaggtcaggatctggggaagcacagaagcctagtgaggggagcttcagcatgtggggctgtctttcccttgggggcatttgaaaattctggaaggggctgttgagagagtgttttggactgccctgtggctaggagacagggatgagagtccagggccctctaatattgtgtggcaaacttcttttacttgtgttgggaccaataaaaggctgcttcctagaagtaaaggtaactcagagattggcccttataggcactgccactcagcttcagattatcatctcatttgctgaacttgtatgggggtaaacaaaaattgctagtgcccccaggtacctagtagaaataaatttaaattctttgtggaagaagacagcatcatattagataaaattatttctagatagcaaacagttttatacgtgcaaggcccagtctaggcacacaaggagatatgacaacatgaataaaatcctgcagaaacagcagacaaaagaaacagatccataggagatattggcattattagatccacatttttaaatagctatgatattacgttcaaggtgataaaggcaagattaaaagttttggtggagaaatgaaaacttcttttaagaggaataaatcaaaattctagaagtaaaaactatagtaattgaattatgaatttaatatgtgtaacagcatgctagatataactgaagagagatttagtgacctggaggagaggtcagcaaaaagtatccagaatgaaagctgcagaggcaaaaatggtagaagagcccaaaacagagaaggtgttagttttctattgctgcataacacattaacacaaacttagttgtttaaaacaacacctattgattatctcatagttctatagtcagaaacctgggtgggtttgcctgggttctttgcccagcatctcacaaagctgaagtcaagatttcgactgggctgggctcagctcacagatggaggttctggaagggtatctgcttccaagctccttcagcctgttggcagagtctagttccttacagctttaggtctgtggttcccaatctcttgatctctttcagtcaggcgctgctgtctgctcccagaggctgcatgttttccttctcaagtgacctcctccatcttcaaggcagcagtggcatgcccagtccttcccatactcacatctccctgattttccaccctttccatgagccagagcaaactctgcctttaaagggctctcgtgataagaataggcccacctggataatctgcgttttgttaaattaatgagtacgtttagcccttttgcaagatgcagggtcagtatatgtacccctccccctgcaaaattgcatatttatatactagcagcatatagaaaatgaaaatttgaaaaggataccacttaaaataggataaaaacttttaaattatcatatctggaggaaaaatctaacaatatgaaagacttgtatacaaaaagctaaaaaaattagaaaaaatagagaaaactgaaatcgtggtgggatgtctgattttcagagttagaatatttaataccatgaaggtcatttttcagacttgtctagagtgattgcaatcaaatctcagtcgtcttaaaaaacaaagaaatgaacaaactgattttaaaatttatatgtaaaaataaaaaccctagaatggtcaagacacccattaagaagggaggaacactccctctgcgagatgtgaagacttaccataaaactggtgatcaagctggtgtcgtgtggtgcaaggagaaacagtggactagccctgaaacagagtcatgcatgtgtgggcttctgacttatggcagtggtggcctgtggagcaatgaggaaaggctagccttttaaataaatggacataggaatgttcatgtagaaaaaagtgaaatttgaccccaacctcatattatacacaaaagtgaatgtcagttgaattgctgtaaatatataaggcaagccagtaaagctatttgaacataatataggagaatgtcttcatgatctttggggtagggaaggactcctttaaacacaacataaaaaaacatttatctgctggatgtggtggctcatgcctataattccagcactttgggaggccaaggtgggaggatcgcttgaggccaggagttcaagaccagcctggccaacataatgagactccccccatctccactttaagaaaaaaaaaaattatcatagaagattgatcaattttgtattaaaattaagaaatgttgtttattttaaaaaaccaagatcaagaaactgaaaagataagcatagatgtgagaagatatatgactgaaaaaaaatctcttgttcagaatatgtaaagaacaacagtcaagaagattataaagatagacaaacaaatagtcaataggttgtcacaggaggatacccaaataacctataaacaggaaaagtgctcaatgccgttattcatcaagatagtgcaatttaaaactgcgacgaaataccattccacactcagcagaatggttagaaactaagctgttggtgataccaagtgctggtgaggatgtggaaccacccagaggcagctctcagatgtgacccctcgtgtactggaaccacgcagaggcagctctcagatgtgacccctcgtgcactgctggcagctgtacaaatttgtagaaacgctctggcaaagagtttgacattatctactgaaatacaatggatacgttcccactcttagttgtctactcatcagaaacacatgcataggggatccggagctgcgtacaggaatggtgatgactgtgtgttctgtaatagattgaaaactaaaaacaactgaaatatctatcaacgtaatgtgatatagttatacaaaggaatcttatagcaatgatggaaggagttatagctacatacagcaacaatggatgagtcccataatattgagccacagaagtcagacacagaagatttcaaaaaacaggcaaaaataaactgggagctccagggtgcatgctttagctggtaaagcaagaaagtgattattgtacatgtcaaagcagttatcactggtggacaggagggacactaattagttgggggtgtgagaagcttttgggatacagagagaacatgactgataaatcattgagctgggaaacaaaaaaagaagcaaaggaatcagtacagtatcgggcataagcctcctcactgtcagcactcagtgtggaaatcagtggaaaagtgccttcaaagttctcacagaaaattgattttaaactcagaaaacttattatcaatcaagggtgggggcagagcaataccatctatcttccatgcaccttttctgaggaaattccttgaggatgtactccagcaagagaggcaacacaagagcgtaatgcaagaagcagtggggactgtgaaaagaaatcccaggatggtggctgcatggcaggtcttaaggaagctgcaagaagagtgtctgcaaatcatgtggaggagatgccagacaacaataatgtaagaagctaggaagtgccagtgataggctaaagagtgtctgcaaatcatgtggagtaggtgccacacaacagataatgtgagaagctaagatgtgtcaatgataggctaaaactggcattttttattagtaaaaactaataataatctagaatgtaataaaatctattatttattagaaatgtgtggggaaaactagaaaaaatcatggtctaattatgaaacaaagaggacatgatgtttgagcagttgatgaaatataagagaatcctttgtccttgatcctggaaatagtctcaccctcttatgagtggcagcaagagccatgtgatctttagaaaatgaaatgtaatcccaactctggccgttagtgatatttacattgtacacatacacacctacactccatgtattgattttcaacttctagaaacatcctaaagaagaaatacagaagacttagttatgaatatatggtaaatggaggagaaagggatggaacagtctcattttacgtaagcagaagtcaagacgttcccttcagagttgaagaagcgtgaagattaggggtgttacttaaagacgtaaccagggaaaacccaaaaagcagaacaacaaaaaaaataggaggtgttggcgattggggatttcaaggaagtggccaaatactcagttttcgtaatggggagtaggtgaatcatttctaaagctgataaatgaagagatagtgataacaatgtattctttgagtgaccgcaataaccacaaccaggaataactgaaggtagttcctcatggagctgagctacaagtggggaagcttatgcccacttagatgcttagacttggtccatttgccttgttttagccaaaaacttttttaaaatgacaaataaaaattgtatatatttatcatgtccagcatattgttctgaaatatgtatacattatggactagctaaattgagcgaattaacatatgcattacctcacatactttttaaaagtttctgatgagaacaaatctactctcatcaattttcaagaatacaatacattgttattaactgcagtcaccatatctcacagtagacctcctgaccttattcctcctatctaactgaaattttggacaaaaacttttgataccaaaaaagtgtgtctgttttcaaattctttttttctttttctttttctttttttttttttttgagaccctgggcaacagggtctcagtctgtcacccaggctggggtgcagtggagggatcagtgctcactgcagtctcgacccccggctcaagcagtcctcccacctcagtcccctgagtaactgggtctacagacatgcaccaccacactcagctaatctttgtattttttgtacagacaaggtttcactgtattgcccaggctggtctcaaactcctgggctcaagcgatctgcctgccttggcctcccaaagtgctgggaatacaggcataagccaccacacctggcctattttcaaattcttgagtctgagaagtatataggtataaatacatacatggctacatgtatgtcaatgacttgtttcacaagtggatatatccttctcattttataattcatataaatggtgcaatttgcatatgaacctgtggatttacatatgtatatagacagacacataatatgaactgaattaaagtaaggtagcttcttaaccaaatgctacaacagatagccttcaactttaaaacagattgaattaggttcgagtttggcaaaagcattaatagaagagaataaatgtaaacaatgttataaactcaatggaataaagaaatagaaacagtatttaaatcagtgcttaggttctcaggtggcctttagtagctgttagccctcatgagtagcccagaggtgataatacaaatgatactatttagtaccagtttgaaacctaaaaatgtgtaatcaggctacttgattcttcatgtctattttctggaggaaaatgaacagaatttcaacaggaaacgagatgctggaaacacagcctgtagattttattcttactatagtagtaggaggagatagttctaaaagaactttatatagcagttgcttacgttagagattttgtatcttgaacatttaccatgagctgaaattttggcttcttttctttttagatactgttatttgtgaaaaaaacacagtgattcaaaatttagatttattctcctcatgaattcagccatttcctctactgtgatattccaaaatatacacattttaagacaggaaacagtgactttgtttccaacttcttgtcatgtttaaactgaagatttcatttcttgactggttttatgcactctatattaaattacctggttttgaatgtaatctaaactatgaaaccttggtgtgtgaaggattgctgaaccccatcttaactgtggctgaaatgtgcctctgcaaaggagttagtacatgctgtagtcttagacaactcactctgctcttcatatgtgcaagtaccttgaatgaaataagcagatttttccttgttacttattaaaaagatgatatattcaatgtatattctggcattgctgtattttccaaaaccgttctaatggattgtgcattatatttcctaattctagtgctgcatttgatacagttcttgggataaatgttgcagtcaagaaactaagccgtccttttcagaaccaaactcatgcaaagagagcttatcgtgaacttgtcctcttaaaatgtgtcaatcataaaaatgtaagttatgtatgtattttgtctgtgtgcttccatattgtcaataatgtggtaatcttcagggttttctggagatacattgagttcagacctaggataagctaaggataaaaatggctattaacattggttttttgttttttgtttttttgtttttttgtcgcccaggctggaatgcagtggcgcagtctcggctctctgcaagctccacctcccgggttcatgccattctcttacctcagcctcccaagtagctgggactacaggcgcctgccaccacgcccggctaattttttgtatttttagtagagatggggtttcaccatgttagtcaggatggtcttgatctcctggccccatgatccacctgccttggccttccaaagtgctgggattacaggcgtgagccaccatgcccggcctattttttattgataacattctttttttttggagacggagtctcgctctgtcgcccaggctggagtgcagtggtgggatcttggctcgctgcaagctccacctcccgggttcatgccattttcctgcctcagcctcctgagtagctgggactacaggcgcccgccaccacgcccggctaattttttgtatttttaggagagacagggtttcaccgcgttagccgggatggtctcgatctcctgacctcatggtccgccagcctcagcctcccaaagtgctgggattacaggcgtgagccatggcgcccggctgataaaattcttaataaacattgaggaaatcaaagctagaaagaggcatcattatggtgcataggaatttaggtcacttaaccaaagtaggaatatcaattgatactctgtttctataaaataggaacagtattgatctaacaaattgagaaacaactaaatattttgtggaaagatgttgttctataagtaggtttttaccttgtatatgacacaccagtttcaaatacacgttattagatgatgttacatttagagtagctattcttggaagctccacagaaatcaaagcactaaattttacggagaaataatgtttctagaaaatgaagttgggttcaatcaagcacattgtttgttctcctagtggtcgctgagcattatgttgataacgttgccatgttataaaattacaaaatgttggccgggtgcagtggctcacgcctgtaatcccagcactttaggaggccgaggcgggtggatcatgacgtcaggagatagagaccatcctggctaacatggtgaaaccccatctctactaaaaagtacaaaaaattaaggagggtgaggtgggagaatggcatgaacccgggaggcagagcttgcagtgagctgagatagcaccactgcactccagcctgggcgacagagcgagactccgtctcaaaataaataaataaataaataaataaaatataaaacgtgaaatctggttttttttgttttgtttttttgagacagggtctcattctgtcacccaggttgtgattctcccacctcagccctccaagtagctgggaccataggcgtgcgccaccatgcttggcagtttttaaaattgtttgtagaggtggggtcttaccaccttgtctaggctgatcttaaactcctgagcttccttcttttgagtctgtggcttgagttggtttaaatttctctaatgcatgctttattttactttttcttttttttttttttttttttgagacggagtctcgctctgtcgcccaacctggagggcagtggcgcgatctcagctcactgcaagctccgcctcccaggttcacgccattctcctgcctcagcctcccgagtagccgggactacaggtgcccgccaccacacccagctaattttttgtatttttagtagagacaggggtttcaccatgttagccaggatggtctcgatctcctgacctcgtgatctgcctgcctcggcgtcccaaagtgctgggattacaggcgtgagccaccgcacccggacttgttttacttacttatttaaaaaattttttcaggttacaaaaaatatatattatttttaaaaattcaaacaatataaaaaagtaaaaactcctgaataccgccacccacagattactagcattaacagtttggtgagcattcttatgcatacatgtgcacaagtacataaacaagattaatcgtgttattcttcatcctgcttttctcctcgtgcaatgttggtagacctcatatactttaatgaacatagatatgagccagtttttaaatggttgcatagcacagatgcacagtaatttatttaagagactgccagccgcctgttgttggatagattgttttgtttctcactgttataagcagtgctgcaatgaacattctaacgcctgaatttttgcatactcgtccaggtgaatttcttggccaacattgtcaggtcagagtacacacacttctagtttaaaatatactgacaaattgacctcaaggaagactattagtttgatattttcattaagagtatttgagaagctgggcacggtcacttcacctgtaatcccagctacttgggctgaggcaggagggtcgcttgaagccaggagtttaaggcacacctgggcaacaaaacaagaccccatctcctaaaaaaaaaaaagtatcagccgggcgctgtggctcacacctgtaatcccaacactttgggaggccaaggcaggtggatcacctgagtcatgagtttaagaccacgttggttggccagcgtggtgaaaccccgtctctactaaaaatacaaaaattagctgggcgtagtggtgggcgcctgtaatcccagctcattgggaggctgaggcaggagaatcacttgaacccaggaagcataggttgcagtaagccaagattgcgccattgcactccagcctgggggacaagaatgaaactccatctcaaaaaaaaaaaaaaagtgtctgagaacgtctgttacttcagaatcccccagcactacatactgttgattttttttgttttgcttttgccaatttgataaataaatgatattttatttttattggtgaggttgttacttatttttatgtgttttggtaatttaatttttatggcctttatccatttttcttttggactgctggtctcttctgcatttgtaggagggttttttttttaaatattaaaactattgccctttacttttttttttccatttgacattatttatgttgttgacatactgattttttatcacccattttttgtttcattttaatgtaatcagatctcttaggtttcctgtcatgtttagaaaagattttctacgctaggattatataaatgtttatctatattctgaggttttatttcatgttttagatttaagtctttgttccatttagagtttttcttggtataaagattgaaatatggatgcagttttatttttgtccttagctaaccaatcaccccaatcctgtataatggataattcatctttccctcagtcatctggaatgactgaggttatgtgtttggtgcctaagccgtgggactcgctgtttacaccatgggctgtgtactggttcgttcccgcactgccataaagagatacccaagacagtgtaacttataaaggaaagcggtttaaataactcatagttgcgcatgatgtgggagacctcaggaaacttgcaatcatggcggaagacgaaagggaggcaggcaccttcttcacaaggcggcaggagagagaaaagtaaagagcaaagtgggcagtgctccttagaaaaccatcaggtctcctgagaactcactcactgtcacaagaacagcacgggggaaaccgcccccatgatccagtcacctcccaccaggtctctccctagacacgtggggattatggggattacaattcaagatgagatttgggtggggacacagccaaatcatgtcagggtgccaggatggaggcctgccgcaggatcagctctttaaccctctttaggtaaaaatatgatgctacgaggcctttcactttatcacaccaaaaacaagagcttagccttcatatttcaaacctttttagaaatttgtgcgtagtatttaagttttcagagttaacatactgctttaatgtctttttacctgtaaattctacttttttatgttcaaaaagacattatgtgtttaaattctgtaataattaagttactagggacacataaaagtgatttgattaaaagtgcatctttcctttaattgatgtttaacttttctcaaatgccatgtaattggtaaaagcagtaataataagaagtactgaattctgctgtgatttttttcccgtcttaatgcatttcaatattaaacttaatttttgtaatcaagtaatctgacatattgaagtataattaattttctcttttcagataattagtttgttaaatgtgtttacaccacaaaaaactctagaagaatttcaagatgtgtaagtatcatttttattcagtaatgcactgtacatcaaagaatgaacatctagaaaagacagcaactgctttttatacttaggaaatgtaggtggcaatacattttgtgacatcacagataactttctctgttgcagagaaatatttagaaaatttgatagttatatttaattatttgtaccacatgggttttcatcttcataacagataaaggatgactggaaagaattcttcagagcagaccaggatcactaatgtgttttgctgaactataaaatgtttttctcaaatccctgatagccaggattttagggttcaggagtttatgagtattacttaaaatgattaagtcactaattctatttaagattctgtatttccagaatcttaagtagaatcatcttactaacagtgaaatgaagtattaatctattgagaggcataatgcccaacttcatcctgaatttattggtgtgttcagtcattaacaaatatctgattgccctctgtgtgctgggcactctctgggacttggcctacctggcttccctggagcctgtcagggaagatagacaagccacatgataaatgaggaaagcatgtagtccattagaatgtgctaggtgctgtggacaaagggtggagctgggtcaggggatcaaaagtgctgagggttggacttgaggctgcagttttaaataaggtggctggggaaagacctccatgagttggtgacattcgaagaaagccttgaaggggataaagaagttggtctggccgggtgcggtggctcacgcctataatcccagcactttgggaggccgaggcgggcggatcacgaggtcaggagatcgagaccatcctggctaacacggtgaaaccccgtctctactaaaaatacaaaaaatcagccgggcgtggtggcgggggcctgtagtcccagctactcaggaggctgaggcaggagaatggtgtgaacccgggaggtggagcttgcagtgagccaagatcgcaccactgcactccagccagggcgacagagcaagactctgtctcaaaaaaaaaaaaaaaaagaatttggtgccgcagatactttgggggcaagtagaatggagatagaaggaacagacagcgctcaggacagcagtggatgcccgcctggtgttttccaagaccatcaagaggtggcgtggctagagatgagggagcaggggaagagaagagggtgaacaccacaagcctctaggccgttgtaaggatgtcttttgctctaaggcaagtcagagtaagagtcttagcagagcagtgagctcacctgccttctgtttgaaaagcgtaactctggcatctgggttggtaacccactataaggggtgggggcatggaacatcagttactgctgttgcagcagttctgttaagggatgacggagggtccatttggcccagaggggtaataggaagggtgagaggggaagagactggatgctgaaatggttctaaagatagagccatggtattagctgatagatgagatgtgtggtatgagagagaggaattgagaatgacacctagatttttggcctgagcacctgaaggatgagggagctctcaactgagatgatgaaggctgtgagaagagcagactgggctagggatggaatcaggagttcagttctggagatggctttaagatgcctgttagacatcaaggtggaactgggaatagggaggcagaggaatgagcctggagttcaggagatatgtctgaattgaacgtaggaatttgggagctgatggcctgtaactgagatcactaagaaagtgagtgtggttacagaagagaagagggtcaaggaccagttgctgggtattttgacagcgagaagttagagacaggacagggcagggcccgctgggattataggactggccagtggatttagcagcatggaagacatcagtggcctcgaggaggacagtttcagcagaatggtggctgcacaaacctgatccaagtgggattaagaaaaaaatgggagaaggctgagtgcagtggctcatgcctgtaatcccaacactttggaaggcccgaggtgggcggatcacttgaggtcaggagttcgagaccagcctgggcaacatggcaaaaccccgtctctactaaaaatacaaaaactatccaggcatgatggctgttttttttttttaatttaattttcagttctgggagtccgaggcatgagaatggcttgaacccgggaggtggaggttgcagtgaggcgagatcacgccactgcactccagtctgggtgacagagtgagaccctgtctcaaaaaaatttaaaaaataaaaagaagggagaagaattggagatagcacatgagacacctctttggggagttttgcttgcaaagggagcaaagaatcggggcgttgctaagcggggagtggggtcaagtgtcctttttgttgttgttgtataatcacttttaaaaacgtatatattgtagagcaatttagagccacagcaaaattgagcgggaggtactgagttcctgtctgtctccagccccttacgtgcagagcctcccccgttctcagcatctcccaccagagggtacatgtgttgtgattgatgagcctgtaacagcatggtctttaggctggtacggagaatttcagccaaaaatgtaagaagtaggaaaatttgtgtttgagattctatttaccatgctataaaaggttgttgtttttttttttaatttttaacttgtaagacgttaagtttgttatttatatattctttggaaaatttttagaaagttccattataccaagttatctttttactttagccagtgcagtgattggaagtaagttacagtttcatgaaatttagtcataaaggaactttggataattttcaaataaataactgaccttttctccctcaggtatttggttatggaattaatggatgctaacttatgtcaggttattcacatggagctggatcatgaaagaatgtcctaccttctttaccagatgctttgtggtattaaacatctgcattcagctggtataattcatagagtaagtggtgatgtattaattttatttttaaaaacaatcatttggttgtcataatcctttacatacaaaataacatttaaaaaaaattgttaggcttgaaaatccaaatagatgatggaatcatatggtgttttaagagagtcattctaggaggcatctgtggagccgcctggcctgccaggctagaccagctgctgtggacacagccaggtactgcgctctcagtcagatactgcgcaagaatacattgttttaaacttttcattttaaagtaacttaaaacttagagaaaaatttcaagaataggacagagaacttccaactaccatttatctacattcacctgtttttaatatatttgccatatgtgaaatcccatttttaatgagcaaggaacttaaaggccaagtagtcagtgagacagctgcttgagaactctctttcttaaataatgacccacatatccatttctcttatcctaaaattctgccgtgccagcttccctgcatcactggtgggagtggccagaccctgcaccgcaagggttcagagcaggcctgtgggctcagcagaggccgggatttgaataacagtgtgactgtactgtcaggaaaaacatttaataagctagggagcgataatataattaatataattctctctaagctgattttacaattttttgttattattacttgtacggctgtgtaagcagactatcatgatagatttttttttttcacaatttgataccaatacttcagtagcaaagaaaatgaaataaacttcttcctgccaaaaaacagtacatttttcataaaaaagaaagatggaattgatgtaataggtgaagaacaattaaaacttgtcaaataaggccagtaagaaaaccccaacagttaacaaaatctgttttcaatgacatattacagaacaattaaaaagctacataaaaatcagtgttacctacttattagaaatacattttaattcacctgtagatccaaaaacatttagacatacagacaaaattttgtattaactgacaaaaaaacccacactacctattggattcatgttgcttaaagggtatctacagaattctcacctcaatattttcgtgttaaataaggtggaaatcaacagtccagagatggtcattagaaatgagccactgacaaacacaatatatttataacttgtataacatttcattcatgtgcatgttttgagcattgtggaatatttaatttgcatcaggctttccaaattccttaaatttataagatttgttctcagtgggagttctcagatgacttttgaaataattattaaaatgaaaatttatttgcaaactactagggtttagatacagaataccttcttgtatttaaagatccatctccagtttgcatacatcatgtctttcaatgtgccggagagaaacaaaggcatccccacgttctttacatttatagggttttttagaaatgagttcttttatgtcttcaagtagaactggaaagactgaagacactaccacattgtttacatgcatagaatttttcctcagtagtagttttgtttcgtattttcaaagggaaatggaagagttccatgtgctttttaatgtgctcagaggtaactggaacatataaaggcatcatcacattcctcatatgcatgttatgtaaattatacggttttcctccagtataatttctttcatgttttcaaagataactgaattaactgaatgttttccccaaatccttacattctcaggatttctacagagtatgagttttttcatgtttacatacaggactggaatatctaaaggctttgccacatgccttacagtcatagggtttctctccagtttgagttctttcatgtttacatagagaactggaatatctgaagacttcaccacattgcaagtctgaagacttgaccacattccttatagtcaaagggtttctctccagtatgagatttttcatgtttacctagagaactggaatgtctggagacttgaccacattccttacagtcaaagggtttctctccagtgtgaaatttttcatgtttacatagagaactggaatgtctgaagacttgaccacatcccttacagtcaaagggtttctctccagtgtgagttcttccgtgtttacatagagaactggaatgtctgaagacttgaccacattccttacagtcaaagggtttctctccagtgtgagatttttcatgtttacatagagaattggaatgtctgaagacttgaccacatcccttacggtcaaagggtttctctccagtgtgagttctttcatgtttacgtagagaactggaatgtctgaagacttgaccacattccttacagtcaaagggttcctctccagtgtgagttctttcatgtttacatagagaactggaatgtctaaagacttgaccacattccttacagtcaaagggtgcctctccagtgtgagttctttcatgtttacttagagaactgaaatgtctaaagacttgaccacattccttacagtcaaagggtttctctctggtatgagatttttcatgtgttcaaagggagctggaatgcctgaaggtgttaccacattttttttttttttttgaaacagagtcttgctctgttgcccaggctggagtgcagtggtgtgatcttggctcactgcaacctccacctcccaggttcaagcagttctcctgtctcagcctcccaagtagctgggattacaggcacctgccaccaaatttggctatttttttttttttttttttttttagtagagacaggatttcaccatgttggccaggctggtctcgaactgctgacctcatgatctgcctgcctcagcctcccaaagtgctgggattacaggtgtgagccactgcgcccagccacattttttatattcataaggtttctctccagtatgagttctctcatgtgtttggaggtaactgaaccgactgaagcctttatcccatttttgacattcattgggtttctctccagtatgagttctttcatgtcttctaagggaactgtgttgactgaaggctttgccacattttttacagttataggatttctctccaatatgtgttctttgatgtcttcacatggagcggggatgactgaaggctttgctacatttcttacatttatagggtttctctccagtattatttcttttatgtttctgaatggaactggaaagagtgagtcttttaccatatttcttaaacacatggaagatttttcacattgtgagctctttatgtctttgaaagtaactacaaaaactgaatcgtttcccacatttcctacattcacggggtttctcttcagcatgagcacctttatggttatgaaggtaaccagaatgtccaaaggctttctcacatttctgacatttataaggtttttccccactgtgagttcttttatgtttttgaaaataactgcaaaatctcaaggctttaccacctttcttccattcacagggtttttctccgttgtaaattactttgtgtctttgaagtaaatagagaaacttaaatgtcttcccacatttcttacatttatgaggcctgttaccagtgtgtgttaccatgtgtctttggacatttgtgagagaaatgaaggttttctcacattgtttacatttgtatggcttcaccccacgtttctcccatgcatgtagtttgtgtccagaatgagataagatgtgcctattaagggatgaaggacatgtgaagacttgtccacacactctgcattcacatgaatttacatcagcagaaattttcttcttcaggttcagatttggaatctggccgaatatttctccacaatgactaccttctttacattcacagagtctttctcccataggacttcataaattttttccagaattattgaaatgactttcactgttctggtcttcccatttgtttccatttcctggcttccaggattctatggcatcctgcttagggatctccaaggtcacagggtgacagtctgtggcagagccacctagggcctcctggcccgaattttttctaaaaaacaattaaaatactgagtgagactagaggcagagataatataattttatcggaaatagatattcttagcattccctggattattactatactaattttatcaacagattgccattagattttatgttccaacagcaagaggtcatctttttgctgaactgaaatctgtggggaagaagctagtgagagacaagaacagcagagcctgttactacagaaataagcagatgggttttagatggtggagtggtaataattttttcagatctcttttgccaggaaagattggttccatcacagccattgaaggcctcccttgggggtagagcccaccgacccacagagggcagggttgtctcgtctcaagcctcaggtctgtggcccaagggcagcgtcagggatagctcttgtcctcccagggctagctgacagcctcccatctgccatctagtgtactgttttttaaaatagaacctttgctgccatcagatggtcagttaaaataatatattggtgactttgctttaaaaatagtaacactaggcttctgaattaaagatctcctgatgtaccattctatttctgttcctgaagtttccacagaccttcatataatttaaggtactcttgatatctcttaaatacattttatttatgctttagaataatttcccagattattagtcttactacattaggccttattcattttataaggggaaatggtttgtctgacttgttcccccttgggccccaaggtaagtgggaaacaatggcctcctgtcactgggggctttgtgagagctgcagcgtcggcaggccttttttatggaatagccggtgcctgcagcctgagtcagatggggcccaaaggagtgtttggtttgcccagcacgaggtatagaaacctaagaagccttcagaaaatggccctgttgccatccctgcctcctgctcaccatccccacccacctggcatcttgctgtgtcctctcctccctgtcaccttgttccctgctgcttcccacatccatggccttgccaggctctccccacatctgtgtccatgtgggagagtgatgcatgctcactgtggggaagttccaaacattgcacaggtgtataaagcaaagggggaaactccctcttgccccctgcccccctgccccacccctgcccacatcccaggaagggaggagccctaagttaactgttctgtgtggactgcaccatcctttgttccatctacagtaccatgcacagagatagacacacttttaattttgcctattaaaatggtttaatacaaaacataaattttaagtatttgaaagataaagttttgcccatgatatcccaccgaagtatatactttatataattcaaaaaatgaaatgcaagtaacccagccctctgttagcacctggagatggccagtgagagcacgctggtgcatgtcctgcctcactctgcatggcacctctctgttgactgatgttaacaccagcatatctgtacttatgtccttttgaacttacatccttcaaagacaggatcaccttgcatataactgcgtagcaacttcctaaacaggtagcttggtttgtttttttaaatcaaggatcaaatatttctataaatatttatgaaaaacagatacctccacctctccctttatttctctctccctagaagcaaactccttcagttcatttagctgattattttggtctctatttccatattgaaataatatgcttagctctttcttcattgatcctttctcagtttggggcataagatgctgatttagcttcttaccaacccagccctcaccctcggccttcctcgccctcctcccaggctggtggatgtgatggtgtttggctcgttgcgtcatcgtgagcgtgtaaatgctttgcacagcagaccttcccctttcaccttttgttccctggagttaacaaacacttatactctatttgtgtgaggtttttgtttgttttggggggtagtttctgtgttcttggtggtaattcaaccctaactcttccatcaggcatctgaattttctctcagcacatgtagatgtcttgggtatttcatcagtttcatcttctcaggaacctctcccaagcctcagccctgttcccctttgcactggctgccactgcacctgctcgaaggggctgtcctggatctcccttggtgattttgtgggggtttccttcatctgcctcccatgttggattccttgcttgctgtccttgtctctcagattacccccttgttttggtgggacgcatcctccaaaagcttcctaaattgccacaggggagagaaattttttgaggcctcaaatgtctgaaactctttattctgccctctcacatgatgagtagtgtggttgtgtgtagatgtgtgtagaattcttagttacagatcagttgcgctcagaatggcggaggcagtgcctgtggtagcaaggcatctagcatggctccggagtttcttagtgccatctgatgtttttttagatggagtctcgctctgtcgcccaggctggagtgcagtggcatggtcttggctcagtgcaaactctgcctctcgggttcacgccattctcctgcctcagcctccctagtggctaggactgcaggcgtccgccaccacgcccagctaattttttgtatttttagtagagacagggtttcaccttgttacccaggatggtctcgatctcctgacctcgtgatccgcccgcctcggcctcccaaagtgctggattacaggcatgagccactgtgcctggctgatgactaaccttttttaagtgctgtggttttgggttttggtttggttttatctctggaaacttttaaactcagttatttattccttgtattctgagatgttttgatgtatgccttgatgtgggcattttttctttagttttgctgggcacttggccttcagtctggaagcacatattatagaggtctgagaaatttatatcatttctttcagaatgtcctcttaactccattctttattctttttctctgaagcacgagttaattgacactcatttgctcttaaaagttcctttttacagcattctgttcttgttgcatgtatatactatcatctctgaggataagcttttgttgaagggttttatcactccctgcattgtctttctctactgagagttccctttttagtgtgttaggtccctccctgtcacacgcaaggctttccccaaatgtctggttggatcatgtttaagattgaaacattaggccaagcacggtggctcatgccagtaatcccagcactttgggagactgaggcgggcagatcacctgaggtcaagagttcgacaccagcctggtcaacatggtgaaactctgtctctactaaaaatataaaaattagctgggcgtggtggcaggtgcctataatcccagctagtcaggagactgaggcaggagaatttcttgaacccaggaagcggaggttgcagtgagctgagatagtgccattgcactccagcctgagcaacaagatcgagacttcgtctcaaaaaaaaaaaaaaaaaaaagagattgaagcattaaaggctgactggaagtactgagtgaatgggtaaattgttaaagaatgggtgtctcttggaccacaggcagccacaggtgtcaccttctgtaggttttttctctgggcaccatttaatttctctggaaaaggccccttcagtcccttggtggagggatgtaagcctggctgctggggtacagggctgtgcttctcatgtggcagagcgcaaactcaccaggcagccctgttgcaggcaggcctcaccgtgccttccctgttggtacccacaggactgtgcatgcggcgcctgtggccctgcacctggaagctgggcatcagtttctctgcgtgaagggccagcaggagtgaggaaggagtggagcctcacttctgggatggagatggggatctgggacatctactacgtacttggactttcaataaaatgaaaacttctccaagtgctacccttgcctcttctgcctccatagcacctgcatttcacttgctgagcctttcctgggtgtcgtggccatttatagaggttggcatttccttcgctcagctagggcatttgggcggccctgcagcttcctgtccctgtagcgtggggcttttcgtgggcggcttccgcatgccacggtgggttagacaggcgagggactggccgggaggaggcctgtgcgagaaggaagggggagcagccagaggaggcagcaaatgctagctgaacgtagtgcagtcctggcccctcagaggcctggtccagactgcggtgcagctctgagggcctccggtgtcacacaggaacgggcctgcctcagcatccctgcccggtcggcccctggctgacggctctgtgggaggtgtgccctggcagggacagagggtaggtgcagacaccacactgggccatctgtcactctcactcctgtggcgggagaccaaggagtgcatttccgtggaccccacagtccaccctggccccctcagctctacttctccacataagttgggaatggctttcctgtggcgcccatggttctctcttcctcaggggaaatctggaagacagaggttagtgggacaccctgtagtccctgtcactgtggtctctctgctggctctttccctaccctttcctgttattcataccctcagctctcacattggcaggcctctgtggcttgcctggcctgtgtcccaggccttcattcctgagccgtctgtgtctggtggctctcagtgggccacagggtcccaggccacccagtggccgtctccccagtcctcagtgtgtagccggagcggaggcgcttggcaggtggagtaacgcccacacgagttccttggcctgtgagtaagagtcgtcacagtgggaaggccaaatggaaacctgaaactgcccccaagatagtaaatcaaaaacaagatcacaccctgcagggcccggggtgggtggaggagactagggccaccatggaagcctcaggggagcagagacagtggtatcttgcatcccagtctaactcgttagtccagcccttgaagaagctgcatggattctggagaatgaccccagacggccacaggcttacggcactggcagtcctggccgcagctgctgtgcatgtcaaggtgcagttgttgctggagcagattaataaggcctcaggtctggcatgttgatggggcaaatgcatcctccacactgattagaagagaggcccagacagcgcccacactgctgcaggctggacagcaatgttctctcacagccttgctctaagcctttgctaacgttcccaccctcccataacatggccgcaagagacctggcccagacttcacttatgccctgacccctgacccctgaccccacgaaccctgcaagtggaggagccctgagagtgtttggggtcttcgggtttcagtgtctacttagagctgtgtccattcatcctcaagagtgcctggctgttcttacccggtgggtggccacaggtacctgtggggaaggaccggcaaggccagacagtggacacctgtcatgatgtgctccttcctgggatacctctcaagcagtgggtctggatcccagagttgagcgggcagtgggggaggtcagcacctgccccactcatgctgcgggtgctgtgggtaccctcactgctgcccacagggtagcgttgggttccaggcattttgggagccaagccccgatccaggcgtcacttggatctgtacttggcatttgtcttctttgttctgagtgattttcaagacttgaaggggcagaactgtctttcctctgctgtcttgaaattgaagtgaggtgttgggaagctgcctcaggttgtatttcgggggtgactagagagggtcccagggtgcggggagagcacctccttagccacctccccattggccacacagagcacccacacaagcttgggactttatcaccacagtcttccagcagacggcagtaaagtgtgcttttcctgttaaattagtatgtgatgacagttttttgacagatggcagtgtcttcagatgagcgtgtttctggcgcactggggttcacagagctggcaggcagcccgtggagatggttccactgctgcgtctgtccttggtagaaccaggctgtccttgtcttccttgctcctgcggccgtgctgttagttctgggtgggctgggcttcagggcctgctggctggggaagtgtgtgcatttcacacctcagaaatcagcctcctggagagaaagtgcccactgcacaccctctgtggcctgaggaagcgcctgtttctgcttctcccgccagcaccgagtctgcttgctttccatcgctgccaagtgatagactaaaaatgggcattcattttgggtttttaaagaagatttttgtgagattgagcattattttatctgttagtaatttatgttctaaaatgcctgttcttgtcatactctttgattttaaaaaaggaaacaagaagcgaattcgttcatttggtcttagctccctgacttggtcctcacagcggagcgtccctggttgaatgtgggctgcttctccctggctttccttcatgcagggaggcagcccggtttcttcctctcaggcctttctgggaaccgggggtgtctgcacagtactctaaggtggaatggaggggctgggggcctctttttggggccaggtagagattgtgactgcatttttaaacattatatgtttatcatttaaatcttacagaatctaggaagcctagaaacaggtcacttagcagcatggcagtgtaattgtacctgttgtcaatgtcgaaatggcttcctgcttgccctgatgacagccccacagccttcactgaggcatgccgcctgcaaccccccttgtggcccatcagttggggtgtcttacaggcaggtgctaggcagtgctactgaacctgcaacttcctgggtaaagtatcctcatgccttacgccatgtcagtggcttggcagtttgacattgcaggtgcactactcttgtgaaaagaatgggtgtgggttgtttacaagtcacagtttctcaagtgagtttgcaggccgaagtccccaggcaaaagtcaaattcctaaggcctgaggaaggggctagggtggaggatcagcaggaagaaaatcccttagttatgagggaaaaggttgcagaagttgtgttaaggctttgcaagtcaggtggaatatgatgcatgtcttcattctgcagacacttcccaagtgtctgctcgcgccaggcgtgcttctgagtgctgagagctcacacagagtcagcactggggagggaagagaggtggcaaccagaacatgagcaggtgagtttttgtgccacgtacagatggagacagcagcaccagtgctggcgtgtctttgtggcgaaggtgagaagattggaggtggatgatcatggaattgctcttccaaggagagaaagagccatgggaagattccaggatcagacgattctagacctgtgctgtccagtatggcagccactaaccacaggaggctgtggagcactcaggatgtggccgtgctgcagttgtaaaatacatactggacttcaaaggctcagtactaaaaagagaatgtaaaatatctcagtatttttcttatgttgattacattttgaaatgataatattatggatatattgggttaaaaaaatatactgtatgattaaaattaatttcacctatttctgcatgctgttgagcatggctagtagaaaatgtaaattatacacatcgttcgcattatatgacattgtctgtgggacagcactgccctggactgacagacagcatgaggaccttagcaagagagagtcagagtattggggaactcaagtccaggcgtggagagcaggagggggccgtgtgtgctggactgacagcatgaggaccttagcaagagagagtcagagtattggggaactcaagtccaggcgtggagagcgggaggggggcatgtgtgctggacgtgtagatgcatggatggagggtagataggacagcctgagggcctgcgagaccacagaaagggcaaatgggggccatgaaggtttccactgggggtaaggggcaccatctgacggctttaggctgatttgttttagtttcaatttgagagtaagattttccaaagttgttcccaaatctcagagttcagttcactccctacactctcacactggcttcacgaccctcacggatgtgaagtagtttatttagcatgcttcattcattttactaatttaagccatttctttcctaggatttgaagcctagcaacattgttgtgaaatcagactgcaccctgaagatccttgactttggcctggcccggacagcgtgcactaacttcatgatgaccccttacgtggtgacacggtactaccgggcgcccgaagtcatcctgggtatgggctacaaagagaacggtgagtatagccggggctggaagaggctgggatgtttagaaattgctctagcggtggtctcgagttttttctctttcctttgaaccatatgatatatactgtggggactgttacacccagaatatagcatgatccagagataagaaataattaattgtgtttttccattggttaaaatcattctcttttaaaaattcacttttaaaattgttatttttgaactttttaatcagagttaagctgtctatagccaagtgtgcaaatcctgagtgtgcagctcagctgaggtgagcacacccacagcagcagcagctctggcctccccatggcccctcctcgcagcccacgaggctggccaatctcctgatctccagtaccatggatcagctttatttgttggtctgcatattgtttttttgaatttgatgtaaatagaataacacatgttttcatgtaaaattggtgtctttttacatcaaaacttagcttattctagcaatatcagagctctttgaaacttggcttttagcaaatttgttgaaaataacgaaatcacgcttacttatttttaaaaagactgaaagtttgcccgggtcatctgaaatgagttttgctacaggttcatcttgctgcgttgtagcttgtgttcccaccctgaggggcacagcttcatgtgcttcctgtggaggggagagaaaacttgatcccctgttcacttctcccctcggcccgccagcagggcacttagaggcctctgctgtctgtctgaggccccacagatgagggtgggcaccgtggaagtctgggcccctctagcagggcctcacctgcagtcctgcaagccagccagcctgtgccgccagtgagtgctgctgcctttctgacggggcagtctagaaaatgatcgctcaggaggtgtggtatcaacaacgcacagaggctcccgccggcaagctagtgacgtgtaccgggtttgtcctgggagggggtttgaagaaaaaagatgggggactctagctggtttttaatcccctggtgtttggtagtggacatctggtctgtcgggtgcatcatggcagaaatggtcctccataaagtcctgttcccgggaagagactgtatccttcacaggggacccggtacttggccatggaggctggggtgggcgtgtggccctgaaaagctttgtgttcacaggcacttcttgtttctggttttttgtttgtttgtttgtttgttttaagctataaagtattggactctttggcactaaaaccccagattgctacaaaccgaaggctaaaatagaggtcagcaatcattcatattgtgtaaaatgtcacccttagctagcaatttatttttccatatttgtgtgtttagtgcactgttagaattccttttcctcacttttgttttgttcatggcacttcataattttatcatttcattttattttcagttgatatctggtcagtgggttgcatcatgggagagctggtgaaaggttgtgtgatattccaaggcactgaccgtatccttccccgcgaccttggccccgccatgctttcttaatgcctcaggcagcatgaccacctgcttacacgagcgctcacgaggacaaagtcgtaaaatccactccagactgtgttctaaggggggctttactgtatttgttaattagtgtcacaagccaagtggttcaatttcattctttatttttaacttgactacctgtgatgactttgagacttagagttcagttaaaccgattatattagctcttaattttgccaaaaatagctggacacatagaagaaattatttactctttgataagtatattctgatatttaaatgaaaatactgtattatttagtttattccgttaatttaactaggaaagatgctatctaaatttaataggctagtgtgcttgtgtgctttaattaagtactattttgttagttactggtatgcattgaaatattttcccccaaagtaagaactgaagcacattacaaaggacctaagtgaaagagattaaaatgaaaattttgtgaggaacaatatgttaaactttcttgtttgttactgtgctgacattttgtagaattttttttaaaaatctgtctagtgggttattttgtgacacactggggaagtcaaaataaatgtaaaatgaaagagataaactcatactgtagtcagcaagtcatgttagagatacagcagaaaggagaataactactctaattgttacaatagccttctttcctcatttgccattcttccatcctcagtattttttaccctaacatggttcttcacatcttccctttttcatttgtgttttaaccacttagtttttcattagtctttgactttgttttcgttatgaaagtttaaattggtctccatccttgggcagattgatggttgcttttaaggaaatcaagctccatagtcagtgttttgtatgtatcttaggaaaataatttcagattttaataattttatcaaagtggtctccttataaattcttcacagtgcaaacttaaagtgaaaatatttttatttctctcattttatttacctttctttacattttctatatcatagattatataatatgtcaagttattttatttgttctactaaattttctagcagtttccatagcctcatctcagattcacttgttgcaacctataaataaggacgtctttattttgcaagtaaacttaattaaaaagggaaaagttgaaaaattaaaagactaataatttagaaatatctacttaatgttcagtttgtctcaattcttactcattttgtgccattccttgttttattacaaaatgttttcttcaaaaagtacaaaaatgaaaaatgtgagtactttttggtgcattttagtaagtaaaattaaaattcctgctatacatatgaacattaatgtcagtaattaatagtgttatatataaggttacctaatgttattcccaaaagccacacagagtttaacatcattttctaaagaaaattttgccaactctttcaaatattagattgaaatttgggagatagaaaaaagttgcagaaatcagactgagggtctcagagatttgctttaatttgcgacccagggtagaaaaggaactcctgtccctgcggtggtctatgagaaagagaaagctttagcccggccacctcgggccccagctcagactcctccccttggcagccatgcatccttgagaaatttagggcctctctgagccttggtttccccttctgtaaaatagacctgtggtctgcctgcagcttcacgagagttagacaacagggtccactgggcttgtcggaattattgttccccttcccccgtccctctcatctgtcccccatccctcccacctgtaggatgctggggtggagtcctctcggggaatctgtgggtctcctctcacaactggtttaatttctagtcctttatcattaacccagcagatatttctctcacctgcccatttctgggtgcctagtctgactgagatgcaaagaggctcctcccagctgctgaattgagggtggatcgtcaagggcagggcagagcaggagaacagagcagaggctgccatcatccagaggagaggtggaggcccccagcaggcgggtaggggtgtggccggggagatgggcttgtactctgctttgaagctggacccttcaaggagccttgctagggtttggagatgtctgttagacagtggaatttaggggcaaggtctgggatagagagatcaaagtgggtgtcatccgtctgtcggtagccttgaagcctaggactggtagcgagcacttgcaggggaggaagagaccaggacccgggacttagcccccttgaggtggagggacaaagggaatagggaaggaaatggagaaggcactcacgtgacccctcctcctagagtgtggtgactgagggaggctcattcacatgaggagatgaggacgggggattggcccctgggccttgtgatggctgctggcagccatgatgggcacagcatttatggagtggagggaagaaagcctgatgggagtatgtttgagagaaaatgagaggctgggaattagagacacaagtgtagacagctcttttttctttccttttttttttttttttttcctttgagacagagtctcactccattgcccaggctggagggcagcgatgcgatctcagctcactgcaacctctacctcctgggttcaagcgattcttctgcctcagcctcccgagtagctgggattacaggcgcccgccaccacgcctggctaatttttgtatttttagtagggccagggtttcaccgtcttggccaggctggtcttgaacacctgaccttgtgatccacctgcctcggcctcccaaagtgccgggattacaggtgtgagccactgagcccgaccgacagctctttatggaagtttttgctgcaaataggaataagaaataaagcgataggtagggccaaaggaaagcagctactgtgttaacataggagaaaacaccatcatttaccaacgtggtggaatgtattggtagagtgcaaaatgtcgatgatgttggagaaggaagagttgagggagcttgtccttgagtcaggggggttagggtctagagctgagcaggcttagtgtagccgggagcccagatggttgctgtgtggcaaatggcacacagatgctgggtgggtgcatcctgggaagtctgtgggagtgagcaggcagaagaggtatcaaaagtataaggtgggctgggcgcagtggctcacacctataatcccagcactttgggaggccgaggcaggcagatcacttgaggccaggaattccagaccagcctggccaacatggcgaaaccccatctctactaaaaataacaaaaattagccgaccgttatggcaggtgcctgtagtcccagctacttgggaggctgaggcacgagaattacttgagcccgggaggtggaggttgcagtcagccgagatcatgccactgcactccagcctgggcgacagagcgagactctgtctttatttatatatgtatatatggcagaaggaaaaggtgtgagacagttttcacattttggctaaataggtaaataaaatgtgggcataattctgatttgacaatatgtatgaaccaggagtaggaaggagaatttgctagtgaattgaatgccagaaacacatttcctgagcgggtcttttggaagtataacattttggaagaactgagttcatgtaccagttccctaggttatttcatggtgatgtaagttcatttttctaagacatgcctcagtgagcacttttttaagctgctgttgatgctatttttttctcacttgcattctcttgtatagcgagtacagtttcagtgtcactttcccacatgtaatcctaattatcccaagcctaacaagcaccctgtggaataggcaaagctggtaatgtctgcattgaacaaataaggaaacagaccccaaggaagcctgactttcctgacacactgagtgtttaatgcagagttgagtctgaaacccaggtcacgcactttgaaaggaaataaaatgcattacctagggatcgcagtgatggttgggaagagtcagttccaagtaaaatagagcatcatttgaaagctgtcgctgggctcagtctaagcccagttgcttggttcccagctgtaaactgaggaggtcagataggtctctccacaggtcccttgagatcctctgttctttagagagctgtgaatgaatctaaggtagcattagtatgaaaactgatttcaatttgcttatgtaatgtttatctaatttcgtgtttaatcatttttgctataggtattcttagttataagataaactttattttgaactagagtgggaaggtgtgtagacttcattgtgttgatttaataaactgtgatcatagtttatgaagatgcagagtgtgagagttttaaaaaatagtgtaacttggaaacccaaaccttatttgaatattatttcaaaattccgctgctgatccagtggggtggcctagtcgataggtttaaatattattcaagtgatgctgccgcatgtactgtgaatacaaggtacttcagttgtattttcctcaagaaactccttagatattgatcagtggaataaagttattgagcagctgggaacaccatcagcagagttcatgaagaaacttcagccaactgtgaggaattatgtcgaaaacagaccaaagtatcctggaatcaaatttgaagaactctttccagattggatattcccatcagaatctgagcgagacaaaataaaaagtaagatatcctttttttcttatacttgtgttttgtaattcaggtggtgctttcactctttcatgtttgtattctaaaaacctgtgttttgggagagaaagtcattttaggcctgaagtctgaggtacgaaggcactgaggagagaaagcttaaaggtctagaagctttatcctctataagacggcttaattgaagcctttggccaaaataaaaataatcaaatcagtctgaaagaatcttatgttacagttacagcaactggaattcaaaaagttttcaggtaagaagaacacttaatgcagattctagagtcagaagcgatgtgacagttgttcgatgaaaaaggtccttcctccccaccttctcctgcaccctttactacagtgtgattgtttaaggaaaaagaaaagatttgattctgtccgcatgaaggtaaactgtgccttaatcagaaaagccccagtctttgcttattcaggttgtgaactttaattgacaaaacctaggtgagccttatatttaactaagttattgaacttgtttttctttttcctaaataccaatctgtagattaaaaaaaaaagtgtaagttgccagcactgtatacagctaggccagccagaagcatctgtgagtgttttatcctgtgggaatgtgagattgttgtgtggtttgaaaagtctgttctaatttcatttcgatgtgacttagagaaaaatactcccccgtgcctcatgcccacactctgggcagtgccacccgcagctcggcaattgccaccttccttgctgtggtttcccagccttgggccctgcccagacattggtctgaggctgcctggtgctcttccccaccaccctgggagcccaggtttctcttccccttgcagatccagaggcgtaaaactacatttggaaacctggtttgtcatgaaagtggacatttgactttttcttaaaaatgtttgggttatggctgggtgcggcggctcacgcctgtaatcccagcactttgggaggctgaggcaggcggatcacgaggtcaagagatcgagaccatcctgcctaacacagtgaaaccctgtctctactaaaaaaatacaaaaaattatccgggcatggtggcagacgcctgtagtcccagctgcttgggaggctgaggtaggagaatggcgtgaacccgggaggtggaacttgcagtgagccaagattgcgccactgcattgggcgacagagcgagactccgtctccgaaaaaaaaaaaaaaaattttgggttatattcatcttgaacctatcaaacatttctcaaaattaatatatctttgttctatctgtgttgtcatatttagttctttattgtatgattctgtttgtttcatattaacagcattaatttaatatttgttgtcaccctagcaagtcaagccagagatctgttatcaaaaatgttagtgattgatcctgacaagcggatctctgtagacgaagctctgcgtcacccatacatcactgtttggtatgaccccgccgaagcagaagccgtgagtatctgttttgaaaagatttatatagagaggccaggcttatatttccttggatcttgtctgtccgtccagagtggctacatatgggtagcaagttctccatttgggggctcccagttacagaaaggccaagtgttgtctgagacctgggtcgcttgctcttttgctgctggagccccagctcagagtacctcgggaatgaacttccgctttggtgctaccagtctccattttgcaaatgctgctgtgagctcatagtttattaagcatctattctgtgccattggctttggttacatcctcttgtttaggccacttaaccagagaggctgagcaacttgctgaaaaatcacacgtctgtttatccttccctaaaggcattgtagctcctggttcccccgctggaggagctccactctgagtttggtgctcacgtgcgtgtttctgtgtcagcactggtgtgagtgagctttagctgtgagggaaatcactgcgtagtggcaggcttccttcatgccatgagtgaaatacatgtttatgtcatggcctgtggttttgccatcagtttaaacattgttttatataaaaagaatccaatttataagcagacttttataacagtccatttatgagttggacattggatttgggagttctcccatgaagaaaatgtaaaatttgttctaagaaacaacagtaccttccatagctgccagcacagtgccttgtccataatgggtctctgggaaacagcctgtgatgatgagtttctaatgacatctgggcagatgtctgcgttttgaggtcaggtgattattaagaggaacataataactcttctttggttaactttttcataattattttgattctaaagttgatataatatcacatgacaaatctttattaaaccacgtgttgaattaaactaaatccatatcataaatagactagaagtcttccaagcaattttaccttttttagtgcctcatttttttttgaggcattactgttgactttacatatgatttaatttttagccaccacctcaaatttatgatgcccagttggaagaaagagaacatgcaattgaagaatggaaaggtaaagatggagcttattttgatccttccttttgacatttcttccaatcctgtagagcagaggcttttcattttgtgacatttcccttcaggaaggggcaagaaaccctgcgacccacttagcctctttctccccagtttccagtagaaaatgaacttgaagagaacagagttagagaggaacatttatgaatttcttatcatttgcttcaagagggaaaaataatatttttttcatggcttttcacatattgatttataaactgagcttagtaattgtatcatacttatattgattgatatgtttttaagccatgtagttgtacatatgttttaaaatctagtttgggggaaattgcagattgaaaatatgcaaataggtattattaccactataagattaaccaaacaacccacaacaaactatacctgtaatgaagaggttgaactaacaatttttcattaagaagcaggatcagtagtaactgagaaccacagtcagagtcagtcaacactgatgagggtcatgccccagggccatcctggggtgtgggagtgccggttacctgtgtgtgcccgtgctcagcagtgcatgcacacagcgtgctcactggcctcagtcaatgctcactggcctcagcgaatgcttgcaacgtgctaatgttggtttatgaatactgacattttaggaatccctcatcacttacttcgtaggtaattagtttttcttacagatgaaagttgaggaaaaccgaagttgaaattaagaaaagacttaggcctgtggattcatttctggccagtgtggggggctcctagcccacatgtgggtgctggttacctttggagaaccccaagtaaccacatagagaaacatattcaaatgggtgtgagaatatccaatcccctacagtgttctgtgggagccactccacttcataaagcccccttatggatccagaaccaccctacatgttttgctgccttactagttgcattgaaaaagatgtaatgtagtccaggcgcagtggctcacacctgtaatcccaggactttgggaggccaagtggggcagatggcttgaggccaggaattcaagacaagcctagccaacatagcgaaaccctgtctctacaaaaactacaaaagttagccaggcatggtggtgaacacctgtaatcccagcaatttggatggctgaggcatgagaatcacttgaatccaggaggtggaggtttcagtgagtcaagaccatgccactgtactccagcctggatgacagcatgagactgtctcaaaaaaaaaaaaaaaaaaaagaagaagaagaaaagaaaagatataatgtatcaaaatatgaatattttggtccaggtagactatattactgaattgactctgtcttacaattaaaaataacaaatcgcaatgcctttgttccagttgatttggaagcagagtttagagatacagtgaaactgtttagaaactgattaagcattttaacttgtatttttattaaagagctaatttacaaagaagtcatggattgggaagaaagaagcaagaatggtgttgtaaaagatcagccttcaggttagtgattgctttaattgattgtatgatatttttctttccctattcaactttttttttttgagacagagtttcgttctgtcgcccaggctggagagcagcggcgcgatctctgctcactgcaacctccgcctcctgggttcaagcaattctcctgcctcagcctcccgagtagctgggactacaggcacgcgccaccatgccctgctaatttttgtatttttagtagagacggggtttcaccatattggccaagctggtctcgatctcctgaccttgtgatctgcccgcctcagcctcccaaagtggtgggattacaggcacgcaccaccatgcctggctaatttttgtatttttagtagagacggggtttcagcatattggccaagctggtctcgatctcctgacctcgtgatccacccgcctcagcctcccaaagtggtggggttacaggcgtgagccaccgcacctggcgtctttcccgattcaacttttataaatggcagcaacatgtgaaatgccagcctggctagcatcagatttaaaaaccgctgtatgaatagccagcctttttggcttgtcatagtggtggtggtggtggatgacattttactgatgtgccaggcactgaactttgttataagcatttctctttcatctttgcaataactgctgtcacctccatttacagatgaagaaattgaatttaaagccttttcaatgttgataaccctttgtactggtcccacccaaaatgccaatctaagtaaaatggagtatggtattctttttgagaaaattgttgatatcattttcccatttttctgcttgatctactgatcttcatagtggtggaagcctctaatgaccaggtagttgtatgatcatgagactctgatatgagtcgtgttcacttacgtctgaaggattcttcctgtttactaaatgaaacgctcacgttatatcattgtctctctcccactcccactgggaagcatgcacacacatgtgtgcggatgtgcagagagcacagcttactttttattcttgaattttatgttcaacatgacgtatgtgtcaagcatctagagattatataacttcagcaagaacttaggtgcttgttaactgagcacacacgtatgactgcagacgtcgatctcagagagtgcatgttgtgtttttattcaaaccagactaaaatatggatagtaggaagtaggatagtttcatttgctttaaaagattaaaatgtcagttttctggagttataaaaccataaaatatacaaggccactaatttttttcctttttctggtatatagtctttatttattgcaaaagatttctttgaaagttgatgctttttttcctgtagatttagtgtttatgttataaattgttacaattcaagtgtctggtgacactggaatcctagtcaggcttaagcttttgtgatactgcattttcagataaatatagctgtgtccttttgatgtctgcttgaaagcagcaggtattttttaagtagctaacatgattatacatggccacatatatgtttagctactgagaaaaaaagaagaatcttgcaaggaaagacataggaatatgggactcttggcccaaagaaagactcaaggaaaagttcagaaagtccagctgactgacttcttgtctatactcatagttaggattgggaaactgcaaaaggacagagccgagaaatggcctgcagtctcgctgcctggatttgcagcaatgtcgtgcctcagattttattatatttggttttcttagcacagatgcagcagtaagtagcaacgccactccttctcagtcttcatcgatcaatgacatttcatccatgtccactgagcagacgctggcctcagacacagacagcagtcttgatgcctcgacgggaccccttgaaggctgtcgatgataggttagaaatagcaaacctgtcagcattgaaggaactctcacctccgtgggcctgaaatgcttgggagttgatggaaccaaatagaaaaactccatgttctgcatgtaagaaacacaatgccttgccctactcagacctgataggattgcctgcttagatgataaaatgaggcagaatatgtctgaagaaaaaaattgcaagccacacttctagagattttgttcaagatcatttcaggtgagcagttagagtaggtgaatttgtttcaaattgtactagtgacagtttctcatcatctgtaactgttgagatgtatgtgcatgtgaccacaaatgcttgcttggacttgcccatctagcactttggaaatcagtatttaaatgccaaataatcttccaggtagtgctgcttctgaagttatctcttaatcctcttaagtaatttggtgtctgtccagaaaaagtcgatttatgtgtattaattggccatcatgatgttatcatatcttattcccttttatgctatgatttattctatcttttgtatttcagaagacatataattaaatctatttaataaataaaaatatatagcttttcttagatttgtgatgtttggggctgagaattatcacggctaaaaccaagacacttatgtggacatcttgttttctttaaactgtcttgtctgggatgattgtacattcagctttactgcacgatacaattttaagttttgcttagtgctgcttgaaatcctagctaccttatctcttttcttcttggtcttctagacttcttatgaatttaaaatgctacctagaacttcaccttctttattaggtgcgtaacactccatcttaattaaatatgatggcagataggttcctgcatccatggcctaacgttggagtggaattttacaaaatgctcactagagatcactgcagtcatttcctaagtgcttcctttgccacagactggcctgggtcctttatttaccttccctcattcactttccctcggccaataccacgttcttgattttctttcttcactggaagaaagcagataaactcctctttggtctgttttcagaggccaggctgattcagatgcctgttgctattgttgctctccattgttgggaggcattccttttcacaagaatgttctgggaaactcttcagaggacgtgaaggaaataccctgaagagtcatgattaactattgactattttctgatttaaaactgctcacctgaaattgatacttttagactttacgatcagtaaattattcagaattcatgaagatgctgagtatgttaagtgtcactgcaggaacggagctgtggtgatcacgttttgcctgcctgtgcccatgtctcttcccttgagcttattctgttgctgattcatatcttgtgttcaattattttggaagcttttcagtcgacattctgtagagtgtgttctgaggaggaactgtgataagaaagtttattataaatattatgtaaaatatatggctctctctgcaccagttatatcttattggttggtcatatcactggaaactggaacctttgattagcaaaattaatattgaaataagaaatagttcttttatattgtgtcatttggacactttcaagtacaaaatggtaataataacttggattgaggcggaaacacctattttatggctatctatctaaacatcttaaaatggccttctctgtaatacactttcttttaaaagacttcactaaatctatctttaaaaggaaaaacaaaagggagaggttgaaaatgcgcgagctgccctgcactgtgtgatgctccctccccgggagacgtggacgggggacgaggcacccgcagacgcccttctgctcactcgctcctctgtgcattcagcgagccacttgccacagatggagcccgtgacggtgtggagggtttcctggaaaggccatcttccaccaggtagaggcgagcgtgcctaggacaggccacagggctccacagaaatacctcaccccagcttcagggttctctctcctgagcctagatttgccagggtcttggtgccacgcaaatggtttcaaactgatctctatggataaatgctgatgttggttaaagaactgaaaaatgtgctcaactgtttcatcttttctattttatttttgtaatttatattgtacacaacccaggaagtaactattttggacatgtatttttataaaccaggtaatttactattatcctggaatttagactaggtttgtttcatttgttgacttagtttccagccaagaaggaaacgactgtctcccccatgtccaggtctcagtttcaagggcagagtccagagagcagacagagttctgtgagagcaggagagcagtctggaaaccctggctgtgcataccgtgtcagccgtgggcctggagatgggagcaggtgagacgcagagccccagtactgagaggaggaagccctcttacagggccccttgcccaccccaagtccgtgtctgaaacacggagcgggtgctgcttcaacccgcatttaatgctgtgtaagtagcgataaccacgtacgagtctgtctggttgatttctaatgtgactcctctggtatttcctcctggtaataaatacaagtgtgacctttcagattgcatatctcaaaagtaacattgctaatgttttataataaaatatattatgtgtgttttggttggtgaaaataatacagactacattttaaaagataaa

SEQ ID NO: 39 - DNA, 59016 bp, Pan troglodytes
  variation 321..897: note = n is a, c, g, or t
  variation 6078..6841: note = n is a, c, g, or t
  variation 39197..40139: note = n is a, c, g, or t
  variation 41989..41998: note = n is a, c, g, or t
  variation 42895: note = n is a, c, g, or t
  variation 42965: note = n is a, c, g, or t
  source 1..59016: mol_type = genomic DNA
gcggcggcggcagcggcggagaagggagcgggaccggaagggtcgcagcgccccggcgcccctcacacccactgcggcggcggcggcggggcggagcggagcggggcgggccggcggcggagccggggccgcggagccaggagtgactagcacgcagcgccgccagtccgcccgcccgccctctccccgtggcgcggcggcggggaggcgaggtgagcccggcgggcgggctaggcctgggcgcggctgctcgggccgggcccgcggggaggggcggtgaggaaaccgcgcgccgggggcttcgggggcgggccggggctnnnnnnnnnnnnnnnnnnnnnnnnnnnnnnnnnnnnnnnnnnnnnnnnnnnnnnnnnnnnnnnnnnnnnnnnnnnnnnnnnnnnnnnnnnnnnnnnnnnnnnnnnnnnnnnnnnnnnnnnnnnnnnnnnnnnnnnnnnnnnnnnnnnnnnnnnnnnnnnnnnnnnnnnnnnnnnnnnnnnnnnnnnnnnnnnnnnnnnnnnnnnnnnnnnnnnnnnnnnnnnnnnnnnnnnnnnnnnnnnnnnnnnnnnnnnnnnnnnnnnnnnnnnnnnnnnnnnnnnnnnnnnnnnnnnnnnnnnnnnnnnnnnnnnnnnnnnnnnnnnnnnnnnnnnnnnnnnnnnnnnnnnnnnnnnnnnnnnnnnnnnnnnnnnnnnnnnnnnnnnnnnnnnnnnnnnnnnnnnnnnnnnnnnnnnnnnnnnnnnnnnnnnnnnnnnnnnnnnnnnnnnnnnnnnnnnnnnnnnnnnnnnnnnnnnnnnnnnnnnnnnnnnnnnnnnnnnnnnnnnnnnnnnnnnnnnnnnnnnnnnnnnnnnnnnnnnnnnnnnnnnnnnnnnnnnnnnnnnnnnnnnnnnnnnnnnnnnntcgccactgtggtggattcgttgttgtcaggctgtgtgaatgtatgcagacgcctgggcaggaccccggtgtgcatttgtggaagactgggcagggtgctgaccgtgctggtgtgagtggtgtcggaaccccctccccacccgcccagcctcccgcctccccgcgcactcctctcttgccgtgtcattgcacactcagtgtccagcagtgccagaggggacccagcccacatccgtcaccaccacacccctcctccagaagactgctgccccatcccactcatctcgcccgcctagaacatgccagcccgcatttgccccaggacctttgcatttgctgtttccccgtctttggagttgtctccgtgatcttggcacaagtagctctttctgctccttcctctggtcagatgtctcgttttgggtgaggccctcctcgaccaccctctttcttcccttagtcatgctatttcattattttaaaattttccttcctagctctcatctggtttgaaactattctatttatttgcctgtttattttctgtctccccgactaggatgtaactttgtgaaaacaggtagctgtctgatttgtccactgctttatccccagtgcttagaaagcacacaggaagtattcagtagtatcagctcaaggaatgaatgaatgatcaaagaaatggcccagcctccctgttgtctctgctttatctgttcatttagtgacttctgattagcgtgtgaaacttgtaagcagatggaagcttgttctattttgtgaaacattttggtgtccttgacccctttaattgctaactgttggaacaagctgtgatataaaatctcacatttttataatagtttagctgtagctttcttccacacatacaagagacatttactgaattctgcattatctaggtcatgctttctgctagaccctagggacacaaggcagatagcaacggggtccctttcccgagagagcccaggagcccagtagagaaggcaggcatgcagacacttagttccaggactgtacaacccttgctataggggaggggctatgccatggaaatccggaggaggtgacaggtggtgccggggggccttgagggtgataagaaatttgctaggcagggagaggcacagaggtgtgaaggagcagggccaaggaaggaccgtagcccactgtggagttgagaatcagtctggagggccaggtgtaaggacacagagtcgtggggaccctaaagaacaggaaccttacccagcagttttctagaagaaggtggaatttggctgggtgccatggctcacgccagtaatctcaagacactttgggaggctgatgtgggaggatcacttcaggccaggagttcaagaccagcctgggcaacgtagcgagatctctgtctttacaaaaaaatttaagaaattagctaggtgtggtggcatccacctgtagtcctagctacttgggaggctgaggtggaaggatcccatgagcccaggatttggagcctgcagtgagctatgatcacaccactgtgctccagcctgggtgacagagcaagaccctgtctctaaaaaggaaggcagcactccacatttgttctgatttttaaatgttggcaatagctaattaaatttttttttttaatgctgtgagccaagccaaatacagattcattcagcttggttgcaggatcgtcatccttcaggactggctgtgtgggagggaggagctgtgaggagagcaggaaaggtagcctaaggccaggggagccaggccctgtttgcccaggtgccagcccagatactcatttgattgtaactggagccctgtggaaacggaagctcaggagtctaaatagtctgtttcttagcaagcagctggtgagtggagttcgaacccagatcacttcccagataaggattctttcctgggtccctcagctctgagtattctcttttggcttttaacttgttctggaagaatgaccaccaatctatttaatgttttcctccatttaacttttttttttcttcaaaaggatcctgcagagttaaaaacaatactatttttgcatagacttctcttttgacagctttgattttcctggtaatttaattttcagggtgccaggactttaatttgttcacagattaaaatctgtttatttggtcccgtaaataaacaacagaggggatacttgaatgtgtctaagataaaatagtcttaattttctggataaagaaaaggaccagacaaaccagttaatagcgagtaaaccagttgttttcatgaagcataagataaaacagagaccagattttttttcttcttgagactattgatttgccaatagggcaactatttttggtctacacacatacagtagttacacctcacacttggttaggaaggtgccatttttacataattttccttcagaataattaattcctgatactttgtacttgattgtatgaaccagtttcaacatcattctttttattttaacttttattatgggaactttcaaacatatacaaaataaacagaatagtgtcctgctttaacagttattaactcctgaccaatcttgtttcatctctaatgttatccacttgcacccttaccacccataattattttcaagcaaatcctaaatatcatgtcatttcattcattattttttgggatactaattacacagtgggtgcccagtaaatgtttggtaaagacaaagctaaatgggagaataaatgtggtagggtagctcggagcagtgggtaagatcaggactttgagtcagactcccagtgggtctgctgcttatctgggtgatgtgcagaagcgattgcactcatctgtaaaacacacgggcacaacctcagggtgctcaggaggtatacagtagttatacttcacacttcggtaggtctctaaaggtactgactcttttaaagttgaaaaagtaataattgcttaatatcatcaaataactagtcaatattcaaatttccagctgccccatgaattttaagtttccttaatagtttgaaagtagagcaagagaaggtccatacgttgttgattggatgatacgtcttttaagtttctcttaatccatagatccccctcctatttctttgttttcttggtagtttatttgttgaagcaatcgagttgttccttagcatttccatagttggtatttgattgattgcatctctgcagtgtaattgaatgtgtttctctgtaatctctgtaagttagtaattggatctagacaaggcttcgtcagatttagggtgcattcctgcatcaagatgccttcctgagtgggctgtgcagttcttatctagaggtaccctgaggctctctgctcgtccgtgttgcagatgagcgcaatcgcttgctgcacatcacccagataaatagcagacccactgggagtctgactcaaagtccccatcttaaccactgctcccagctgccctaccacattttttctcccatttagctttgtctttaacaaacattttttgggcacccactgtgtaatcggtagaggattgagaaataaatcagacacattttctgcccttacagagtagaagtgtaagtagactcggaatgcaatctaaagcgaatactgggagggtggcaaaaatgggggcatgcccagcatggtttgaagggaaaggctggaggaggaaacatgtaagagaagcaggtgcttgaactagatttttgaaggaagatgaatgttgaccaggaggtcaaaaaggagagggaggtcatttcaagcagatggaacagcttaggcagaggcctgaaggtgtgcagtagctgggtgtgtccactgatcccaggtggtttgatgttgcctaagattgggccagaggactgccatctcctgtgctgtgctagggaactgaatcttattctccaggcagtcagtcactgctgaaggagttcaaatgggagaagggtgtgatcactgcacactttcaacaaatctctctcttttttctttccatattttgaaataattatagattcacaggaagttgcacaaatggcacagagaggtcccagtacccttcccccagctttctcccatggttacatatttacacaaccgtagtaaaatgtctaaaccaggacattgggcatcggagcaaggtgtatagagttcgttgtcattctttatcgtgtgaaaattcatataaccactaccacaatcaagattcaaaactatgtcatcatcctagatatctccttgtcccacccccttacagccacagcacccccttttccccaccattcataactgctggcaagtactaatctagtctgcatctctatacttttgtcttttcaggaatgttatatgcatggagttatacaggatgtgactttttgagattggcttttttcgttgactatcctgcccctgagatccacccaagttgtggtatgtttcagcagttgctgagtggtattccgtggtatgggtatacagcagttagtttaaccatttacccattgaaggacaggtttgggttgtttctagtttggcgctattaaaaataaagctgctgtgaacatttgtgtacatattctcacgtggagtgatttctctttctaaagtggcacgtgtgcagtggtttggaagtcacagaaatggtggctgggagaatgcttctgctgtcgctggtccaaggagccacgagaagcccttacccagggccctgggagtgggggattgagagggaaataggcaggcgtgggtgcttggaagtggggctggtgacggagatccttgcagggtcctgtggatccaacagtgggtgaagtgataaccaaatgctagttgttctgtattgtggtatatactgtggcttaagaactacagaggatggccctgaaagctgcaaggttcttgattatcaaagaaagattacgttgttataccaagctattcttcataagaattacagtaggaggccagggcgcggtggcttacgcctgtaatcccagcactttgggagggcgaggcggcgcgatcatgaggtcaggagatcggcggcgggcgggctttctccccgaaaccacatctctactaaaaatacaaaaattagctgggcgggccggcaggcgccnnnnnnnnnnnnnnnnnnnnnnnnnnnnnnnnnnnnnnnnnnnnnnnnnnnnnnnnnnnnnnnnnnnnnnnnnnnnnnnnnnnnnnnnnnnnnnnnnnnnnnnnnnnnnnnnnnnnnnnnnnnnnnnnnnnnnnnnnnnnnnnnnnnnnnnnnnnnnnnnnnnnnnnnnnnnnnnnnnnnnnnnnnnnnnnnnnnnnnnnnnnnnnnnnnnnnnnnnnnnnnnnnnnnnnnnnnnnnnnnnnnnnnnnnnnnnnnnnnnnnnnnnnnnnnnnnnnnnnnnnnnnnnnnnnnnnnnnnnnnnnnnnnnnnnnnnnnnnnnnnnnnnnnnnnnnnnnnnnnnnnnnnnnnnnnnnnnnnnnnnnnnnnnnnnnnnnnnnnnnnnnnnnnnnnnnnnnnnnnnnnnnnnnnnnnnnnnnnnnnnnnnnnnnnnnnnnnnnnnnnnnnnnnnnnnnnnnnnnnnnnnnnnnnnnnnnnnnnnnnnnnnnnnnnnnnnnnnnnnnnnnnnnnnnnnnnnnnnnnnnnnnnnnnnnnnnnnnnnnnnnnnnnnnnnnnnnnnnnnnnnnnnnnnnnnnnnnnnnnnnnnnnnnnnnnnnnnnnnnnnnnnnnnnnnnnnnnnnnnnnnnnnnnnnnnnnnnnnnnnnnnnnnnnnnnnnnnnnnnnnnnnnnnnnnnnnnnnnnnnnnnnnnnnnnnnnnnnnnnnnnnnnnnnnnnnnnnnnnnnnnnnnnnnnnnnnnnnnnnnnnnnnnnnnnnnnnnnnnnnnnnncaggatggtctccgtctcctgacctcgtgatccacctgccttggcctcccaaagtgctgggattacaggtgtgagccaccgcacccggccagatttttactattattattattgttgtttaatatagagatgaagcctcaccatgttgcccaggctgttctggaactcttgggcttaagtgatcctcccaccttcggcatcccacagtgctgggattacaagtgtgagccatcttgcccagctggaaaacagaacaatttaatgaaaaaaatgtcggcagcaagcgttgagacagagggtgattgtgagaatctgcttttaatcacaatagttagttgatttaaatatcgcatgtcctgggcactctgaagctttagtgtgattaaaggttcacttgagtctgtggatcactgaatcgttgtcatcgttagaggaaaaagtgttttggtaggttttggtagggggagtcagcaaggtgaaatgtgcaggactgtgtgctggtcctggccagcccatgtgcaaatagcttcactttctaaagggatatcagaatggtgctttgggaggaacttgaatattgtggtgaaacactcctaaattcaaatctgagccatgctgggaatttggacaacttcctctaagcctcagtttcctcatttgcagagcggggatagtaatatgctcctcactagttgttataagggtgtttataaatgtgtacctcagagccaggcccactctcatgcctctagccttatctgcctgaagcccgtcttccatacaagtgtcagatgatcattctgcagcttttcatttaacattttttgtttaatcagtttttaaatgtgaaatatgtacatttgaaaaacagaatagaaagttataatgggaagaaagtttctcatttcccactatttctctacttgctagcattgtgtatgtgcgtgtgtatgcgtgtgtgtgtgtttacgtagctgggcattatgtgttctcttcttcaacttggtgtatttcctttctgtatcttagacatctttccacattgatacataaagtccttgcattctgttgaatggccttgttgtacttctgtgccataatttattcagtccatccacagtgtgcattttagattacttctagttttttgcctgttacaagaagtgttacaaacatgcttgcacaaatatgtttggatacttgtacacgtatttgtcagatacacttagagaattgtgtttgccagtttaggatatgcagttaacatttttattagccatatctatattccatccaaaaaaatgttttaccacttctcagctctcactgacgtgtgtgaaagtgcctgtttcctcatgcctcggtcgatactgtgaacaaacttgagctcaggtcttgcctcctcccggaaacctccttgtagtgttccctccccgttttgagttgctcatagcctggaagggaggcagaccctacaaaggctgtgacagtgcagcctggcgggcgctgctgagtgcacaagtggcaaggagggagccctgtgctggacggatggtggcagcacagcctgggagctgagggggaggaaccagcaccggctggtgtgggaagtggaggcagcgaatgcaggctttagtgtattgctaatgtggtttcatgaagaattcttgtacttcccgatttgtaaaactgttttctgagccccggttgatggtccattttgttgaaatatcatctcaatagagttgactcatgaatagctaaattacacaccttctcaggtggccttaagtttctttctcttgctctcacaaagcccaaacttgacagggaaggtggctttaacaggttttcacttaggtgacttttttctcctgcataataagggtaccttattttaattttataattattttaaatctttttgtttgtttgtttttgagatggagtctcgctgtggcccaggctggagtggcacgatctcagctcactgcaatctccacctcccggttcaaatgattctcctgcatcagcctcccaagtagctgggattacaggcacgcactaccacacccggctaatttttgtatttttagtagagatggggcttcaccatgttggccaggctgttctcaaactcctgacctcaagtgatccccccacattggcctcccaaagtgctgggattacaggtgtgagccaccatgcccggactattttaaatcttgagatggaattacaattctaaaacctaatatgattgaatatactccccaaatttaaaaaagttaacctaatattgtcatagtccaaatataggttgaaagcagttatagcagggagagttgcggagttggtcagcagggttgagattgatctgtcagtcccaacgtgggcacggggtcctgaatggggggtggctctctgccatgaggtagttaaggaatccagctggtgggcagctttccatctacagcatgtgacttccatctctgggtctgtgacagctgatccctcagccagcagcaaggaagaaagattggagggcaagcagctttctgtaaagaaaaataaaagtgatctggaagttggatacatcacttctacccacatcttattagtcagaacttggtcatctggccatacctggctgctgggaaagctgccaggcgtcgtctctagttgggcagccatttatctagcaggaaggggaaggaaggcttctcttgtgaaagcgaggaagggagggatggatcctggagcacctcagcgcctgtgtcacgcctctgatgttttgacggcttccacagccctcaggactgaggccagacggctctgcgtggctgctggggctcatagtgatctggcctccttttctctccccagcttcactcgccctctacccagcaagtccctagtgacttgtcacattccgaatgtgcctccgcctctgctgcttctcctcccgttcccccaaatcttcttcaccctactgggtttaggacccttggtgtgcagggcctcctcctgagtgtgcactcactgagggcaggcgagtgtcctggcatggtacctcaccatccacagcgggtgctcagtacatgcttgcaagtaactgtgtcgctggtgtgttgacggcatagcagaggaacagccaccctccgtaaagcaggtggtagtgggtgcctgcctttttgctgagttgtctctaatcctttgcacttgtaccctgctagccaagctcagcagttcgctgtgtctggacacagtcagtttgagctctgtgcctctactgtccatctctggcaaaagagtctgagggcggatgccgcctccttcgtgaagccgtccttgtcttctgcccctgccagtgggtaggatctcttttgccttttgattttgtttacattgtgcttatggcccttaccgcactgtgacttgtaatatagataatggactcactgctcacgcttctcccccaaatagtgaagtacatgttgtttcaagactggttgctagctgactatggcatatcttttgcaatacttaccactttcgtgcataaaggcaccccctaaatgttgagtggaattgttttagcctcttgcaaactgtaaataagctaatctttaggaaggatcttcctttagatatcagtaaaatggagcagcactgtggggaatcagatcaacaaaggtttattgaatgctcacggtgccccaaagaccagcttcctgtcctcctgtccttggagtatgagatgccatgagcaagacagacctgcctcgcacctcctatagcttagagcacagtgacctgccagcctggagagctccccagtccccttctcacagcagtgtgggctaggcaggtgttccagctcactcagccctagattcctcccaggtaacacgggactgagactcctgcggtgcgggttgtatgagcagctgtttgtccagcatctaagtgctgtggcgtccctggagtcactccctggctggcacgctaacacacctcggcaggagtggtcagagtggcagccacactgcagccaccacccagaggacggggagaagaccgtggggcagtggtcacttggagaaattattaatttgactcagttctttatttagacttgttattaatccattttttccatgtttaaggaaaatcctagcatttgtgttgaaatacaaatcatcaccacaaaaatctcattaggttgacgttaaatattagatactagaacataaaggcaagggatttgacagagctgtagaatacattctgtagtcttaaacagtatagaatgtttacctatatgattttgttgttggctatatagttttaaaagaccaaaataaatagcttgctgacttttaaataagcataaccagacacgagcctaggaaccacttgccaatttgtttgcttgttttctgtataaaatcatccaggctcctgcagagcagcagtctcagcctgtgcctcaaccacagaaaagctgctttctcggcctgctggcctgcactcagacatagtggatagacttcctagtgttgctatgatggactgtcggtcacagcagagttcttcatatacagatctctaccctgaaggccggtggtgatgtgggactctggggctgtgccagctgatgccagctctgggacccacctcctgaggcaggagcacgtgcttgggcacatgcagcacactgatgccaccaggcctctgacagcctgtcactttggcgtatgaatcttgctttttggttcatcatttcaaccagaatctatacactgagcagaagactggtccgtttgcttctctttaggcattctagaagtgatcatttttgaaacaatgcctccgtctctagtggagacagctaggtgtaaatgaaccatttacacctagcttgcccacagggggcaagctgatgagacgcacagagtgatgtagtcttttcatagccagtagtaatgcatacattcttttctccaaaggtggttattttctagtccagccccttaaagtgtggtcttgctgggcctcaaaattccttcctttcataatggtctggtaccactgaaatgtctgcatttttttgtgtcttgcttaagttcagaacttggtcagattgactttatcaacttaacagccacattgtcttacataccaataagtttagaactctcttacgtgagctgcgtatgtacttccggtaagaatgcacgttcattctgtttttctttgaagggatctgaaacttgcccacccttcgggatattgcaggacgctgcatcatgagtgacagtaaatgtgacagtcagttttacagtgtgcaagtggcagactcaaccttcactgtcctaaaacgttaccagcagctgaaaccaattggctctggggcccaagggattgtttggtaagtatggtctgttttaatagcgtggattgagtttttgctgtaataaaaagtaaaactaaagtgtcaggatttagaaacatcgatgatttaaaaaaaaactctgttataggtttatgagctaaattgaatcaactgcttgctctagttctgtgtagtcaggctgtagggtacaaacccatattcttagaatgctgcaggaatttaaataggtagcaagttttcttttttgtttgtttcttttttctttcattttttttttcatttctcctgtcattatgatatcagagtaataggtatgacagtgagttgtaacagaaatttggagttttattcatttcttcatcatggccaccttttcccccctcccccttttattcccgatcactcctgttcatttccaggcgccatcattgcagtgccttgccattcattggcaggatgaggccagtcagtgtcattgtcactccatggattaaccaggaagggatgctgtgtgaggggttgggctggccgtctcttccttggtgtctcacttcaactgtgtgtccagcccagaacgtcagaatcgttagtctgaccctgaacgttagtctcttgcatggtaagacggtcagccgccgcggcatcacgggccagctcaaggtaaagctcttcacatgtttcctagactgcagctatcagcacttcccacactttttaccccttatttttctgggcagaactttttttttttctttttctttttctttttttttggtcaatgaaaacaggattacctttgcgcctaaagaaaccgtggtgcagttaaacatcgcgtgtttacagctggtaggcagagggggttgagggagaagaaagctcttttcgacgctctagtagggtagtttacatttccttgtagagatgttgggcttggagaatctttaacgatgatttttaactgatcctctgttgcggagacctatgatcagggaaacagttgtttttttcagccctggcggctgaaggccatgggagctaagaggaaattgcagtccagagcttctttgagaagctaaggcgggaaagggactgtttggaaggaatgcccagcttgcatctaaagtaatggtgatcgtaacttcccgatgacacgtgccgtatcggcccttaaatccagtgtgccagaagaagtgttaaaggtggccgggcgcggtggctcacgcctgtaatcccagcactttgggaggccaagctgggcagatcacgaggtcaagagatcgagaccatcctggccaacatggtgaaaccccgtctttgctaaaaatacagaaattagccaggtgtggtggcgcacacccgtagtcccagctactcgggaggctgaggcaagagaatcgcttgaacctgggagatggaggttgcagtgagccgagatcgcgccactgcactccagcctgggcgacggagcaagactccgtctcaaaaaaaaaaaaaaaaagttttaaagttagtggaggatggttcaaattaggaaactttgatggtaatggaaagttataaacaacaaagcgttcttttggtttataatccatctcctatttggaattagatgataatttgacagataatttgatgtgtgcatgcgagagagagagagaaaaaggagagagggagcaagaagggagaaatgtcggaggtcttggggagttgtttgtggctatagacaggtagctgttttatttatttatttttttatttttttgagacagagtctcactttgtcaccaggctggagtgcagtggcgtgatctcagctcactgcagcctccgcctcctgggttcaagcagttctcctgcctcagcctcccggtagctgggactacaggtgcacgccaccacacccagctaatttttgtatttttagtagagacagggtttccccatgttggccaggatggtctcgatctcttgacctcatgatccacccaccttggcctcccaaagtgctgggattacaggcatgagccactgcgcccggcctacaggtagctgttttaaatacgtgcttcatttatcccagctggcatgtcattcacttgcttttgaaggttggtagtaatgtgaatagtgtatattgtagaatcaccatgagctctgccataaccctcactggtggtgaatcgaaggactaggaaggctcacttgcttctcccgtctcacggggtgttagtggtaggcctgggaccaaaacaagctgtgggcctttgggaccttattgcctgtaccacggagagacttgttgaagactttgaaccactgatactttgataggtcaaggcctctgacccaccttctgtttagaatcttagtaataatgaacaaatattcactaaacacctattaaacaattttcagttaattgtatttatctctataagacaattgttacattcaagaacagtttcaatttttatagctataactgactttcagttttatggtatccttctgtcttatgttctaatagggaaagtaaacactttataagtgattttcgcttccttttcacctttctcttttctctgtatccttcaccaggctatgaggcaccaagtagaattgggaaataatctagttacggcacattcccgtttcaaaaaagaaaaaaaagcttgcttttccaaaaataagctcaacagtagattagctaacactgacaagaggaattggattttctatcatatttcgtattaaaacgtattaaaatattggcattatgtagttaattgatgatctgaaacttcctttcatcactattgtacttgaaaatcatctgtcagtgattctttggggagtgtagcatgcagaataatggtcccgcctgggatgtccacgtcctaatccctggaatttgtatatttctttacatggcaaaaggaatttagccggtgtgattacattaatggccttgagatggaagggttatcccaggtttagttgggtgggtccttcttacaaaagggagacaggagggtcgtagtcagagatgtgatggcagagcgaagtttggagtgatgtggggccacagccaagcaatacaggaagcctccaaccagctgagagaggcagggagcagactccccccagagcctgcagaaggagccacgcagccctgcttacctcttgaggcataagatgcattttggacttctcacctccagaactgtaagatagtaagtttgtgtggctttaaagcagtaaattggtggttacttcttacaatagcaataggaaactaattcacaagcatgtgtatttctacatttttgagaaatataacagcaacagtgtatggtttatgcaactagttaatcttctatttaaattagagctttatggagggcaggtgtgcagataaaccaatgtgcaggtagggcctgtgacctgtacaggattaaatggaagagctggagccagaagaaaatattctggttcctaattttgaattgtttttatagttgtctttgatttgtttatttgtttttgttcctttaaatatgttagtaaaatttattaggaaataagtttttaaattttaaaatattttattttatttttgagacggagtcttgctctgtcaccaggtggagtgcagtggcgtaaacttggctcaccgcaacctccgcctcgcaggttcaagtgattctcatgcctcagcctcccgagtagctgggattacaggtgtgcgccaccacacccagctaattttatgtattttaatagagatggggtttcaccatgttggccaggatggtctccatctcttgatctcgtgatccgcccaccttggcctcccaaagtgctgggattgcaggcatgagccaccgtgcctggcctaaaataagttttaaaatataattttgaagtatttataaatatcaactgtgttatagtacaattaaataattgtaagattttgaagctctagtggagaaaatgtgtgtacatttctttcatacatatattcagtttttctttctccttcaaaaatctcaagtttggccaaaatagtaaagattatttgctttacgaaaccattctatgaaatgcttaacctttaaaaaagtgttcaatattgagtctggcagttcttagaagtaacagttacagccttaacatgaaataattggtatagcgtgttcctttttgtgtcctcaagttctgtataaacatgagtactggcctgttcttaacatggtttattttctattaatataaataaataaaaacataacaatgttcacaacaaaatttctgtgataaaggagacatggtttgaggcacaggatggctgtgattcaggatacttgagttctgagtccagctcttttcctcagcgaagagttctttgtgagcagggcaaatcagtttctttatgggcctcaatattttcacctgtaaaatgagtggtttggaacttctcatttaagatggtggcccgaacacctgtacaaagataagagggcagtaataagtggaagacagttttaacaaatttatgaaatatagaaagtagcttgaatcttgtgatacagataaaacagcagataaagtgagaataagcagctgaagtatgtacgtaaggaagagaacctagctatagtaaaactacagaggctgtgggcatagagatgacaatgaagaagagatgaaatgagtggctaaaactagggctgttaattaaaagtgtgcctgtgaaacagctgtgccagttttctgccaacattcccactgtcccccatgctcagcattttcccctagagagctagtaagttagtgaggagttactaggtcaggatctggggaagcacagaagcctagtgaggggagcttcagcatgtggggctgtctttcccttgggggcattttaaaattctggaaggggctgctgagagagtgttttggactgccctgtggctaggagacagggattagagtccagggccctctaatattgtgtggcaaacttcttttacttgtgttgggaccaataaaaggctgcttcctagaagtaaaggtaactcagagattggcccttataggcactgccactcagcttcagattatcatctcatttgctgaacttgtatgggggtaaacaaaaattgctagtgcccccaggtacctagtagaaataaatttaaattctttgtggaagaagacagcatcatattagataaaattatttctagatagcaaacagttttatacgtgcaaggcccagtctaggcacacaaggagatatgacaacatgaataaaatcctgcagaaacagcagacaaaagaaagagatccataggagatattggcattattagatccacatttttaaatagctatgatattacgttcaaggtgataaaggcaagattaaaagttttggtggagaaatgaaaacttcttttaagaggaataaatcaaaattctagaagtaaaaactatagtaattgaattatgaatttaaggtgtgtaacagcatgctagatataactgaagagagatttagtgacctggaggagaggtcagcaaaaagtatccagaatgaaagctgcagaggcaaaaatggtagaagagcccaaaagagagaaggtgttagttttctattgctgcataacacattaacacaaacttagttgtttaaaacaacacctattgattatctcatagttctatagtcagaaacctgggtgggtttgcctgggttctttgcccagcatctcacaaagctgcagtcaagatttcgactgggctgggctcagctcacagatggaggttctggaagggtatctgcttccaagctccttcagcctgttggcagagtctagttccttacagctttaggtctgtggttcccaatctcttgatctctttcagtcaggcgctgctgtctgctcccagaggctgcatgttttccttctcaagtgacctcctccatcttcaaggcagcagtggcatgcccagtccttcccatactcacatccccctgactttccaccctttccatgagccagagcaaactctgcctttaaagggctctcgtgataagaataggcccacctggataatctgtgttttgttaaattaatgagtacgtttagcccttttgcaagatgcagggtcagtatatgtacccctccccctggaaaattgcatatttatatactagcagcatatagaaaatgaaaatttgaaaagggtaccacttaaaataggataaaaacttttaaattatcatatctggaggaaaaatctaacaatatgaaagacttgtatacaaaaagctaaaaaaattagaaaaaatagagaaaactgaaatcgtggtgggatgtctgattttcatgagttagaatatttaataccatgaaggtcatttttcagacttgtctagagtgattgcaatcaaatctcagtcatcttaaaaaacaaagaaatgaacaaactgattttaaaatttatatgtaaaaataagaaccctagaatggtcaagacacccattaagaagggaggaacactccctctgccagatgtgaagacttaccagaaaactggtgatcaagatggggtcgtgtggtgcaaggagaaacagtggactgacctggagacagagtcacgcatgtgtgggcttctgacttacggcagtggtggccttgtggagcgatgaggaaaggatggtcttttaaataaatggacataggaatgttcatatagaaaaaagtgaaatttgaccccaacctcatattatacccaaaaatgaacgtcagttgaattgctgtaaatatataaggcaagccagtaaagctatttgaacataatacaggagaatgtcttcatgatctttggggtagggaaggactcctttaaacacaacataaaaaacatttatctgctggatgtggtggctcatgcctataattccagcactttgggaggccaaggtggggggatcgcttgaggccaggagttcaagaccggcctggccaacataatgagactccgcccatctccactttaaaaaaaaaaaatttatcatagaagattgataaattttgtattaaaattaagaaatgttgtttattttaaaaaaccaagatcaagaaactgaaaagataagcatagatgtgagaagatatatgactgaaaaaaaatctcttgttcagaatatgtaaagaacaacagtcaagaagattataaagatagacaaacaaatagtcaataggttgtcacaggaggatacccaaataacctataaacaggaaaagtgctcaatgccgttattcatcaagatagtgcaatttaaaactgcgacgaaataccattccacactcagcagaatggttagaaactaagctgttggtgataccaagtgctggtgaggatgtggaaccacccagaggcagctctcagatgtgacccctcgtgcactggaaccacccagaggcagctctcagatgtgacccctcgtgcactgctggcagctgtacaaatttgcagaaccgctttggcaaagagtttgacattatctactgaaatacaatggatacgttcccactcttagttgtctactcatcagaaacacatgcataggggatccggagctgcgtacaggaatggtgatgactgtgttctgtaatagattgaaaactaaaaacaactgaaatatctatcaacgtaatgtgatatagttatacaaaggaatcttatagcaatgatggaaggagttatagctacatacagcaacaatggatgagtcccataatattgagccacagaagtcagacacagaagatttcaaaaaacaggcaaaaataaagtgggagctccagggtgcatgctttagctggtaaagcaagaaagtgattattgtacatgtcaaagcagttatcactggtggacaggagggacagtaattagttgggggtgtgagaagcttttgggatacagagagaacatgactgataaatcattgagctgggaaacaaaaaaagaagcaaaggaatcagtacagtatcgggcataagcctcctcactgtcagcactcagtatggaaatcagtggaaaagtgccttcaaagttctcacagaaaattgatgttaaactcagaaaacttattatcaatgaagggtgggggcagagcaataccatctatcttccatgcaccttttctgaggaaattccttgaggatgtactccagcaagagaggcaacacaagagcgtaatgcaagaagcagtggggactgtgaaaagaaatcccaggatggtggctgcatggcaggtcttaaggaagctgcaagaagagtgtctgcaaatcatgtggaggagatgccagacaacaataatgtaagaagctaggaagtgccagtgataggctaaagagtgtctgcaaatcatgtggagtaggtgccacccaacagataatgtgagaagctaagatgtgtcaatgataggctaaaactggcattttttattagtaaaaactaataataaataataatctagaatgtaataaaagaatctattatttattagaaatgtgtggggaaaactagaaaaaatcatggtctaattatgaaacaaataaagaggacatgatgtttgagcagttgatgaaatataagagaatcctttgtccttgatcctggaaatagtctcaccctcttatgagtggcagcaagagccatgtgatctttagaaaatgaaatgtaatcccaactctggccgttagtgatatttacatttgtacacatacacacctacactccatgtattgattttcaacttctagaaacatcctaaaaaagaaatacagaagacttagttatgaatatatgataaatggaggagaaagggatggaacagtctcattttacataagcagaagtcaagacgttcccttcagagttgaagaagcgtgaagattaggggtgttacttaaagacataaccagggaaaacccaaaaagcagaacaacaaaaaaaataggaggtgctggggattggggatttcaaggaagtggccaaatactcagttttcataacggggagtaggtagatcatttctaaagctgataaatgaagagatagtgataaaaatgtattctttgagtgaccgcaataaccacaaccaggaataactgaaggtagttcctcatggagctgagctacaaatggggaagcttatgcccacttagatgcttagacttcgtccatttgccttgttttagccaaaaacttttttaaaatgacaaataaaaattgtatatatttattatgtccagcatattgttctgaaatacgtatgcattatggactagctaaattgagcgaattaacatatgcattacctcacatactttttaaaagtttctgatgagaacaaatctactctcatcaattttcaagaatacaatacattgttattaactgcagtcaacgtatctcacactagacctcctgaccttattcctcctatctaactgaaattttggacaaaaacttttgataccaaaaaagtgtgtctgttttcaaattctttttttctttttctttttctttttttttgagaccctgggcaacagggtctcagtctgtcacccaggctggggtgcagtggagggatcagtgctcactgcagtctcgacccctggctcaagcagtcctcccacctcagtcccctgagtaactgggtctacagacatgcaccaccacactcagctaatctttgtattttttgtacagacaaggtttcactgtattgcccaggctggtctcaaactcctgggctcaagtgatctgcctgccttggcctcccaaagtgctgggaatacaggcataagccaccacacctggcctattttcaaattcttgagtctgagaagtatataagtataaatacatacatggctacatgtatgtcaatgacttgtttcacaagtggatatatccttctcattttataattcatataaatggtgcaatttgcgtatgaacctgtggatttacatatgtatatagacagacacataatatgaactgaattaaagtaaggtagcttcttaaccaaatgctacaacagatagccttcaactttaaaacagattgaattaggttcgagtttggcaaaagcattaatagaagagaaaaaatgtaaataatgttataaactcaatggaataaagaaatggaaacaatatttaaatcagtgcttaggttctcaggtggcctttagtagctgttagccctcatgagtagcccagaggtgataatacaaatgatactatttagtaccagtttgaaacctaaaaatgtgcaatcaggctacttgattcttcatgtctattttctggaggaaaatgaacagaatttcaacaggaaatgagatgctggcaacacagcctgtagattttattcttactatagtagtaggaggagatagttctaaaagaactttatatagcagttgcttacgttagagattttgtatcttgaacatttaccatgagctgaaattttggcttcttttctttttagatactgttatttgtgaaaaaaacacagtgactcaaaatttagatttattctcctcatgaactcagccatttcctctactgtgatattccaaaatatacacattttaagacaggaaacagtgactttgtttccaacttcttgtcatgtttaaactgaagatttcatttcttgactggttttatgcactctgtattaaattacctggttttgaatgtaatctaaactatgaaaccttggtgtgtgaaggattgctgaaccccatcttaactgtggctgaaatgtgtctctgcaaaggagttagtccatgctgtagtcttagccaactcactctgctcttcatatgtgcaagtaccttgaatgaaataagcagatttttccttgttacttattaaaaagataatatattcaatgtatattctggcattgctgtattttccaaaaccgttctaatggattgtgcattatatttcctaattctagtgctgcatttgatacagttcttgggataaatgttgcagtcaagaaactaagccgtccttttcagaaccaaactcatgcaaagagagcttatcgtgaactcgtcctcttaaaatgtgtcaatcataaaaatgtaagttatgaatgtattttgtctgtgtgcttccatattgtcaataacgtggtaatcttcagggttttctggagatacattgagttcagacctaggataagctaaggataaaaatggctattaacattggttttttgttttttgtttttttgtttttttgtcgcccaggctggaatgcagtggtgcagtctcggctctctgcaagctctgccccctgggttcatgccattctcttgcctcagcctcccgagtagctgggactacaggcgcctgccaccacgcccggctaattttttgtatttttagtagagacggggtttcaccgtgttagtcaggatggtcttgatctcctggccccatggtccacctgccttcgccttccaaagtgctgggatcacaggcgtgagccaccattcccggcctattttttattgataacattctttttttttttttggagacggagtctcgctctgtcgcccaggctggagtgcagtgggcagtggtgggatcttggctcgctgcaagctccacctcctgggttcatgccattttcctgcctcagcctcctgagtagctgggagtaggcgcccgccaccacgcccggctaattttttgtatttttaggagagacagggtttcaccgtgttagccgggatggtctcgatctcctgacctcatggtccgccagcctcagcctcccaaagtgctgggattacaggcgtgagccaccgcgcccggctgataaaattcttaataaacattgaggaaatcaaagctagaaagaggcatcattatggtgcataggaatttaggtcacttaaccaaagtaggaatatcaattgatactctgtttctataaaataggaacagtattgatctaacaaattgagaaacaactaaatattttgtggaaagatgttgttctataagtagctttttaccttgtatatgacacaccagtttcaaatacacgttattagatgatgttacatttagagtagctattcttggaagctccacagaaatcaaagcactaaattttacggagaaataatgtttctagaaaatgaagttgggttcaatcaagcacattgtatgttctcctagtggtcgctgagcattatgttgataacgttgccatgttataaaattacaaaatgttggccgggtgcagtggctcacgcctgtaatcccagcactttaggaggccgaggcgggtggatcatgacgtcaggagatagagaccatcctggctaacatggtgaaaccccatctctactaaaaagtacaaaaaattagggagggtgaggtgggagaatggcatgagcccgggaggcagagcttgcagtgagctgagatagcaccactgcacgccagcctgggcgacagagcgagactccgtctcataaataaataaataaataaataaaatataaaacgttaaatctggtttttgttttgttttgtttttttgagacagggtctcattctgtcacccaggttgtgattctcccacctcagccccccaagtagctgggaccataggcgtgtgccaccatgcttggcaatttttaaaattgtttgtagaggtggggtcttaaccacattgtctaggctgatcttaaactcctgagcttccttcttttgagtctgtggcttgagttggtttaaatttctctaatgcatgctttattttactttttcttttttttttttgaaacggagtctcactctgtcgcccaacctggagggcagtggcgcgatctcagctcactgcaagctccgcctcccaggttcacgccattctcctgcctcagcctcccgagtagctgggactacaggtgcctgccaccacacccagctaattttttgtatttttagtagagacgggggtttcaccatgttagccaggatggtcttgatctcctgacctcgtgatctgcctgcgtcggcctcccaaagtgctgggattacaggcgtgagccaccgcacccggacttattttacttacttatttaaaaaattttttcaggttacaaaaaatatatattatttttaaaaattcaaacaatataaaaaagtaaaaactcctgaataccgccacccacagattactagcattaacagtttggtgagcattcttatgcatacatgtgcacaagtacataaacaagattaatcgtgttattcttcatcctgcttttctcctcgtgcaatgttggtagacctcatatactttaatgaacatagatatgagccagtttttaaatggttgcatagcacagatgcacagtaatttatttaagagactgccagccccctgttgttggatagattgttttgtttctcactgttataagcagtgctgcaatgaacattctaacgcctgaatttttgcatactcgtccaggtgaatttcttggccaacattgtcaggtcagagtacacacacttctagtttaaaatatactgacaaattgacctcaaggaagactattagtttgatattttcattaagagtatttgagaagctgggcacggtcacttccacctgtaatcccagctacttgggctgaggcaggagggtcgcttgaagccaggagtttaaggcacacctgggcaacaaaacaagaccccatctcctaaaaaaaaaaaagtatcagccgggcgctgtggctcacacctgtaatcccaacactttgggaggccaaggcaggtggatcacctgagtcatgagtttaagaccacgttggttggccagcgtggtgaaaccccgtctctactaaaaatacaaaaattagctgggcgtagtggcgggcgcctgtaatcccagctcattgggaggctgaggcaggagaatcacttgaacccaggaagcataggttgcagtaagccaagactgcgccattgcactccagcctgggggacaagaatgaaactccatctcaaaaaaaaaaaaaaaagtgtctgagaacgtctgttacttcagaatcccccagcactacatactgttgattttttttgttttgcttttgccaatttgataaataaatgatattttatttttatttgtgaggttgttatttatttttatgtgttttggtaatttaatttttatggcctttatccatttttcttttggactgctggtctcttctgcatttgtaggagggtttttttttaaatattaaaactattgccctttacttttttttttccatttgacattatttatgttgttgacatactgattttttatcacccattttttgtttcattttaatgtaatcagatctcttaggtttcctgtcatgtttagaaaagattttctacactaggattatataaatgtttatctatattctgaggttttatttcatgttttagatttaagtctttgttccatttagagtttttcttggtataaagattgaaatatggatgcagttttatttttgtccttagctaaccaatcaccccaatcctgtataatggataatttatctttccctcagtcatctggaatgactgaggttatgtgtttggtgcctaagccgtgggactcgctgtttacaccatggggtgtgtactggttcattcccgcactgccataaagagatacccaagacagcgtaacttataaaggaaagcggtttaaattgctcatagttgcgcatggtgtgggagacctcaggaaacttgcaatcatggcagaagacgaaagggaggcaggcaccttcttcacaaggcggcaggagagagaaaagtaaagagcaaagtgggcagtgctccttagaaaaccatcaggtctcctgagaactcactcactgtcacaagaagagcacgggggaaaccgcccccatgatccagtcacctcccaccaggtctctccctagacacgtggggattatggggattacaattcaagatgagatttgggtggggacacagccaaatcatgtcagggtgccaggatggaggcctgccgcaggatcagctctttaaccctctttaggtaaaaatatgatgctacgaagcctttcactttatcacaccaaaaatatgagcttagccttcatatttcaaaactttttagaaatttgtgcatagtatttaagttttcagagttaacatactgctttaatgtctttttacccataaattctacttttttatgttcaaaaagacattatgtgtttaaattctgtaataattaagttactagggacacataaaagtgatttgattaaaagtgcatctttcctttaattgatgtttaacttttcttaaatgccatgtaattggtaaaagcagtaataataagaagtactgaattctgctgtgattttttttcccgtcttaatgcatttcaatattaaacttaatttttgtaatcaagtaatctgacatattgaagtataattaattttctcttttcagataattagtttgttaaatgtgtttacaccacaaaaaactctagaagaatttcaagatgtgtaagtatcatttttattcagtaatgcactgtacatcaaagaatgaacatctagaaaagacagcaactgctttttatacttaggaaatgtaggtggcaatacattttgtgacatcacagataactttctctgttgcagagaaatatttagaaaatttgatggttatatttaattatttgtactacatgggttttcatcttcgtaacagataaaggatgactggaaagaattcttcagagcagaccaggatcactaatgtgttttgctgaactataaaatgtttttctcaaatccctgatggccaggattttagggttcaggagtttatgagtattacttgaaatgactaagtcactaattctatttaagattctgtatttccagaatcttaagtagaatcatcttactaacagtgaaatgaagtattaatctattgagaggcataatgcccaacttcatcctgaatttattggtgtgttcagtcattaacaaatatctgattgccctctgtgtgctgggcactctctgggacttggcctacctggcttccctggaggctgtcagggaagatagacaggcaacatgataaatgaggaaagcatgtagtccattagaatgtgctaggtgctgtggacaaagggtggagctgggtcaggggatcaaaagtgctgagggttggacttgaggctgcagttttaaataaggtggctggggaaagacctccatgagttggtgacattcgaagaaagccttgaaggagataaagaagttggtctggctgggtgtggtggttcacgcctgtaatcccagcactttgggaggccgaggcgggcggatcacgaggtcaggagatcgagaccatcctggctaacacagtgaaaccccgtctctactaaaaatacaaaaaattagccgggcgtggtggcgggggcctgtagtcccagctactcaggaggctgaggcaggagaatggtgtgaacccaggaggtggagcttgcagtgagccaagatcgcaccactgcactccagccagggcgacagagcaagactctgtctcaaaaaaacaaaaaaaaaaacaatttggtgccgcagatactttgggggcaagtagaatggagatagaaggaacagacagtgctcaggacagcagtggatgcccgcctggtgttttccaagaccatcaagaggtggcatggctagagatgagggagtaggggaagagaagagggtgaacaccacaagcctctaggccattgtaaggatgtcttttgctctaaggcaagtcagagtaagagtcttagcagagcagtgagctcacctgccttctgtttgaaaagcgttaactctggcgtctgggttggtaacccactgtaaggggtgggggcacggaacatcagttactgctgtcgcagcagttctgttaagggatgacggagggtccgtttggcccagggggtaataggaaggtgagaggggaggagactgggtgccgaaatggttctaaagatagagccacggtattagctgatagataagatgtgtggtatgagagagaggaattgagaatgacacctagatttttgacctgagcacctgaaggatgaaggagctctcaactgagatgatgaaggctgtgagaagagcagactgggctagggatggaatcaggagttcagttctggagatggctttaagatgcttgttagacatcaaggtggaactgggaatagggaggcagaggaatgagcctggagttcaggagatatgtctgaattgaaggtaggaatttgggagctgatggcctgtaactgagatcactaagaaagtaagtgtggttacagaagagaagagggtcaaggaccagttgctgggtattttgacagcgagaagttagagacaggacagggcagggcccgctgggattataggactggccagtggatttagcagcatggaagacatcagtgaccttgaggaggacagtttcagcagaatggtggctacacaaacctgatccaagtgggattaagaaaaaaatgggagaaggctgggtgcagtggctcatgcctgtaatcccaacactttggaaggcccgaggtgggcggatcacttgaggtcaggagttcgagaccagcctgggcaacatggcaaaaccctgtctctactaaaaatacaaaaactatccaggcatgatggctgtttttttttttttaatttaattttcagttctgggagtccgaggcatgagaatggcttgaacccgggaggtggaggttgcagtgaggcgagatcacgccactgcactccagtctgggtgacagagtgagaccctgtctcaaaaaaatttaaaaaataaaaagaagggagaagaattggagatagcacatgagacacctctttggggagttttgcttgcaaagggagcaaagaatcggggcgttgctaagcggggagtggggtcaagtgtcctttttgttgttgttgtataatcacttttaaaaacgtatatattgtagagcaatttagagccacagcaaaattgagcgggaggtactgagttcctgtctgtctccagccccttacgtgcagagcctcccccgttctcagcatctcccaccagagggtacatgtgttgtgattgatgagcctgtaacagcatggtctttaggctggtaaggagaatttcagccaaaaatgtaagaagtaggaaaatttgtgtttgagattctatttaccatgctataaaaggttgttgttgtttttttttaatttttaacttgtaagacgttaagtttgttatttatatattctttggaaaatttttagaaagttccattataccaagttatctttttactttagccagtgcagtgattggaagtaagttacagtttcatgaaatttagtcataaaggaactttggataattttcaaataaataactgaccttttctccctcaggtatttggttatggaattaatggatgctaacttatgtcaggttattcacatggagctggatcatgaaagaatgtcctaccttctttaccagatgctttgtggtattaaacatctgcattcagctggtataattcatagagtaagtagtgatgtattaattttatttttaaaaacaatcatttggttgtcataatcctttacatacaaaataacatttaaaaaaaattgttaggcttgaaaatccaaatagatgatggaatcatatggtgttttaagagagtcattctaggaggcatctgtggagctgcctggcctgccaggctagaccagctgctgtggacacagccaggtactgcactctcagtcagatactgcgcaagaatacattgttttaaacgtttcattttaaagtaacttaaaacttagagaaaaatttcaagaataggacagagaacttccaactaccatttatctacattcacctgtttttaatatatttgccatatttgaaatcccatttttaatgagcaaggaacttaaaggccaagtagtcagtgagacagctgcttgagaactctctttcttaaataatgacccacatatccatttctcttatcctaaaattctgccgtgccagcttccctgcatcactggtgggagtggccagaccctgcaccacaagggttcagagcaggcctgtgggctcagcagaggccgggatttggataacagtgtgactgtactgtcaggaaaaacatttaataagctagggagcgataatataattaatataattctctctaagctgattttacaattttttgttattattacttgtacggctgtgtaagcagactatcatgatagattttttttttttacaatttgataccaatacttcagtagcaaagaaaatgaaataaacttcttcctgccaaaaaacagtacatttttcataaaaaagaaagatggaattgatgtaataggtgaagaacaattaaaacttgtcaaataagaccagtaagaaaaccccaacagttaacaaaatctgttttcaatgacatattacagaacaattaaaaagctacataaaaatcagtgttacctacttattagaaatacattttaattcacctgtagatccaaaaacatttagacatacagacaaaattttgttcaactgacaaaaaaacccacactacctattggattcatgttgcttaaagggtatctacagaattctcacctcaatattttcgtgttaaataaggtggaaatcaacagtccagagatggtcattagaaatgagccactgacaaacacaatatatttataacttgtataacatttcattcatgtgcatgttttgagcattgtggaatatttaatttgcatcaggctttccaaattccttaaatttataagatttgttctcagtgggagttctcagatgacttttgaaataattattaaaatgaaaatttatttgcaaactactagggtttagatacagaataccttcttgtatttaaagatccatctccagtttgcatacatcatgtctttcaatgtgccggagagaaacaaaggcatccccacgttctttacatttatagggttttttagaaatgagttcttttatgtcttcaagtagaactggaaagactgaagacactaccacattgtttacatgcatagaatttttcctcagtagtagttttgtttcgtattttcaaagggaaatggaagagttccatgtgctttttaatgtgctcagaggtaactggaacatataaaggcgtcatcacattcctcatatgcatgttatgtaaattatactgttttcctccagtataatttctttcatgttttcaaagataactgaattaactgaatgttttccccaaatccttacattctcaggatttctacagagtatgagttttttcatgtttacatacaggactggaatatctaaaggctttgccacatgccttacagtcatagggtttctctccagtttgagttctttcatgtttacatagagaactggaatatctgaagacttcaccacattgcaagtctgaagacttgaccacattccttatagtcaaagggtttctctccagtatgagatttttcatgtttacctagagaactggaatgtctggagacttgaccacattccttacagtcaaagggtttctctccagtgtgagatttttcatgtttacatagagaattggaatgtctgaagacttgaccacatcccttacagtcaaagggtttctctccagtgtgagttctttcatgtttacgtagagaactggaatgtctgaagacttgaccacattccttacagtcaaagggtttctctccagtgtgagttctttcatgtttacatagagaactggagtgtctaaagacttgaccacattccttacagtcaaagggtgtctctccagtgtgagttctttcatgtttacttagagaactgaaatgtctaaagacttgaccacattccttacagtcaaagggtttctctctggtatgagatttttcatgtgttcaaagggagctggaatgcctgaaggtgttaccacattttttttttttttttttttttgaaacagagtcttgctctgttgcccaggctggagtgcagtggtgtgatctcggctcactgcaacctccacctcccaggttcaagcagttctcctgtctcagcctcctgagtagctgggattacaggcacctgccaccaaatttggctaatttttttttttttttttttttagtagagacgggatttcaccatgttggccaggctggtctcgaactgctgacctcatgatctgcctgcctcagcctcccaaagtgctgggattacaggtgtgagccactgcgcccagccacattttttatattcataaggtttctctccagtatgagttctctcatgtgtttggaggtaactgaaccgactgaagcctttatcccatttttgacattcattgggtttctctccagtatgagttctttcatgtcttctaaggaaactgtgttgactgaaggctttgccacagtttttacagttataggatttctctccaatatgtgttctttgatgtcttcacatggagcagggatgactgaaggctttgccacatttcttacatttatagggtttctctccagtattatttcttttatgtttctgaatggaactggaaagagtgagtcttttaccatatttcttaaacacatggaagatttttcacactgtgagctctttatgtctttgaaagtaactacaaaaactgaatcgtttcccacatttcctacattcatggggtttctcttcagcatgagcacctttatggttatgaaggtaaccagaatgtccaaaggctttatcacatttctgacatttataaggtttttccccactgtgagttcttttatgtttttgaaaataactgcaaaatctcaaggctttaccacctttcttccattcacagggtttgtctccgttgtaaattactttgtgtctttgaagtaaatagagaaacttaaatgtcttcccacatttcttacatttatgaggcctgttaccagtgtgtgttaccatgtgtctttggacatttgtgagagaaatgaaggttttctcacattgtttacatgtgtgtggcttcaccccacgtttctcccattcatatagtttgtgtccagaatgagataagatgtgcctattaagggatgaaggacatgtgaagacttgtccacacacactgcattcacgtgaatttacatcagcagaaatgctcttcttcaggttcagatttggaatctggccgaatatttctccacaatgactaccttctttacattcacagagtctttctcccacaggacttcataaattctttccagaattattgaaatgactttcactgttctggtcttcccatttgtttccatttcctggcttccaggattctatggcatcctgcttagggatctccaaggtcacagggtgacagtctgtggcagagccacctagggcctcctggcccgaattttttctaaaaaacaattaaaatactgagtgagactagaggcagagataatataattttatcggaaatagatattcttagcattccctggattattactatactaattttatcgacagattgccattagattttatgttccaacagcaagaggtcatcttgctgaactgaaatctgtggggaagaagctagtgagagagaagaacagcagagcctgttactacagaaataagcagatgggttttagatggtggagtggtaataattttttcagatctcttttgccaggaaagattggttccatcacagccagtgaaggcctcccttgggggtagaccccaccgacccacagagggcagggttgtctcgtctcaagcctcaggtctgtggcccaagggcagcgtcagggatagctcttgtcctcccagggctagctgacagcctcccatctgccatctagtgtactgttttttaaaatggaacctttgctgccatcagatggtcagttaaaataatatattggtgactttgctttaaaaatagtaacactaggcttctgaattaaagatctcctgatgtaccattctatttctgttcctgaagtttccacagaccttcatatcatttaaggtactcttgatatctcttaaatacattttatttatgctttagaataatttcccagattattagtcttactacattaggccttattcattttataaggggaaatggtttgtctgacttgttcccccttgggccccaaggtaagtgggaaacaatggcctcctgtcactgggggctttgtgagagctgcagcgtcggcaggtcttttttatggaatagctggtgcctgcagcctgagtcagatggggcccaaaggagtgtttggtttgcccagcacgaggtatagaaacctaagaagccttcagaaaatggccccgttgccatccctgcctcctgctcaccatccccacccacctggcatcttgctgtgtcctccctgtcaccttgttccctgctgcttcccacatccatggccttgccaggctctccccacatctgtgtccatgtgggagagtgatgcacgctcactgtggggaagttccaaacattgcacaggtgtataaagcaaagggggaaactccctcttgccccctgccccccccgccccacccctgcccacatcccaggaagggaggagccctaagttaactgttctgtgtggactgcaccatcctttgttccatctacagtaccatgcacagagatagacacacttttaattttgcctattaaaatggtttaatacaagacataaattttaagtattcgaaagataaagttttgcccatgatatcccaccgaagtatatactttatataattcaaaaaatgaaatgcaagtaacccagccctctgttagcacctggagatggccagtgagagcacgctggtgcatgtcctgcctcactctgcatggcacctctctgttgactgatgttaataccagcatatctgtccttatgtccttttgaacttatatccttcaaagacaggatcaccttgtatataactgtgtagcaacttgctaaacaggtagcttggtttgttttttttaaatcaaggatcaaatatttctataaatatttatgaaaaacagatacctccacctctccctttatttctctctccctagaagcaaactccttcagttcatttagctgattattttggtgtctatttccatattgaaataatatgcttagctctttcttcattgatcctttttcagtttggggcataagatgctgatttagcttcttaccaacccagccctcaccctcggccttcctcgccctcctcccaggctggtggatgtgatggtgtttagctcgttgcatcatcgtgagcgtgtaaatgctttgcacagcaggccttcccctttcaccttttgttccctggagttaacaaacacttatcctctatttgtgtgaggtttttgtttgttttggggggtagtttctgtgttcttggtggtaattcaaccctaactcttccatcaggcatctgaattttctctcagcacatgcagatgtcttgggtatttcatcagtttcatcttctcaggaacctctcccaagcctcagccctgttcccctctgcactggctgccgctgcacctgctcaaaggagctgtcctggatctcccttggtgattttgtgggggtttccttcatctgcctcccatgttggattccttgcttgctgtccttgtctctcagattacccccttgttttggtgggatgcatcctccaaaagcttcctaaattgccacaggggagagaaattttttgaggcctcaaatgtctgaaactctttattctgccctctcacatgatgagtagtgtggttgtgtgtagatgtgtgtagaattcttagttacagatcagttgcgctcagaatggcggaggcagtgcctgtggtagcaaggcatctagcatggctccggagtttcttagtgccatctgatgtttttttagatggagtctcgctctgtcacccaggctggagtgcagtggcatggtctcggctcactgcaaactctgcctctcgggttcacgccattctcctgcctcagcctccctagtggctgggactgcaggcgtccgccaccacgcccagctaattttttgtatttttagtagagacagggtttcaccttgttacccaggatggtctcaatctcctgacctcgtgatccgcccgcctcggcctcccaaagtgctggattacaggcatgagccactgtgcctggctgatgactaaccttttttaagtgctgtggttttgggttttggtttggttttatctctggaaacttttaaactcagttatttattccttgtattctgagatgttttgatgtatgccttgatgtggacattttttctttagttttgctgggcacttggccttcagtctggaagcacatattatagaggtctgagaaatttatatcatttctttcagaatgtcctcttaactccattctttattctttttctctgaagcacaagttaattgacactcatttgctcttaaaagttcctttttacagcattctgttcttgttgcatatatatactatcatctctgaggataagcttttgttgaagggttttatcactccctgcattgtctttctctactgagagttccttttttagtgtgttaggtccctccctgtcacacgcaaggctttccccaaatgtctggttggatcatgtttaagattgaaacattaggccaagcacggtggctcatgccagtaatcccagcactttgggagactgaggcgggcagatcgcctgaggtcaagagttcgacaccagcctggtcaacatggtgaaactctgtctctactaaaaatacaaaaattagctgggcgtggtggcaggtgcctataatcccagctagtcaggaggctgaggcaggagaatttcttgaacccgggaagcggaggttgcagtgagctgagatagtgccattgcactccagcctgagcaacaagatcaagacttcgtctcaaaaaaaaaaaaaaaaaaaaaaagattgaagcattaaaggctgactggaagtgctgagtgaatgggtaaattgttaaagaatgggtgtctcttggaccacaggcagccacaggtgtcaccttctgtaggttttttctctgggcaccatttaatttctctggaaaaggccccttcagtcccttggtggagggatgtaagcctggctgctggggtacagggctgtgcttctcatgtgacagagcgcaaactcaccaggcagccctgttgcaggcaggcctcgccgtgccttccctgttggtacccacaggactgtgcatgcggcgcctgtggccctgcacctggaagctgggcatcagtttctctgcgtgaagggccagcaggagtgaggaaggagtggagcctcacttctgggatggagatggggatctgggacatctactacgtacttggactttcaataaaatgaaaacttctccaagtgctacccttgcctcgttctgcctccatagcacctgcagttcacttgctgagcctttcctgggtgtcgtggccagttcaggaggttggcatttccttctgttcagcaaggggattccaccacagggcgnnnnnnnnnnnnnnnnnnnnnnnnnnnnnnnnnnnnnnnnnnnnnnnnnnnnnnnnnnnnnnnnnnnnnnnnnnnnnnnnnnnnnnnnnnnnnnnnnnnnnnnnnnnnnnnnnnnnnnnnnnnnnnnnnnnnnnnnnnnnnnnnnnnnnnnnnnnnnnnnnnnnnnnnnnnnnnnnnnnnnnnnnnnnnnnnnnnnnnnnnnnnnnnnnnnnnnnnnnnnnnnnnnnnnnnnnnnnnnnnnnnnnnnnnnnnnnnnnnnnnnnnnnnnnnnnnnnnnnnnnnnnnnnnnnnnnnnnnnnnnnnnnnnnnnnnnnnnnnnnnnnnnnnnnnnnnnnnnnnnnnnnnnnnnnnnnnnnnnnnnnnnnnnnnnnnnnnnnnnnnnnnnnnnnnnnnnnnnnnnnnnnnnnnnnnnnnnnnnnnnnnnnnnnnnnnnnnnnnnnnnnnnnnnnnnnnnnnnnnnnnnnnnnnnnnnnnnnnnnnnnnnnnnnnnnnnnnnnnnnnnnnnnnnnnnnnnnnnnnnnnnnnnnnnnnnnnnnnnnnnnnnnnnnnnnnnnnnnnnnnnnnnnnnnnnnnnnnnnnnnnnnnnnnnnnnnnnnnnnnnnnnnnnnnnnnnnnnnnnnnnnnnnnnnnnnnnnnnnnnnnnnnnnnnnnnnnnnnnnnnnnnnnnnnnnnnnnnnnnnnnnnnnnnnnnnnnnnnnnnnnnnnnnnnnnnnnnnnnnnnnnnnnnnnnnnnnnnnnnnnnnnnnnnnnnnnnnnnnnnnnnnnnnnnnnnnnnnnnnnnnnnnnnnnnnnnnnnnnnnnnnnnnnnnnnnnnnnnnnnnnnnnnnnnnnnnnnnnnnnnnnnnnnnnnnnnnnnnnnnnnnnnnnnnnnnnnnnnnnnnnnnnnnnnnnnnnnnnnnnnnnnnnnnnnnnnnnnnnnnnnnnnnnnnnnnnnnnnnnnnnntcacagtggaagcccaatggaaactgaaactgcccccaagatagtaaatcaaaaccagatcacacctgcagggcccggggtgggtggaggacactagggccaccatggaagctcaggggagcagagacagtggtatcttgcatcccagtctaactcattagtccagcccttgaagaagctgcatggattctggagaatgaccccagacagccacaggcttacggcactggcagtcctggccgcagctgctgtgcaggtcaaggtgcagttgttgctggagcagattaataaggcctcaggtctggcatgttgatggggcaaatgcatcctccacactgattagaagagaggcccagacagcgcccacactgctgcaggctggacagcagtgttctctcacagccttgctctaagcctttgctaacgttcccaccctcccataacatggccgcaagagacctgccccagacttcgcttatgccctgacccctgacccctgacctcacgaaccctgcaagtggaggagccctgagagtgtttggggtcttcgggtttcagtgtctacttagagctgtgtccattcatcctcaagagtgcctggctgttcttacccggtgggtggccacaggtacctgtggggaaggaccaggcaaggccagacagtggacacctgtcatgatgtgctccttcctgggatacctctcaagcagtgggcctggatcccagagttgagcgggcagtgggggaggtcagcacctgccccactcgtgctgcgggtgctgtgggtaccctcactgctgcccacagggtagcgttgggttccaggcattttgggagccaagccccgatccaggcgtcacttggatctgtacttggcatttgtcttctttgttctgagtgattttcaagacttgaaggggcagaactgtctttcctctgctgtcttgaaattgaagtgaggcgttgggaagctgcctcaggttgtatttcgggggtgactagagagggtcccagggtgcggggagagcacctccttagccacctccccattggccacacagagcacccacacaagcttgggattttatcaccacagtcttccagcagacggcagtaaagtgtgcttttcctgttaaattagtatgtgatgacagttttttgacagatggcagtgtcttcagatgagcgtgtttctggcgcactggggttcacagagctggcaggcagcccgtggagatggttccactgctgcgtctgtccttggtagaaccaggctgtccttgtcttccttgctcctgtggccgtgctgttagttctgggtgggctaggcttcagggcctgctggctggggaagtgtgtgcatttcacacctcagaaatcagcctcctggagagaaagtgcccactgcacaccctctgtggcctgaggaagcgcctgtttctgcttctcccgccagcaccgagtctgcttgctttccatcgctgccaagtgatagactaaaaatgggcattcattttgggtttttaaagaagatttttgtgagattgagcattattttatctgttagtaatttatgttctaaaatgcctgttcttgtcgtattctttgattttaaaaaaggaaacaagaagcgaattcgttcatttggtcttagctccctgactgggtcctcacagcggagcgtccctggttgaatgtgggctgcttctccccggctttccttcatgcagggaggcagcccggcttcttcctctcaggcctttctgggaaccgggggtgtctgcacagtactctaaggtggaatggaggggctggggggggcctcttttggggccaggtagagatgaatnnnnnnnnnnattgtgactgcatttttaaacattatatgtatatcatttaaatcttacagaatctaggaagcctagaaacaggtcacttagcagcatggcagtgtaattgtacctgttgtcaatgtcgaaatggcttcctgcttgccctgatgacagccccacagccttcactgaggcacgcctgcaaccccccttgtggcccatcagttgggatgtcttacaggcaggtgctaggcagtgttattgaacctgcaacttcccgggtaaagtatcctcatgccttacgccatgtcagtggcttggcagtttgacattgcaggtgcactactcttgtgaaaagaatgggtgtgggttgtttacaagtcacagtttctcgagtgagtttgcaggccgaagtccccaggcaaaagtcaaattcctaaggcctgaggaaggggctagggtggaggatcagcaggaagaaaatcccttagttatgagggaaaaggttgcagaagttgtgttaaggctttgcaagtcgggtggaatatgatgcatgtcttcattctgcagacacttcccaagtgtctgctcgcgccaggcgtgcttctgagtgctgagagctcacacagtaagcactggggagggaagagaggtggcaaccagaacatgagcaggtgagtttttgtgccacgtacagatggagacagcagcaccagtgctggcgtgtctttgtggcgaaggtgagaagattggaggtggatgatcatggaattgctcttccaaggagagaaagagccatgggaagattccaggatcagatgattctagacctgtgctgtccagtatggcagccactaaccacaggaggctgtggagcactcaggatgtggccgtgctgcagttgtaaaatacatactggacttncaaggctcagtactaaaaagagaatgtaaaatatctcagtatttttcttatgttgattacattttgaaantgacatattatggatatattgggttaaaaaatatactgtatgactaaaattaatttcacctatttctgttcatgctgttgaacatggctagtagaaaatgtaaattatacacatcgttcacattatatgacattgtctgtggaacagcactgccctggactgacagagagcatgaggaccttagcaagagagagtcagactattggggatctcaagtccaggcgtggagagcaggagggggccgtgtgtgttggactgacagagagcatgaggaccttagcaagagagagtcagagtattggggaactcaagtccaggcgtggagagcgggaggggggcatgtgtgctggacgtgtagatgcatggatggagggtagataggacagcctgagggcctgcgagaccacagaaagggcaaatgagggccatgaaggtttccactgggggtgaggggcaccatctgacggctttaggctgatttgttttagtttcaatttgagagtaagattttccaaagttgttcccaaatctctgagttcagttcactccctacactctcacactggcttcacgaccctcacggatgtgaagtagtttatttagcatgcttcattcattttactaatttaagccatttctttcctaggatttgaagcctagcaacattgttgtgaaatcagactgcaccctgaagatccttgactttggcctggcccggacagcgtgcactaacttcatgatgaccccttatgtggtgacacggtactaccgggcgcccgaagtcatcctgggtatgggctacaaagagaacggtgagtatagccggggctggaagaggctgggatgtttagaaattgctctagcagtggtctcgagttttttctctttcctttgaaccatatgatatatactgtggggactgttacacccagaatatagcatgatccagagataagaaataattaattgtgtttttccatggttaaaatcattctcttttaaaaattcacttttaaaattgttatttttgaactttttaatcagagttaagctgtctatagccaagtgtgcaaatcctgagtgtgcagctcagctgaggtgagcacacccacagcagcagcagctctggcctccccatggcccctcctgatcccacgaggctggccaatctcctgatctccagtaccatggatcagctttatttgttggtctgcatattatttttttgaatttgatgtaaatagaataacacatgttttcatgtaaaattggtgtctttttacatcaaaacttagcttattctagcaatatcagagctctttgaaacttgtcttttagcaaatttgttgaaaataacgaaatcacgcttacttatttttaaaaagactgaaagtttgcccgggtcatctgaaatgagttttgctacaggttcatcttgctgcgttgtagcttgtgttcccaccctgaggggcacagcttcatgtgcttcctgtggaggggagacaaaacttgatcccctgttcacttctcccctcggcccgccagcagggcgcttagaggcctctgctgtctgtctgaggccccacagatgagggtgggcaccgtggaagtctgggcccctctagcagggcctcacctgcagtcctgcaagccagccagcctgtgccgccagtgagtgctgctgcctttctgacggggcagtctagaaaatgatcgctcaggaggtgtggtatcaacaacgcacagaggctcctgccggcaagctagtgtaccgggtttgtcctgggagggggtttgaagaaaaaagatgggggactctagctggtttttaatcccctggtgtttggtagtggacatctggtctgtcgggtgcatcatggcagaaatggtcctccataaagtcctgttcccgggaagagactgtatccttcacaggggacccggtacttggccatggaggctggggtgggcatgtggccctgaaaagctttgtgttcacaggcacttcttgtttctggttttttgtttgtttgtttgttttaagctataaagtattggactctttggcactaaaaccccagattgctacaaaccgaaggctaaaatagaggtcagcaatcattcatattgtgtaaaatgtcacccttagctagcaatttatttttccatatttgtgtgtttagtgcactgttagaattccttttcctcacttttgttttgttcatggcacttcataattttatcatttcattttattttcagttgatatctggtcagtgggttgcatcatgggagagctggtgaaaggttgtgtgatattccaaggcactgaccgtatccttccccgcgaccttggccccgccatgctttcttaatgcctcaggcagcatgaccacctgcttacacgagcgctcacgaggacaaagtcgtaaaatccactccagactgtgttctaaggggggctttactgtatttgttaattagtgtcacaagccaagtggttcaatttcattctttatttttaacttgactacctgtgatgattttgagacttagagttaggttaaaccaattatattagctcttaattttgccaaaaatagctggacacatagaagaaattatttactctttgataagtatattctgatatttaaatgaaaatactgtattatttagtttattccattaatttaactaggaaagatgctatctaaatttaataggctagtgtgcttgtgtgctttaattaagtactattttgttagttactggtatgcattgaaatattttcccccaaagtaagaactgaagcacattacaaaagacctaagtgaaagagattaaaatgaaaattttgtgaggaacaatatgttaaactttcttgtttgttactgtgctgacattttgtagaattttttttaaaaatctgtctagtgggttatattgtgacatactggggaagtcaaaataaatgtaaaatgaaagagataaactcatactgtagtcagcaagtcatgttagagatacagcagaaaggagaataactactctaattgttacaatagccttctttcctcatttgccattcttccatcctcagtattttttaccctaacatggttcttcacatcttccctttttcatttgtgttttaaccacttagtttttcattagtctttgactttgttttcgttatgaaagtttaaattggtctccatccttgggcagattgatggttgcttttaaggaaatcaagctccatagtcagtgttttgtatgtatcttaggaaaataatttcagattttaataattttatcaaagtggtctccttataaattcttcacagtgcaaacttgaagtgaaaatatttttattcctctcattttattgacctttctttacattttctatatcatagattatataatatgtcaagttagatattttatttgttctactaaattttctagcagtttccatagcctcatctcagattcacttgttgcaacctataaataaggacgtctttattttgcaagtaaacttaattaaaaagggaaaagttgaaaaattaaaagactaataatttagaaatatctacttaatgttcagtttgtctcaattcttactcattttgtgccattccttgttttattacaaaaagttttcttcaaaaagtacaaaaatgaaaaatgtgagtactttttggtgcattttagtaagtaaaattaaaattcctgctatacatatgaacattaatgtcagtaattaatggtgttatatataaggttacctaatgttattcccaaaagccacacagagtttaacatcattttctaaagaaaattttgccaactctttcaaatattagattgaaatttgggagatagaaaaaagttgcagaaatcagactgagggtctcagagatttgctttaatttgcgacccggggtagaaaaggaactcctgtccctgcggtggtctatgagaaagagaaagctttagccaggccacctcgggccccagctcagactcctccccttggcagccatgcatccttgagaaatttagggcctctctgcgccttggtttccccttctgtaaaatagacctgcggtctgcctgcagcttcacgagagttagacgacagggtccactgggcttgtcggaattattgttccccttcccccgtccctctcatctgtcccccgtccctcctacctgtaggatgctggggtggaggcctctcggggaatctgtgggtctcctctcacaactggtttaatttctagtcctttatcattaacccagcagatatttctctcacctgcccatttctgggtgcctagtctgactgagatgcaaagaggctcctcccagctgctgaattgagggtggatcgtcaagggcagggcagagcaggagaacagagcagaggctgccatcatccagaggagaggtggaggcccccagcaggcgggtaggggtgtggccggggagatgggcttgtactctgctttgaagctggacccttcaaggagccttgctagggtttggagatgtctgttagacagtggaattcaggggcaaggtctgggatagagagatcaaagtgggtgtcatccatctgtcggtagccttgaagcctaggactggtagcgagcacttgcaggggaggaagagaccaggacccgggacttagcccccttgaggtggagggacaaagggaatagggaaggaaatggagaaggcactcaggtgacccctcctcctagagcgtggtgactgagggaggctcattcacatgaggagatgaggacgggggattggcccctgggccttgtgatggctgctggcagccatgatgggcacagcatttatggagtggagggaagaaagcctgatgggagtatgtttgagagaaaatgagaggctgggaattagagacacaagtgtagacagctcttttttctttccttttttttttttcctttgaggcagagtctcactccattgcccaggctggagggcagcgatgcgatctcggctcactgcaacctctacctcctgggttcaagcgattcttctgcctcagcctcccgagtagctgggattacaggtgcccgccaccacgcctggctaatttttgtatttttagtagggccagggtttcaccgtcttggccaggctggtcttgaacgcctgaccttgtgatccacctgcctcggcctcccaaagtgccgggattacaggtgtgagccactgagcccgaccgacagctctttatggaagtttttgctgcaaataggaataagaaataaagcgataggtagtgagggccaaaggaaagcagctactgcgttaacatgggagaaaacaccatcatttaccaacgtggtggaatgtattggtagagtgcaaaatgtcgatgatgttggagaaggaagagttgagggagctcgtccttgagtcagcacgggggttagggtctagagctgagcaggcttagtgtagccgggagtccagatggttgctgtgtggcaaatggcacacagatgctgggtggatgcatcctgggaagtctgtgggagtgagcaggcagaagaggtatcaaaagtataagtgggctgggcgcagtggctcacacctataatcccagcactttgggaggccgaggcaggcagatcacttgaggccaggaattcaagaccagcctggccaacatggcgaaaccccatctctactaaaaataacaaaaattagccgacagttacggcaggtgcctgtagtcccagctacttgggaggctgaggcacgagaattacttgagcccgggaggtggaggttgcagtcagccgagatcatgccactgcactccagcctgggcgacagagcgagactctgtctttatttatatatgtatatatggcagaaggaaaaggtgtgagacagttttcacattttggctaaataggtaaatgtgggcataattctgatttgacaatatgtatgaaccaggagtaggaaggagaatttgctagtgaattgaatgccagaaacccatttcctgagcgggtcttttggaagtataacattttggaagaactgagttcatgtactggttccctaggttatttcatggtgatgtaagttcatttttctaagacatgcctcagtgagcacttttttaagctgctgttgatgctatttttttctcacttgcattctcttgtatagcgagtacagtttcagtgtcactttcccacatgtaatcctaattatcccaagcctaacaagcaccctgtggaataggcaaagctggtaatgtctgcattgaacaaataaggaaacagaccccaaggaagcctgactttcctgacacactgagtgtttaatgcagagttgagtctgaaacccaggtcacgcactttgaaaggaaataaaatgcattacctagggatcgcagtgatggttgggaagagtcagttccaagtaaaatagagcatcatttgaaagctgtcgctgggctcagtctaagcccagttgcttggttcccagctgtaaactgaggaggtcagataggtctctccacaggtcccttgagatcctctgttctttagagagctgtgaatgaatctaaggtagcattagtatgaaaactgatttcaatttgcttatgtaatgtttatctaatttcgtgtttaatcatttttgccataggtattcttagttataagataaactttattttgaactagagtgggaaggtgtgtagacttcattgtgttgatttaataaactgtgatcatagtttatgaagatgcagagtgtaagagttttaaaaaatagtgtaacttggaaacccaaaccttatctgaatattatttcaaaattccgctgctgatccagtggggtggcctagtcgataggtttaaatattattcaagtgatgctgccgcgtgtactgtgaatacaaggtacttcagttgtattttcctcaagagactccttagatattgatcagtggaataaagttattgagcagctgggaacaccatcagcagagttcatgaagaaacttcagccaactgtgaggaattatgtcgaaaacagaccaaagtatcctggaatcaaattcgaagaactctttccagattggatattcccatcagaatctgagcgagacaaaataaaaagtaagatatcctttttttcttatacttgtgttttgtaattcaggtggtgctttcactctttcatgtttgtattctaaaaacctgtgttttgggagagaaagtcattttaggcctgaagtctgaggtacgaaggcactgaggagagaaagcttaaaggtctagaagctttatcctctataagatggcttaattgaagcctttggccaaaataaaaataatcaaatcagtctgaaagaatcttatgttacagttacagcaactggaattcaaaaagttttcaggtaagaagaacacttaatgcagattctagagtcagaagcgatgtgacagtcgttcgatgaaaaaggtccttgctccccaccttctcctgcaccctttactacagtgtgattgtttaaggaaaaagaaaagatttgattctgtccgcatgaaggtaaactgtgccttaatcagaaaagccccagtctttgcttattcaggttgtgaactttaattgccaaaacctaggtgagccttatatttaactaagttattgaacttgtttttctttttcctaaataccagtctgtagattaaaaaaaaaaaagtgtaagttgccagcactgtatacagctaggccagccagaagcatctgtgagtgttttatcctgtgggaatgtgagattgttgtgtggtttaaaaagtctgttctaatttcatttcgatgtgacttagagaaaaatactcccccgtgcctcatgcccacactctgggcagtgccacccgcagcttggcaattcccaccttccttgctgtggtttcccagccttgggccctgcccagacattggtctgaggctgcctggtgctcttccccaccaccctgggggcccaggtttctcttccccttgcaggtccagaggcgtaaaactacatttggaaacctggtttgtcatgaaagtggacatttgactttttcttaaaaatgtttgggttatggccgggtgcggcggctcacgcctgtaatcccagcactttgggaggctgaggcaggcggatcacgaggtcaagagatcgagaccatcctgcctaacacagtgaaaccctgtctctactaaaaaaatacaaaaaattatccaggcatggtggcagacgcctgtagtcccagctgcttgggaggctgaggtaggagaatggcgtgaacccgggaggcggagcttgcagtgagccaagattgtgccactgcattgggcgacagagcgagactccgtctccaaaaaaaaaaaaaaaaaattttggggttatattcatcttgaacctatcaaacatttctcaaaattaatatatctttgttctatctgtgttgtcatatttagttctttattgtatgattctgtttgtttcatattaacagcattgatttaatatttgttgtcaccctagcaagtcaagccagagatctgttatcaaaaatgttagtgattgatcctgacaagcggatctctgtagatgaagctctgcgtcacccatacatcactgtttggtatgaccctgccgaagcagaagccgtgagtatctgttttgaaaagatttatatagagaggccaggcttatatttccttggatcttgtctgtccgtccagagtggctacatatgggtagcaagttctccatttgggggctcccagttacagaaaggccaagtgttgtctgagacctgggtcgcttgctcttttgctgctggagccccagctcagagtacctcgggaatgaacttccgctttggtgctaccagtctccattttgcaaatgctgctgtgagctcatagtttattaagcatctgttctgtgccattggctttggttacatcctcttgtttaggccactcaaccagagaggctgagcaacttgctgaaaaatcacacgtctgtttatccttccctaaaggcattgtacctcctggttcccccgctggaggagctccactcgatgagtttggtgctcacgtgcgtgtttctgtgtcagcactggtgtgagtgagctttagctgtgagggaaatcactgcgtagtggcaggcttccttcatgccatgagtgaaatacatgtttatgtcatggcctgtggttttgccatcagtttaaacattgttttatataaaaagaatccaatttataagcagacttttataacagtccatttatgagttggacattggatttgggagttctcccatgaagaaaatgtaaaatttgttctaagaaacaacagtaccttccatagctgccagcacagtgccttgtccataatgggtctctgggaaacagcctgtgatgatgagtttctaatgacatctgggcagatgtctgcgttttgaggtcaggtgattattaagaggaacataataactcttctttggttaactttttcataattattttgattctaaagtttatataatatcacatgacaaatctttattaaaccacgtgttgaattaaactaaatccatatcataaatagactagaagtcttccaagcaattttaccttttttagtgcctcattttttttttgaggcattactgttgactttacatatgatttaatttttagccaccacctcaaatttatgatgcccagttggaagaaagagaacatgcaattgaagaatggaaaggtaaagatggagcttattttgatccttccttatgacatttcttccgatcctgtagagcagaggcttttcattttgtgacatttcccttcaggaaggggcaagaaaccctgcaacccacgtagcctctttctccccagtttccagtagaaaatgaacttgaagagaacagagttagagaggaacatttatgaacttcttatcatttgcttcaagagggaaaaataatatttttttcatggcttttcacatattgatttataaactgagcttagcaattgtatcatacttatattgattgatatgtttttaagccatgtagttgtacatatgttttaaaatctagtttgggggaaattgcagtttgaaaatatgcaaataggtattattaccactataagattaaccaaacaacccacagcaaactatacctgtaatgaagaggttgaactaacaatttttcattaagaagcaggatcagtagtaactgagaaccacagtcagagtcagtcaacactgatgagggtcatgccccagggccatcctggggtgtgggagtgccggttacctgtgtgtgcccgtgctcagcagtgcatgcacacagcgtgctcactggcctcagtcaatgctcactggcctcagcgaatgcttgcaacgtgctaatgttggtttatgaatactgacattttaggaatccctaatcacttacttcgtaggtaattagtttttcttacagatgaaagttgaggaaaaccgaagttgaaattaagaaaagacttaggcctgtggattcatttctggccagtgtggggggcttctagcccacatgtggatgctggttacctttggagaaccccaagtaaccacatagagaaacatattcaaatgggtgtgagaatatccaatccctcacagtgttctgtgggagccactccacttcataaagcccccttatggatccagaaccaccctacatgttttgctgccttactagttgcattgaaaaagatgtaatgtagtccaggcgcagtggctcacacctgtaatcccaggactttgggaggccaagtggggcagatggcttgaggccaggaattcaagacaagcctagccaacatagcgaaaccctgtctctacaaaaactacaaaagttagccaggcatggtggtgaacacctgtaatcccagcaacttggatggctgaggcatgagaatcacttgaatccaggaggtggaggttgcagtgagccaagaccatgccactgtactccagcctggatgacagcatgagactgtctcaaaaaaaaaaaaaagaagaagaagaagaagaaaagaaaagatataatgtatcaaaacatgaatattttggtccaggtagactatattactgaattgactctatcttacaattaaaaataacaaatcgcaatgcctttgttccagttgatttggaagcagagtttagagatacagtgaaactgtttagaaactgattaagcattttcacttgtatttttattaaagagctaatttacaaagaagtcatggattgggaagaaagaagcaagaatggtgttgtaaaagatcagccttcaggttagtgattgctttaattgattgtatgatatttttctttccctattcaacttttttttttttgagacagagtttcgctctgttgcccaggctggagagcagcggcgcgatctctgctcactgcaacctccgcctcctgggttcaagcaattctcctgcctcagcctcccgagtagctgggactacaggcatgtgccaccatgccctgctaatttttgtatttttagtagagacggggtttcaccatattggccaagctggtctcgatctcttgaccttgtgatccgcccgcctcaccctcccaaagtggtggggttacaggtgtgagccactgcacctggcgtctttcccgattcaacttttataaatggcagcaacatgtgaaatgccagcctggctagcatcagatttaaaaaccactgtgtgaatagccaccctttttggcttgtcatagtggtggtggtggtggatgacattttactgatgtgccaggcactgaactttgttataagcatttctctttcatctttgcaataactgctgtcacctccatttacagatgaagaaattgaatttaaagccttttcaatgttgataaccctttgtactggtcccacccaaaataccaatctaagtaaaatggagtatggtattctttttgagaaaattgttgatatcattcttccatttttctgcttgatctactgatcttcatagtggtggaagcctctaatgaccaggtagttgtatgatcatgagactctgatatgagtcgtgttcacttacgtctgaaggattcttcctgtttactaaatgaaacgctcatgttatatcattgtctctctcccactcccactgggaagcatgcacacacgtgcgtgcggatgtgcagagagcacagcttactttttattcttgaattttatgctcaacatgacgtatgtgccaagcatctagagattatataacttcagcaagaacttaggtgcttgttaactgagcacacacgtatgactgcagacgtcgatctcagagagtgcatgttgtatttttattcaaaccagactaaaatatggataataggaaataggatagtttcattcgctttaaaagattaaaatgtcagttttctggagttataaaaccataaaatatacaaggccactaatttttttcctttttctagtatatagtctttatttattgcaaaagatttctttgaaagttgatgctttttttcctgtagatttagtgtttatgttataaattgttacaattcaagtgtctggtgacactggaatcctagtcaggcttaagcttttgtgatactgcattttcagataaatatagctgtgtccttttgatgtctgcttgaaagcagcaggtattttttaagtagctaacatgattatacatggccacatgtatgtttagctactgagaaaaaaagaagaatcttgcaaggaaagacataggaatatgggactcttggcccaaagaaagactcaaggaaaagttcagaaagtccagctgactgacttcttgtctatactcatagttagggttgggaaactgcaaaaggacagagccgagaaatggcctgcagtctcgctgcctggatttgcagcaatgtcgtgcctcagattttattatatttggttttcttagcacagatgcagcagtaagtagcaacgccactccttctcagtcttcatcgatcaatgacatttcatccatgtccactgagcagacgctggcctcagacacagacagcagtcttgatgcctcgacgggaccccttgaaggctgtcgatgataggttagaaatagcaaacctgtcagcattgaaggaactctcacctccgtgggcctgaaatgcttgggagttgatggaaccaaatagaaaaactccatgttctgcatgtaagaaacacaatgccttgccctactcagacctgataggattgcctgcttagatgataaaatgaggcagaatatgtctgaagaaaaaaagtgcaagccacacttctagagattttgttcaagatcatttcaggtgagcagttagagtaggtgaatttgtttcaaattgtactagtgacagtttctcatcatctgtaactgttgagatgtatgtgcatgtgaccacaaatgcttgcttggacttgcccatctagcactttggaaatcagtatttaaatgccaaataatcttccaggtagtgctgcttctgaagttatctcttaatcctcttaagtaatttggtgtctgtccagaaaaagtcgatttatgtgtattaattggccatcatgatgttatcatatcttattcccttttatgctatgatttattctatcttttgtatttcagaagacatataattaaatctatttaataaataaaagtatatagcttttcttagattcgtgatgtttggggctgagaattatcacggctaaaaccaagacacttatgtggacatcttattttctttaaactgttgtctgggatgattgtacattcagctttactgcacgatacaattttaagttttgcttagtgctgcttgaaatcctagctactttatctcttttcttcttggtcttctagacttcttatgaatttaaaatgctacctagaacttcaccttctttattaggtgcgtaacactccatcttaattaaatatgatggcagataggttcctgcatccatggcctaacgttggagtagaattttacaaaatgctcactagagatcactgcagtcatttcctaagtgcttcctttgccagagactggcctgggtcctttacttaccttccctcgttcactttccctcggccaataccacgtgcttgattttctttcttcactggaagaaagcagataaactcctctttggtctgttttcagaggccaggctgattcagatgcctgttgctattgttgctctccattgttgggaggcattccttttcacaagaatgttctgggaaactcttcagaggacgtgaaggaaataccctgaagagtcatgattaactattgactattctctgatttaaaactgctcacctgaaattgatacttttagactttacgatcagtaaagtattcagaattcgtgaagatgctgagtgtgttaagtgtcactgcaggagcggagctgtggggatcacgttttgcctgcctgtgcccatgtctcttcccttgagcttattctgttgctgattcatatcttgtgttcaattttcttggaagcttttcagtcgacattctgtagagtgtgttctgaggaggaactgtgataagaaagtttattataaatattatctaaaatatatggctctctctgcaccagttatatcttattggttggtcatatcactggaaactggaacccttgattagcaaaattaatattgaaataagaaatagttattttatattgtgtcatttggacactttcaagtacaaaatggtaataataacttggattgaggcggaaacacctattttatggctatctatctaaacatcttaaaatggccttctctgtgatacactttcttttaaaagacttcactaaatctatctttaaaaggaaaaacaaaagggagaggttgaaaatgcgcaagctgccctgcactgtgtgatgctccctccccgggagacgtggacgggggacgaggcacccgcagacgcccttctgctcactcgctcctctgtgcattcagcgagccacttgccacagatggagcccgtgacggtgtggagggtttcctggaaaggccatcttccaccaggtagaggcgagcgtgcctaggacaggccacagggctccacagaaatacctcaccccagcttcagggttctctctcctgagcctagatttgccagggtcttggtgccacgcaaatggtttcaaactgatctctatggataaatgctgatgttggttaaagaactgaaaaatgtgctcaactgtctcatcttttctattttatttttgtaatttatattgtacacaacccaggaagtaactattttggacatgtatttttataaaccaggtaatttactattatcctggaatttagactaggtctgtttcatttgttgacttagtttccagccaagaaggaaacgactgtctcccccatgtccaggtctcagtttcaagggcagagtccagagagcagacagagttgtgtgcgagcaggagagcagtctggaaaccctggctgtgcacaccgtgtcagccgtgggcctggagatgggagcaggtgagacccagagccccagtactgagaggaggaagccctcttacggggccccttgcccaccccaaggccgtgtccgaaacacggagcgggtgctgcttcaacccgcatttaacgctgtgtaagtcgcgataaccacgtccgagtctgtctggttgatttctaatgtgactcctctggtatttcctcctggtaataaatacaagtgtgacctttcagattgcatatctcaaaagtaacattgctaatgttttataataaaatatattatgtgtgttttggttggtgaaaataatacagactacattttaaaagataaa

SEQ ID NO: 40 - DNA, 39671 bp, Mus musculus
  source 1..39671: mol_type = genomic DNA
ctgagcgccgcggcggcggcggcggcggtggcagcagcggagcagaagggaaccggaccggaagggtcgcagcgccccgcgcccctcacacccactgcgacggcgacggggcggagcagagcggggcggggcgaccgggtccaggtcgtggagctgggtgccgccagaacgcatcgccgccagcgtgccctccctctgcctccggcgcggcggcgcggagccgaggtgagccgggcgggcggctaggcctggcggggctgctcgggccacgcagggcctggggtgcggggctcagggggtggactgctcggtactgcccggctatccacggttccgcggtcgttctctcccgcctggtgtgtgcagccccagggctgcaggccggctgtctggccgggccccagcagacctgcccgcagggatctgtgggcgcctttcctccagctgtgaggcacgtcgctgcaccccgctgcatgccctggagcctgagctctggtccccgcgaccttggcggtgactgcgaccctcactggccctctgctttcccctcgggagtaatggtagaatgtctagggtttggtcggggttgttaacgggcagtgtaactgtctcaaagcgttagggcagagaagcctaaggcgcacatttgagagcatctgagtgggtaaataaatgctcccttgctgatgtgagtgtcgtaggaactccccctcatccgcttagagtcctcccccacttctgccccccctcccgagccttgtcattcatcttcagtgcccagcaaagccagagtgggccctgcccacctcctccgccactccttcccctcttaacagaagcagatctctgctctcctatcctaagctcacctgccttgggcatgccaaaatcatttatttacctcaggacctttgcacttcgatttctctatgttcagagttgtctataagatttttacccagctgtcttctctcacatcgcttcctcctgtggttcagtgtcttgttataggcgaggcctacctagcttgaccacccttttccctcgcttagtcattctcgctcatcagtttctttaattttccatccagtacctactctggattgatgctatctgatttattgccccgtcctttttgtatagcatggtgagtacaggtagttgtttcatctgtaaagtcagatcagtgaatgaacagtaagaccatccctgcctattattatctctgctttgtccattttgttggtgactttaacttgtgaaacttgtaagcaaacagacgctgattctcactttgtgaaatattttcatgtttttaatctctttctagtagctgtcagaacaatttgtgataaaaaaaatacgttttggtaagagttttgctctggcttccttccacacattcaggagttatctactggattctgtattatctaggtcatgctttctgctgggctctggggacacaaaggagatagcaacagggtaccgtcccccagagagtccaggagccccatagagcagactggcatgcacacagttctaggacaggatatgacaccagctatagtgaagggtctgtgccctagaaatggagggtgtggggtgggggtgctggagggccttgagcagggacagacagaaagtgaaagggcaagatcaacaaggaactctgctcagtctggagccaagaatcagccctccagggcaagtgtggggctttatggggtgctggagaccccagagctccagaacttggttcagcaatttttgtaaaagccaggattccaagtttgtatctggactctgatatgtcagtgttggcaatagctaattaaaactagctatttggtgccaagccaaaatgcggacctcatgcagcactgctaacctcctgagcaggcagtgtgggagggagaagcatggaggagcaggaactgtagcctgaggccagaggagctaggccctgttccccagataccagccaggcactcatttgagtgtggctggcacactgggttccacagaggaagaaacggaggctcagtgcttcagcagtttgcttcagcgcaggcagccagtgagaactcgaacccagattgccctcaatctaaggttctcagctctatttgtgtttggttttcgatttgttctggaagaacaatagccaatctataaatgtttctctcctccctttcagaagagtcctgcatagttaaaaataattgtcgtttttggggcataatctctggagagctttggttttcctgaggttttaatttgcagggtctcgggactttataattacttgttaacggatactttgctgtgtcctttatgaatggtcaaaggtatacttggatttgtcagtttcaaatggaaaaataagtcttaaccttctgtacaaatcaaaatgccaaacaaagtaattattaatgagttactaatttttaaaagcttataagataaaacaaaaatctgatcttaaaagaaaactataaacttgtcagtaggctgctatatttgtctacatacaaagttatctttcacacctggctaagaaggtggcaattttattaaaaaataattattaatggtttatacttgacctctgtgtgaattgatttcaatagcagtctgttagttgtttatgatggggactttcaaatttgttaaaaaaaaataaacagcctagtatcagtgtctacaggtttcaactctgacagtcttgttccatccctgaccttagatccttgacatcccattgttctgtccatgaactttttagtctatgtccctaaaagacagggcctctcttaaacttttaaaagcagtaattctttcatagcatcaagtaaccagtcaaaactcaaattcctaggtgtcttgtgtatcttacagtttctgtaatcacttgaaagtagagtcaagtttttgttgtgattattggtcttttcagttctctgtttgtttttatgttttattttatggtgtttgttttgtgggttgtttgtttgtttttttttctttcagatatgacttcatactcattatgagtgaatggcccaggctggcctcaaatccatggcaatcctcctgtttcagcttcccatgtgctagaattatagtcaaaaggcaccacactcagctagatgtcttcagtgtgttgcttttcctgcttctcttctgttttccttgtagttcacttgtagaagcagctggtggttctggagtgtctccatggttgggttttacagatgccatctctgcagtatgatatagagtttctgtctcctgagacatacgaggtgaatctaggtgacacccactgagattgagggtggactcaagccatggtgccttctcagctgagccggactcacagctagaggcgtcctgaagttctgtgctcatcaatgtcttacagatgagggtagctgcttggcactggataagtaactgttccacaaggaacctggcttgagacctgaccttaaccttccatactgccttcccacacttatccttttactaagctttgctttaaactgacaatgcctgggctgaacaatgggccagggttcagaaattagccaggtacagcctctaccactgaggagcttggagcagagctttctacacagaatggaaggagagcttggtgctgtttaaagggataggccgagtaaggaaccttgcatgaaaagtaggtccttgaagagtagaagggacagggacatcagctaaggcagatggagccgctgagcagaagtctgcaggtgtgtctggtatccaagagcgggccagagggcttgctgtctgcccttgtgctaaggacggctcatcaagctctcagagtcactgatgaaagcattcagacaggaaaagggtggaatcgctgtgtattttcaccagatctccttttaaaatttcttattgtggaacagttacagatcttcaagaagctgcgaaatcccgtctattttttacccagttttctccatcgattgtatatttatataactccagtacagaatcataacaggaagttaggcattgctacagtatgtgtacaattcagtatcgttttctcatgtgcagattcctgaaccaccattgccaccacaggatacggaaacctattaccatccccacggtctcccctactgcccctttgtagctgcctaactcaccagcttccactaagcatattccctggctatgcagtggcaaataggattccatgcttctgcctaacaatcccttagaacagttgctcttactacatcttctacctatggttagttgaatttaaagacttgagaatccatgaatatggagagctaccaaatcagtgctgcggcttttttcagtgctgactaatattccacagtctaggtatgtagccatggatatttgtgctatttctagttttgatctgtcacagaactgttctgagcatctgtggctggtccttatgtgggcagatagctctcagctaaggggcttggtacctgaaaacagggctagcagggaaaaatttgccaggcattaagtgttgagggtgagcaccatgttttgcatcgagtacatactgtaataaatgaacagaacttcagaaaggaggccctgcaaggctgctccaaggctcttaaatatcaaatggatacgtttgcctaactacaacgcagcatcaagtcaggaaattggatagtgatgttgatagtgatagtggtagagcgtttgcctagcatgtgagagtccttcagctcagtccccagcatggggcagttaaattgccataagctagggtttttttcccgtgagaattaacataggctaatgagaactttatgagaaaaatgtcaggagcatgttttgtaacagggcgactaagacgcttttagacatagcaacagtccgtttaaattgtgcatctgaaatgtcagtgtgattaaagggttaattgagtgtgaatcactcagtcttcctcagagaaaaagtgtgcaggtgagggacgcctgtgttgctctggtgtggtggtgaccagccctcagacaatgctttgtgtcccacactattcagagatgtgggactggtgtgttaggaggaaggaggatgctgtggtgagacacacctcaactcagtgctgggccgcactgggaatttgggcaacaccttactccccgaaacctcagcttcttcctttttgttggatgatagtgcacccctcataggttacttgagggaatctgaaatgtgtctcccagaacctgagctgttctcctctctccagtcatctgtctcaacccaccctccctgccggtgtcacaaggccattttataacatttcgttttaattgaatttttttgtttagttttttaatgtaaatatatgaggtttaaaacagaacagaaagttttaatgggaagaaggaatgtttctcacgtcccatttttctgttcttgctggtgtgtagtctggagtgtgtgtgtgcacatgtatgctcacctttgtaggtgttgtgcgtgtatactccttgaacacagattgacatttattatgtgaattttattcaagttactttatttcctttttgtatcttagatagctttccacgccagtacgcacagaccctgtattgtgtttaatggcttcattgtactttatgttttgagttgtttacagtcttgctggttagctattttccattcttgtacagatattttttaatattacacacatatccgcactccatatatttctgggcctgtaatttctgggttaagattcacatgcatgtacactattagctattacttgtatgattggccaccttacagttctcaccaggattcacacgtgtctttgtcggtcgtgtgaacaaacatgaggacaggccttgcctctgtgaagccttcccttatgacagtctctgggcactgttctactcccttctgtgctcccttgacctgctctggagtgaacccagggtctcatgccaggcaagcactctaccaccaagtttcctgcccaacttgtatctccctactttttgagaagaagctcatggcctagggaaaagagagacctataaacacctttatagccccagctgagtgtgctgccaagactgtagaagtggcttggatggagccctgtgttggaccgtgacagtgacagcagtgtggctaatgcagttgcttgaggggtgcttgtacttccagcttacaaaacaagccggtccttctacctaaaatgacattccaactgaataaatccattagtagctaacttacatgttttctcaggttgtcttgtgtgtgggggaagggcggggggggggggctctttatcttgttctcctcagcccatgtgtaacaagaggagtgtttaggggcttcttagttgactttcttcttgcctaacaagataactttattttcattttagaatgattttaaatcttgagatgaaattatataattcttgagcctagtctatcagctctaatccccaagttcaaggcagctagcctggtattgtactagtccagctatggaatgtgagcagccatagcaaagagctatgggaatgaaggccaggtctggccactttcacgaaacaggcccatctgtaggttacacagctcataccagtgtctctaatactggtaaaaggcttgtgtctctggcatatggctctcaatctgtggtttatcacttgaacctgaatccatacacttagaggactattccacttatctctagaagttctagaatcaatcattccaaaacaatgcccccatctgtggccgagacttctagacataagctgatggcacaagaaggaagtggatgcgatgcattagtgacatagtagtctcgctgtggctgggaagaacgtgtggattcttttctccagaggtggctctttccccacccccaaccccattcctgtttttaatatgaactcactgtcttgtgcatgctagcactcggctactgagctgtgtcgcagccccaagatattttattataatccagtcctttaaaagatgtggcctttgtgcatctcaaaaatcccttcctttcagggctagagaggttgagagcactgactgctgtcccagaggacccaagttccattcccagctcacagctgttcaggcacacacacaagcattcagacaaagcacccaggtgcataaattaaataaatgttagaaaatacttgttttaattctttcttttcattgtttcatgatcttacactactgaaatgtctttttggagtggagggggttatatgccccttgcttaaatggagagcgtggccaagctgatttacccattttgaccatgccatctgaagtcccagcagatcagaaccactgtgtatacaatctgtatgtgtatgcatacaagctcatcagctcactctgcttctctctctcctcaggggtctgacgaaggcagcagccctcaggatcctgtatgacactacatcatgagtgacagtaaaagcgatggtcagttttacagtgtgcaggtggcggactcaactttcactgttctaaaacgttaccagcaactgaaaccgatcggctctggagcccaaggaattgtttggtaagtctgggctgttctaatagcacagacgaagcctttagtaaaaagtgaaactactgagtaagactttagtagcactgattaaaaaaataatctctcttgtagaatttgagctaaactaaatcagtccttgctgtagttatatacagtcatgtgtaggatacaaactcaatttttcatttgctctgttgttggctttattgatttatttgtttgttatcttttcatttgccttgccattatgatatcagaatgattggtgtaaccggaatttggcgttttattcatttcttcatcatggccaccttctcccccctcctccttttattcccaatcactcctgttcatttccaggcgccatcattgcagtgccttgccattcaatggcaggatgaggccaggcagtgtcattatcacaccatggattaaccaggaagggatgctgtgtgaggggttgggctggccgtctcttctttggtgtctctcttcaactatgtgtccagcccaggacgtcagaaccattagtctgaccctgaaccttaggctcttgcatggtaagacagtcagctgctgcgacatcactggccagacaaaggtaacgtttctcacgtgttttctagacctctgttgtcagcacctcccaaactttttagtctgtagtgttctgaacaaagctttttttcccccctgctaatcaacaagattattttttgtctttaaaagaaattgcgattgctggtgattgccgggtgtggtggttcatgcctttaatccccatacttgggaggcaaaggcaggtgatctctttgagttcaaggccaacctggactacaaagtgcatccaggacagctagagctacacagaaaaaccctctctcaaaaacccagaatatataaataaaatactgtgataagataaaaacatttcatgtttataactggtaggccaagagaattgaaaatgaaagaactctcccaggcattctgggaggagagctttggtttcctgtgacgacactgagcctagcgtcatcagtgggttcagctgagactccgctgcagactgatcagggagacctgcctgctcttttcctcagtgagggcagccggggccctggtgctcgggattgcagattaggaggctcagaggagagactgaggaaggagaaggcgctacatgaaagagtgtgtgcacagtgggggcttaacagtgaaaatgtgctttagtgcagatagaatgtcctttctctcaactgctcaggagcagagtatttctgagtttagacttttctcacatttttcagtatttgtgtttactgataggcatctgtaattccaaaatctgaaatctgaaattctccaaaatctagcaccatgatagaaaattatagaaagaatattatatatttgcttgattgtaacctttcttatttggaattaataatttgataagaggattgccgaaggggaacaggaattactttgggggcgtttactttagtgaagtgaatagtgtatattatataaccatgccatcctccgtgaccctctctgtatatgtaatgcagttgaggacaaggaaggctcattgacttttgtctcccatgggttcagggggtaggtctaggtctaaagcagttgttggtgtcttgggactttaattcacttagttaaagcttgatgactttgaatcactgatattttttatatgaccagggctctgacccaatctctgttcaggatcttcataatgatgaataaatcaatattaataaaattccttagaatctctcaataaattatattcatctccataggacactgattacattcaagaactgtgtagggctagagaggaagctcaatggtagagcacttgtctagcatgtgaaagtacctgagtttcttgccagcaccaaacagaaacatgtatacatatgtatgttatatgtatttaaatatacatacatgaatttgtgcacatgtatatatattcatgtgtacatacttatatatatatttatatatatacttgaatacatatgcagacatatacagatatacccatacatacctacatatacatacatatgtacacacatgcttccatacacatatatatatatatatatatatatatacatatatgtgtgtatgtatgtgtatacatatatatgtatatatactcactttaattttataactgtagctgagagttttatagtacccacccaccttaagttctaacataggaaagtaaaacttcagaagtgattgtacctctcccctccccctttctacttttgtatttatcctttggtatcagataggataggagggtgatctggtaatggcacattcctataaaacaaaccaaaaaagtttacttttgctaaaataaactcaacagtgggtgagctgctactttgacaataggctctgaccaggtggtggtggcgcacgcctttaatcccagcacttgggaggcagaggcaggcagatctctgagttcaaggccaagctgatctacagagtgagttttttctcgctctgtagtataggacagccagggctacacagagaaaccctgtctcgaaaaaacaaaaaacaataggctctggattttctgtcttagatggttaagatccagtcttttttctgttgatggtccagagctgctttttgtcagcgtcatactaccagtgaacctttagggtgtgtgatgggcagaatactgtttcctcagatagagccacattctaaccctggaatcctatgaatatgtgaccttacaaggcaaaatgaattttgcagacctgattatatcttaatatccaagcagaaggattactgtaagcagcaggccaaactgggttacatagtgagttcatggccacctttgatggaatgccatctaaaatccaaagcaacaaatcaatgacctggaggtgggaggattgccctggtgggccgactgtggagtgctgtggggcagggatgcaggaagcttctagaagttgggaaaaggaaggaaatggattcttcccagagccttcatgagggtcacagctgagttgaccttactgttagccccttaggactcgttttggacttctgaactccagaagatagataataaatgtatgttattttaaatcagtaacgcgtggccattcagtagccacaagaacagcactagaagttaatgtagaggcaagtgtgtttctacagctctgagaagtaaaatgtgttagcaccagtcagtggtttccaaactagtcagttccattaaattagaccatggtagacacataaggccagctgtgcacaggaaccacagtgtaggttggttctggtcctgatggtctacagacttacatgtaaagagctggggccaagataaaatattctgaccctagttttatttttgcttttgtttgtactgttaggcgtcactcggggcttcgggtgtgctctgcaagcctccttgctgagaggctcccaggccctccctcccttcatgttccaaattgcctttacagttttggacctatttgatttgtttctgtttttgttccttagaagatggtactaaagcttattaggaaataggttttttaatgttaccgttttagagtataaatgccaactaaattatatttactgtttactcagatgtagtgtctgcttttcctctctccttctaaaaccccgaggtgttcagcccaaaatgtaaacctgtggttccgtgacatgcttaccccttttctttaagtttttaatattgggtttggcagttcctaggagtaacagttactgtaaggtaaggagtaccctaatttaaaatattagtataggtagatcgaacgggcttgccttttagctttctgtaagcatgaacattggtctggctgtacattttcttattttcctctataaatataaacaaaccataaataatgtccagaataaaatgtctttgaggctgttgatgtgaatgtctgtgagataggagacttgagttctgagcccagtacagatctttgacccaagttctttgtgaccttgggcagcccactgtgtcttaatgagtgtttacattttcacctctaaaataatggcttgaaacttttgattcaaggtgataaatcaaagagctaaacaaaagagaattacaatcaccagtgaatgaaaaagttctaataaatttctgcaacattaaaataagttggggtcttggtccagataacactgcagaggaagagagtgagcagaggggttgtgtgaaacaggaaagggccttgaaccacagagctctggggcatgggaaatgtagatatcacaatatagaaaatgaggatgagatgggggaggaggctaaagccaggaacattaaaacatctgtgaaacagtccagttcccaccatgtccactgtcctccatgctcagcgtttgtccttacagggctaataagatactgaagaatcaatattacaccaagcaaacctagcataggaaacccatcattgaggcttccctgtttcttggtcatttagattctgagagagactgcttgaactgtcctgtggctcgagaataggaattaggtcctggggctctctgatagggcctgggtaacctctgctttgttttggtgccactgaaaggccataccctaaaagtaatggggttaacttgagtgaggcacggcccccatccagttatcattcactccttgaacttatacagtggcgagtctaaactgttcatgccccatgtgcccagtagaagcaaatataaattctgaagaaggatagcattgccctggatttcagattacttctagagcagctttataaatgcaaggtccaacacaataaaaaaaatggctaggtgcacagggagataagacaaaaggatcagatcaacagaagattccagcatcattagatccaaaattttaaatagctgtggtgatatgttcaagatggtaaaagaccagatgaaagctttggtggaataacaagaactttaaaaaagagaactaagtggaaattagatgtgaaagtgaaagctatggtaattgaattacaaacctaaaaaacatgtttgcaaatattagttgtaactgaagagagagttagcaatgtggaaaatacatcagcagaaaataaaatactcctaatgaagccgcagagaccaaagagtaggaatacagaagagacgatgtgttaatgttttattccataatacattaccataaaattagtggtctaaaattgctcacattgattacctgatggtcattcttcatcagagaatgcaaattaaaacaatgttcttatggacatggtgaaatacattcagcccaaagggtaaaaagtaagttcatgatgcaaatgttggtgaaaacgttcacacacaactcttaggcatggattctgggcacactgctgatagacacagacactgatggaactacgtcagaagagagtctggtcttatctgctaaagtagaatcggtgcgctcccgcttagctctctgcatgcatgagaggcatgctgaaaggactgcagccatgcacatgcatgtcgatggcagtgattcttgtcattacttgaaaagtgaaaataactgagttagtgagagcagcaagtgacagtctcacaaaggaatgttatagcaatgacagtgaattctagtactcagattcgtgggtgagttataaatgcagtgttgagtgataggtcataggcaaaaataagagatagagttatgtgtaacatgttgagtttgtgagagcaagaaagtgactgtcttaaagccaaaagttaggccaatgttagtggtgcacacctttaatccaagcacttgggaagcagaaacaagagaatctctgtgagtttgaggccagcctggtctacacagtgagttccaagacagcaaggactatgtagaaagatcctgtctcaaaacaaacaaaaaacaaaaacaaaaaaaacagaagcagaagttattttctttcttgaatgacaaatggacaatgataacaattgggagggattgttaaggggacatttggaggctccaatagagcatggctctttgtgatatatcattgagcagagaaacaaaaaaacaaaagagtgactctcagatataagcctccctccccactaaacagcactgaagctgggagcagtagagcaatggccttagtgtgttctgtgaggaaattgattttcagcttaaaagacagactatcaaagccgaaggcagagtaaaatcattttgttgtctggggacattccttaaggagtactccaacaatgagacaacacaagagcttgtaatacaagaggccagatggaggataagttctgtgaagcaggctttgagatgtcttcagaaaagggctgggtcaattctaagtgtagaagtctgagtgggagaacacggtactggtggtgggctttggaaaatggctctaaggaaaaagatgtttattagaaccttgtggaaggaagtatagaaagaggtgtggtctgcttagaaacaaaggcatggagtgttcaaacacttgataaactgggaggacggagaacccattgcctccatatagcagacattctaattttgtgtgtatgattggcagcaaggattgtgtgatctttgggaagtgaagtataatttcagctctgcaactagtagtatttacgtgagcacatgtactttccggatggttgtcagtgtttatagacagctgggggaaacagcacagaggcctagctgtcagtttaaaatgaagatgctagcaagcatgactgtttaagacaaaggtttggaggaagaggaggataaagagataaagagagcaggggaaagcgtactagtcaccttatgttattggggaagagcaaggtaaagtgcattacaggaaaccctgacgtaccatcaaataaggctgtgagggtggggaggagccaagtaggtggctaaaccctcagtttcatactaggcagtgtctgtccctttgagttacgagttgttctggagctgggacaggcaggagtagaggagcttgtctccatgcgtttagaactagttcatttgagtaattttgtacatcaaaaaatgttttattgatataggtatatgtgtttattttattgccttagttaggtttctattgctgtgataagacaccagaatctaaaacatgaggagaggaagaaaggggtgccagggcaggaacctggaggcaggaactgaagcagaggccatgaggagggctgcgtactgacttgctcctcctggcttgttcagactgttttcgtataccatctagaaccacatacccagtggtagtaccacccacgtgagctgggctttccacatagtcgctaatcaagaaaaggctctgcagtctagtgagggcattcactcaattccttctagcaaaatgactccagcttatcaagttggtaaaaaactagccagtacatacatacatacatacacacacacacaaaagagaaacataaatatacatacataaatacacacagagagaacagagagaaacacatgcatatacatacacacatacatagagtgcttcaaatacatatatattataaagtagctaaattcagctaatttacatatacagttttcttacatgttttctgcagtgagaacatgtaacatctacttttttaagcaattttaaagaacacagtataagctgagtaaggcagttatacacctttaatctcaatactccagagtcagggggcaagcagataactgtgaatccaaggccaacctgatttacatagcaagtttcaggagtacatagagaaccttgactcaaagaagaaaaagaaaataaagaaaagaaaaaaattacacagtgtagtagtagtgttattaactgaagacaccgtgctgttctgtgtagcccttgaactcagtcattattcttgtttgtctaaaaattcagacagaatcttttgagatcagaaaggtgaatccaagaaacacacatacaagtgtacacatgcacacaggtttattaatgatttattttacaatagatctttataccatatattcatatgagtagtgaacttacctttgagcatgtgggctcacctatgacttgtatatatacatatccatataaatgtaataaatgcagtggttttccttagacagttccacaatggccagtctttaagttaaaaacaggtctaattacattagagttattgagcagaaagaattaacagaaagggataaagataaacaatattacaaatagaataaactcccagaagcggtgtttaaggagacgcctgggctcccaggttgtacgtagcagtcctgagcccttgttgagccatcagaagacctctgcatgacgacgcagtattgttagctggaaaccctaagacatgtcatcatgcctctcgctctccatagctagtctctgcagaaaaattaacactgacttccatgaagggatgtgagcgctggaaactggagcttcagatcttactcacactacacaaggacgcatcacttcctgcacgattttatatatagcgagtgcttacattgggagtttgtatcttggtagtttaccgtgagctgagactttggcttctgtttcctttcagagtctttggcctgggaaagcataatcagtcaaaacagatttattaaattccttccatgagctcaactatggcatttccagaatatactgacattttaatcagtgataacaaggaagttttaaatttcttgttgtgttaaatggaaaatttcgtgccttgacctgagttttgtgctttggattaaattacctggttctgaacctgctaatcttagctaactgaaaattataagtaggaagaattgctgaatccctctccagctgcagccaaaaagcatggtgcctctggggagggactagcccgtccagcccggccacttcactttctggatgtacataaagcttgattggggaagagcagaaacatttctccttgccttgttattctctttgaaagacagtacatcaaatgtatttctccattgctattttcaaaagccattttaataggctgtttattatatttcctaattatagtgctgcttttgatacagttcttgggataaatgtggctgtcaagaagttaagtcgtccttttcagaaccaaacgcacgcaaagagagcctaccgtgaactcgtcctcttaaagtgtgtcaatcataaaaacgtaagtcatggcgctcctttgtgtgctttgatgttagtggtgtgaccagaccgaagattggctgatgaggagagaaactataaaatagattacatttttttcaaaaattaaaaaatattctttattacatctagttattggggggggggatgccactgctcactgtggaggtgagaggacaagctgccaggtgagcctaatcttgataccaaccctaccccatcctaacagctaaccctaaccctgagaataaataacctgccagaatcagtccctaaccttgaccctgacccttacctaacccctaaccttagccctatcacctaaccctgaccctgaccacaattggttctctttaggagagaggttctatgtgggactctgggatctcactcaggtcagttatcagtttgtgacagtgcctttacccccttccctcttctcagcccctgaaagagatcagtctatgacatctgtctccagttttagatgagtggagactacttaagattgtactaaacagtttatgttcccctttgtctcaatacttgtgctagacctctctatatggtgacattgagtatgccactaagatcagtttattcttttgtcacattgtattcttttaatttggggggaagctggggattgaatccaagctcttatgtacacaaggcaagtactctgcctctgagccatatcctcacctccactcagtttggtttttgaattggttttagttggttcaatgtttgttttattttactcttcaattttgtcactttacaaagatatgtttattatttttaaaaattcaggtagtataagttagaaagcaaaaatccctgggccttcaaccaccagtcacaagtgtgagcatttcagtaagcatccttgcttatgtatatttacatatgtataaatgagaccaagtatgctactattcctctttttataccaagaagaatgttgataaatttcatacactttaatagacacaactgtaatatatttttaagtggctgtatatacagatatataataatttagttaacaaattgtgctgggttgtgttgttgttgttgttgttgttttttgtcaacttgacacaagctagtgtcacctggggaagggaacctcaattgtgagaatgccttcatcatactggcttataggcaagtctgtgattgatgtgggagggcccagtgctcctagactgtgtttaaaaaacaaggtgagcaagccgtaagctatgttcctccatggcctcaccttcagttcctgcctctaggttccttgcttgagtttctgccctgactttcctttctgatagattataaactataagcaaataagccctgtcttccccaggtttggctacagtgttttataacagccatggaaagcaaactaagatacacataattttgttgggtagattatttccagttttgctttttctgttagaagccatggtgtaatgaatgccctcttcatacaacttggtctacatatccaggcaggttattgctagccaaacaatcagcctagccccggttttcatacacgctgacaagctgacgtcagggcgcactgtcagctatgcttgatgggaggcttctgagggcacatcttccttcacattcaccagcactggctgatactggttttgcttttctttctgccagtctgctacatgacaaataatcttatcttaatctgtgaggttgaatttcttttcatatgtttatgggatgtgtgtgcatgtatgtgtgtacaaatctgtacatgtgtgagcatgcctgtatgtatgtgcaggtctgggtgcacatgtgaaagctggaggttgatgtcaggcgtctttatgaattactccccaccttatatactgaggcaagatgtctcagttgaacctagagcttgctaatttggctagtctagctatccagcttgccctagtgatcccgtctccatcttctgagccccgaaaatacaagtgggacaccattcccattgacatttgtgtgggagctaggagtctgaactcaagtcttcactgagccatatctcgagccccaactgtttattcattgaaaatttgcttttcatggttgcggctctacttttatcttacactgtttggtatctttttaaaatcacttgtaggtgattttacatatcaaagttattaaccctttccatttggggattttgctatatagcccaggctaaccttgaactctgaggctgtccttaaacttgcaatctcctgcctcagcctcgtaagtcctaaagttagagaaatgccacccatgcccagcttcaactgtttctccccctttcccatttgatctcatatgttgctctagtatgctgattttttatttaattttggctttgttttaatgtagttaaatatcctaggtttcctatcatgtttaaaatactttgttacaccaggaaatagaatgtttgcccatattcttctctgctttatactttagaattttagactttatccattttgtttcccaagactgaaggtggatacagtttccttcccattcttgctggttaccccttctatctgatgagtaattaccctttctcttgttcatgtgaaatgactgagggtgtgtgtttgaaacacatggtttgtaaacacagaggccacaaggagcaagcagtaagattggctgcttagccccgtaagggaatataaggctatgagacctcatattcatcaccataaagtataagctcagccttcttatttaaaaacttttcagaaagttacatatagtatttgaatttccagttagcacagtggaaactatgctagcatagcatagatacttaagatatatctcgttctacctgcatgtatactgcaggctagcagaaggcaccagatctcactatagatggttatgagcccaccatgtggttgctgggaatttagctcaggacctctggaagagcagtcagtgctcttaaccactgagccatctctccagcccccagcatagtgcttttccaaccattatttttatattttacatatatttaaattccatagtaatgatttaagttactagggtcatgtgagtgattctgttaaaagcacatcttacttccagttggtggttaagtattccaatgctgtgcactaggatgctttggtaacaaccatagtaatgagaaatattgggttctgcaatcatttttctacctttaatacatttcagtgtacaccaatttttatactcaatctgacatactaaagtataattaattttctcttttcagataattagcttgttaaatgtgttcacaccacaaaaaacgctagaagaatttcaagatgtgtaagtatcttttgcatcagattgaaaatttagaaactcagtgatttatatttagaaaacataggccatttgcaagctcgggaccctagggtgccacagtgccaaagaacaaggatgcctgcggtgttgcttttaatctaaggctgtgagcctgaggactcagagctgtagtatataaggcctagcattctgattccaaaacatgaaagtctgtttcagctctcagaggagagtctccttcattctctagatttgctcattcaggatcttgctctatgctttgtactcagtgcattcagactcacataataattactacccaaacaccctccaaaacacccctcacgtaaggctgccagcgcagtattccttggcctagtcaagttgctgacttcaattcctcgtcacagggtagatggggaaagatcacagtgaggcagtaggagaaaggcttaggggaggagcggtttgttctgcagatactgggacagagtggaattgacatggaaggtgtagccagagtaaacgagcagcagtggagcttagctggtgtgtgctgctacccagaggtctgggtggctgggtatgtgtgacaagggggtatggcttagagaagtagcatgcatataggaaaggaagccagagtgagatttcccacatagcagtgatcttacctgacatattttaaaagaacacttggttttgaggggctgagaatccactgtgagaggtaggacaaaaaggcctagttagtatggggaggcaatcactgcagttcatatgagaggttcaagtgggtaatgggaagggcttgagattagacaccaacactgtctgagggtgaggcctagcatctgccgatgctagatgtgagagagaaattgaaagccacacataaaggcttttggctgagatatggagaactatgagaggaccagacttggggtgctaagtagctagactcacaagtagttttagacatgaattcagagacactattgactgtccaagtggaacagtgaagtgggtagagaggaaagaacctggtgttcaggaggggcctggattaaaggaatggaagaataatctataaatggtccttcaaggcacagcaacctggatagcaccaagacaggaacagtgagaggagagccaggatctgactccagccgctccaacaaaaggaagcaattaggcacagaaagcagccaagttcttagcactggcctttgggtctctgcagatgtggaagtcatcagtttgggcagacactaggcatatgctgagtcagaatgtcatgacaagcagtggaggggagttagagatgatgtgtctaagcacctctgtgggcttggggtggggctattatgctgctggtggaccgtgagcttgaaagttgtatggtcagccttaaaagacagatttcacctaggggatggtagcacatacctttaatcccagcactcaggaggcagaggagagggatctcagagtctgtggccagcttggtctacagagagttccaggacagccagggctacccagagaaaccctgtcctgtctgaaaaagccaaaaaaaaaaaaaaaaaacaccaaaaatcaccagaaaaaaaaaaaaggtttcattttttatagcagtccaaatacataaccaacctgttcggaaagttcagagttccatttacccgctgtataaaccctctacattagcagccctgccagaatcatgtattgttaaagagcaagaatctacagcagcatggtatagatgttgaaaggatgatctaacaaaagatagataggtggacagacagacagacacatgggttaataaaagtagaaaagtttgtacgagattgtttccatggttaaaaaaaagttctgtttataatttgaaaggcagaaaaacaatgagtaagttagttgtttgtatattctttgggtaattttacagactcctattatatatttgattcttttcaagctactttattaaaagtgcttttacttccagcatgcagtgttaataccccgtcggtactgcttcataatgattgtgagctaagactcatgaaggaatgtttaaaaatattactaatgagtgtggttggtctctttttgaatactcaggtacttggtaatggaactaatggatgctaacttatgtcaggttattcatatggaactggaccatgagagaatgtcctaccttctctaccagatgctctgtggcatcaagcatctgcattcagctggtatcattcatagagtgagtaatcacataactgtatttttaaaaggaccatttggtcgtcagtcatctagttacaaaagaacttaatgtttttatgtatgagtgtttgtgtggtgtatgtgcacatgtgtgagtgcacacttattcatgtgtgtttaaaggccacgaggtcagttttggccttatttcctgaacctggagggaggctggtggtctcctgactccgcctctccgacacccccagcactggtttccagttccatgtgtaagcaccctggcctttcacatggccgccgggggtttgagttcagttcctggtgcttgtgctcactccctgatccatccccaccctaagaacgtctttttcttctttttaaagtttggtactttgagagtccaggttaagccgtggagtcatactgtgtacaaaacactgttcagatcagcttttcccctcagccactgtaaacacagaggtagggggccaccctactgcagaacaatcttggttttctggtttagccttccagtttgtagtaactttttttttctatgtagccccagctgtcctggcactcactctgtagaccaggctggcctcaaactcagtgatcctcctgcctctgttgccaaaggcctgtgctggcttcccttcccttgtgcacccccataaccaggtttttcaaagtgtagcctttgctgccaccaagtggtcattccaagcaatagaccttctgatggtaaagttcacttttaaatagtaactaagattcctaatgaatcattctatttctaaaaattcccccagacctccaaataactgaggccactttttagttttatttaggacactgaattttccatcaacaatatgatgcttattttcttccctcatgcagaaggctttttaaaagtgtatttatttttattttatgtatggatgttttgtctgcatttatgtctgtgtaccacatgcatgaatggaggccaggaaaaggcatcagatcccttggaactagagttccagatagttgtaagccaccgtgtgagtgttgggacctgaaacaaggtcctctggaagagcggccagtgcccttaaccaccgagccatctctccaccctcgcccctcttcctgtaggcattcttattgtctcttaactgttgctttttgtgtggtgctgagatggagcctcagatgctgctcataggaggcaatgctttactactgagctatggccgtcagccttacaatacacgtttaatgaaatgtatgctttatgataacttcccagatttacaagctgtattgatttttgaggggactgttttcccttacttggagccggaggtgagggcaggagaatgcccctacttcctggaaacttcatgagactatggcgtgtacttgccttttgtggaatgtttggtcctttagcctacaagcaggtgagacagagcccaaagtagtgtatgttttgcttagcacagtgtttagaatccatgatgatctgagacaatgttgtgtgtccaccttgctccctgcctagctccctgtcttaccggttccttctggatcccttgtacactcttacctcacacactcacatctgcgactgcttgggaaaggtatgaacgttgtcattgagatgttccaaacaaccctcaggtacatcaaactggatgacaggcctctgtgagtgaggaacccaagtgagcctccgcatggcagtgtatggtcccctttaaatagggcctcacatagagaaacataccttcacttttgctgttaatgcaatttgtcacgcctgtcatggagaactcaggatgagaagggtcatcagttcaaggtcagcttgcgccatatagcaagactcttgtctccaagaaacaaaatggcttcacaataaataaaacttttaattatttgaaagttttagagtgaaacaggacaaaaggtaaagttttgtccctcgcccttaccacttttactttatataaattcacaaaattggggaaaatgaaaacctctctcagccctgcagccacttggagacgcccacagtagcaggctgccgagctccttccagctttgcacaggtgcttcagtgctcacctgcgccagtgccagccagcccgcctgcccagtgtctgtccttcacagtttcaaagtcggactcctctcaacagaaccaaatcagcaaatgggttgatttgcatttgtattcatcaaggatcacatggttgcataaatagttatgaagcctgcattccctcttctttctcctatttctgtctccttttgaagcaaactttgaatttagtttttgttatttagaatttgttattgttgtttgttttggttttggtttttgccttttttatgtggcgacagggatgaaggcagagccttgtgcatcctaggccagcactccatcactgggctgtgtcaccagcctgactttccgttctcttaatgaattactctagtgctcgtttctgtgtctcagggcagtgtgtttagagctctttgacctttttcagtttgtgacataagatactgatatattcctcgtccacaaacccagccgtcatccctgtgaccctcttcccctaccttcccactttagttacaatatggctctgtttggtcagggttgtgatttacatcctcataaacatgaaagtttctcatttggcaggcatcagctgggatgccccttgcacagacacccagagctttatttctattagcctagctggccagcagatggcagtaaagtagacagctgttcctgtcaccacactttttaggcgggtatggtctggaccaggggctgtttccccttctctagggctcattgacagatgaaggctttcactgctgagtggtttccagtgctgcgtgtgtactgcgtttgtcttctttggaagcggtgctgctgtgactgcccacgcggctgtgctgcttgtctgcatgctcaggcctgctagtagtaaggtgcctccatactcttggggtcttcatccatgcattcaactggctgcagatcaggagtatttggaaaacaaacatttcatctgtactaaaaacagacaaatttttgtgtgtgtgtaattactccctatataatagcattgctttagttattataatcatctagatatgagttagacaatcccagaggttgtgtgtaggttatatgcaaatgccatttcatgttatgtgagagacttagaggctttcaggttttgagcaaagaaaaacatggccacctgacatgtctagaggcagggtctcagaagccatgtgcctacctaccctctttcccgttcttacacacttcagtagccgctcatctcacaagcccttgttggtgtgatactgtgtagttaacatgctgtgattcatttaaatacgtgaacaatttcttttctaggatttgaagcctagcaacattgtagtaaaatcagactgtaccctcaagatccttgactttggcctggcgcgaacagcctgtaccaactttatgatgactccctatgtggtaactcgatactatcgggctccagaagtcatcctgggcatgggctacaaagagaatggtaagtacagttaggactccagactgtaagcagtgaggtagcattcccaccgtcactggcacgcccttccacaaggaccattggagacagtttgagcactgtgcctgcaggccacagataagaacagtttcttttgtcttccccaactctggctggcctgaaactgccatagaactctgccagcctctgcctcccaaatgctggaattgaaggcatgtgtcaccatgctgaacctcaatgtttgatcacagagtattgtgcactggagcccctgtgcctctctctctccgtgagcaggcccatgtcacccacagcactgagacctctgtgctctcattaccctggttgccaacactgaatggcttcactcgtttttgtaataatatgagtggaataatgtaccgtgttttctttcatgtaaagctggtattttcttagatcaaaacttcacctgttctagctgtgtcaactaaataaatgctaaacattagctattaataaattcatgtgattatttatgaagggacaacaagggagctttgctgaagtcttctgagatgagtctgagtgtgaatttttgtacatattttgtcacctgctctgagaggcacagtgcccctcagtagctgtctgtgcttagctctcccttccctgtctgaaacacaggactcagtcaggccccatgctcaactccacactagagggcagttactacagagccatgctcaagcagggccttacccagagtccagcccttactaacaggctgccacctttctgatatggccatttaaaaaatgctcattcagatgtggtgtcaggagttgacagaagttctacccaatgaatatttgctggggctgcccatgtctgggaggtggtttagaaacgagatgcgaggctctggctgttttttaatcacctgatatttggtagtggacatctggtctgtcgggtgcatcatggcagaaatggtcctccataaagtcctgttcccaggaagagactgtatccttcacagggagagacccagtacttggccctggaggctggggtggggctggggatgtgaccctgagaattttgtgtttattagaactttctgtgtctggttttttgtttgttgcttttttttttttttaagctgtaaagtattggattctttggcactaaaactacagattgctgcaaactggaggctgaaggagaggtcagcaaccattcatattgtgtgaaaagcgcacccttagctaggcactgatatttccatgtctgtgtgtccagtacactgttagaatccctttctcttcacttttgttttgttcatgacacttcataattttatcatttcattttattttcagttgatatctggtcagtgggttgcatcatgggagagctggtgaaaggttgtgtgatattccaaggtactgaccgtatccttccccagaaccttgaccctggccatgatctccatgctgggggcagcatgttgtgcctgcgcactgcatactcaggaggaactgtcgggtgcagactgtgttttctgagggtcttatttttacattggtgtcacagaccaagtggctcagttttatactttcactcaaatacctgtgacagttctgttaatctaaaccaggtatattcgctattttatcagaaatagctagatgtgtaaaattactatctttgttaaatatattctggtatttaagtagaaatactattttacaaattagtcgattctgttaattaactgggaaaggagcagtctaaacttaacaggatagcatgcatgtgtgatttaagtcatatatgatcctgttagttcctggtgtgatataagagctgaggcaggctattcagagttaagtgaaacttgtatcagaagcaatgtattatactttctcgtttgttactttgttgacattttatagacatttctaaagattccaggcagacaggtatctgtgacacactggggaaggtaaatttaaacacagaagatgactcataccctggtcagcaagtcacatcagcaggaggttttgtaaagggagccgacggcatagggcactagctctgtcccctcgtgtgttcttccattttccacattcttcacactaacatgcgtcttcatgcttccatttgtgttctaaccccttatattttcactggtctttgattttgtttttgtcatgaaagcttactgtgtcctctgtctggtagcagacccatgcttcaagagaaaccaggctcagtagtcagggtttagaatgtgtgtacttcacaaaaagtgctttaatgtttataatttcatgaagcaacttactcaaaacatgggtccctcagagtctgagcttagaatgaacgtattttactctactcatcccttcacattgtcctcataagttacaaaagatgccaagttaaacatagcattttagtttgctctaataatttatctgacttttttctataactgtaccttggatttacttgtactgttacaagtaaggaagcctttattttacaagtaaaatcaactaaagggaaagttgaggtattctgcagccagagacttagaaacgctgtgtggacttgtcatgagtggtcaaggtgatgggctatagtgtcagttaagagtactttgtaacatttatttgtttatatttttatttattaataattactttttccaaaaagtaaaaataaataaaaatgtatgtacttttgcatatactttaatgattttaaattataatttaaaatactttatatattaacatgttatgatagcagtagttgatgttttacatataaggttacttaaagtcctttacagtcaggccaggtgtggtggtgcacgcctttaatcccagcactcgggaggcagagacaggtggatttctgagttcgaggccagcctggtctacagagtgaggtccaggacagccagggctacacagagaaaccctgacttgaaaaacaaacaaacaaacaaacaaacaaacaaacaaaaagtcctttatagtcacatggaaattaacatccttttctaaaggaagttttgcttaccttttcaaagattaaatcaaaaagtttggcgatttatagaaaggctccagaaaccaagttgaggttctcaagaggtttgcctgtgatgttggtagaaaagtaagtgttgtcctcacagtggcttgtgagaaagaaaacacttgagccaggctaggagaagcctaagctcagatggtgcccacggcagctgtgcatcctagagagactcagatctctctgggctatgcttcctttttttgttttgttttttttttttttttgttgttgtgttttgttttattttgttttaaatgaaacctgtgctctacccacccagaaggcccaccatgctttctcaggtaagccccacctgcaccccatgccacctcctgtcatctatcaaaatgaccctgtagcactaagccagacatactgagttcctgcccatttctaggcacctcatccaagtgatggggtaaaaggctcactgccaagatgacttgagggtaggttttctgtgacagtaagaagtaggggacagagcagaagcttagagtcacccagaaagaaatggcaaaggctcactccaggccagtggactgatagcacagttgggcctggaggctgcgtttgctctgagggcctgcccttcaaatgactttgtggatttggagcatccaatctatgaagtgtggaattcaaaggagagatttggagtaaggaaaatgtgggaaccgttggtctggtgctaagcattgaagagatgagcaaaggctcaaggaaaaggagtcagcactcagaactgacaccgggtttagtgggcgcctcaggcaacctttgtggaaacagttgtcaagatgactaaggagggaggtctgaagagagtgtgctctggagagcacgaatgggtaaggattagagatgcaggtctcagaaagcaggggcagggaatgtaaaggaaagtgcttgctgttaacatggaagaacatcatgcttgagtgagaacagaaggttccggtagcgatcacgttggggttagaacagcaagaaagaagaatatgagacagttgtccttcagtaggtgagagggtgaggtaggtgggcttggcttttagccaggagcccagatggttcccagtggtaagtagcataagatatgggggtggggtatcatagcactgttatgattagtcttcccagtgagcgctgagcatgagggagaggtgttaaagtataggagagatacgcgtgagccaggtgtcctgttttggctaagcacctagataaaatgtgtgcatcattctgatttggcaaagcatgtggaaggagaagaggaggaggaggattttctcagaactgagtttgtgtggctgccctaggtgctttcccagtggtgtagatgcacattctgagaacgcctgatacattccaagctcttgcttatgtgattccgtagcttgcattgtctcatgtacctgtttacagcttcactgtcactttccacagtcccagtcatcctaagtatagcaggcatcctgagagcaggcaaggctggggtcagctgccccaggagtgaggaggttgctctgaggaggactgactccagcaccctgactgggtagtgcatgctggctgtgaaccccaagtcacttactctgaaaggaagaaagaacacattactagatgctgaagggatggactgctgccaagagaaacagaatggcctctgaaacatcattgtctaaggcagtttcaggagggagtgtggtctgagataggccagaacccaagcccctcccctctccatgcttcccttccttggacagcctgtctcacaggctctgctgcccagctgtgagagaggtcagattgattcatttagagagagacctgtaaatctcaggtagctttagtaggaacattgatttcagtttgcttatgtgatatttattttctgtttaatcatttatctcataggttaaatcatttgtcataattttattttgaattataataggaaaacatagattatgttgatttaatgaaccatgatcatactttttaagattcagagtataagagtttttgttaatggatttagaaatccaaaccttatttaagtcttattccaaaatgtttctgcggatcctctaggatggcctagttacttacttgttcatagatatgttagaactttcctttgcatgagaggactgtatgtattatgactatgaagcattttagttgtattttcctcaagagaatccttagatattgatcaatggaataaagttattgaacagctaggaacaccatccgcagagttcatgaagaaacttcagccaactgtaaggaattatgtggaaaacagaccaaagtaccctggaatcaagtttgaagagctctttccagattggatatttccgtcagaatctgagagagacaaaataaaaagtaaggcactcttttatctcgcacttgtttctctagctcttaactctaaagtccgtgtatgtcaagaggtgcagtaatggaaaccctgaaatagaggctctcagagtctgacattcaaaggcaccacagagggaatgctttaaaggacaaaagtcttgaccttgctaaaacattgtcactaaatacccagagcagtctagaaaccccttaggttacgcagtgagtgggaaaacacttgcctgcaagtgtgaggatttgagcttgtctccccagcatgactcaaagcacaagtgtggctgcctgtgcctgtgacccacactctggggtggagagcagtggtcctggaagcttggtgacagccagtctaggggaactgggtgcttctagttcagtgagagaccctgttataacagaaggaggggaagaacaataaggcaagacagccaacttcccctctagcctcagagtacatcttacactcaaacattcatgtgcatatatcatacacgttcacgcacacacataagacccatattgtgatgtcaccaatctgaattcaaaacaatttcaaatataaagaatacttcaataaggattctagacagaaaccattgagtgtggcccagtgggaaaggccctcactgtcctaatgtgtccttcctagaatgtggtcacctgagaaaaaacaatagctttgctgtcctccacaccggggtgagcagcaccttggtcacaaaaaccccagcttttctttgtgaacttttcattgctgagaccttgctgaggcttcttattacgttaattagcttcttgatttttttcttggctactaacctctagattaaaaacaaaagcactgtttacagctaggcaaagcagtggtccctgtgaggctatactctgggactgtgggttactcagaaggttttaaatttgttctaatgtaacacaaagaataatactcctgatacttcatgtccatactcctggcaacaccatcctaagagaggtgcttgctacctactgtactgtggcttcatagcttcaggtcatctggacactggtctgaggttacctagaacccccacctcacatgctaaaagcctggtttgtaatagtggccattggacttttaaaggttgtgagccgtgttgatcttgaaactcttaaacattttctgaagtcagcatgtctctttactgtccatacgctcacatttgattctttattgtgtggcttcctcttttccacggtagcaacataagtacatcatttgtttacatcctagcaagtcaagccagagatctgttatcaaaaatgctagtgattgatccagacaagcggatctctgtggacgaagccttgcgccacccgtatattactgtttggtatgaccccgctgaagcagaagcggtaagttctctggaaaaaacgtctgcgtagagggctcactttaaaatactgggcccactgtctttggatcttccttctgttggtccagaatggctacatgaggatagcaagttgttacttttagggccctgacttcaaaaatagaaaccttgctacctgaggcctaggttggcccctctcttggcactgctgctggggctgaagctgcagagctcaggagtgcactgtggtggatgttggccttatgtttataaagctgatgtgtaataataacttaggaagcatctgctcatgcctggcactgggccatgagctttgcttacatcttagtcagagcctcaagtcagagaacctaagcagccttcccaagtgacacattagctcacatctccccaccacatctgggcatctcaccctcttaagttttcttcacagcatcccttgtagatgtcctttagttatgagtaaaatactaacacagtgggtgttcacttcatgccagctggggagcactgttgtagcctgggtatagatgtaactgccattgtactgttgtgttacatcaaaagaatcaggtttatgagcagccaggctatggaatgttccattcgcgagctgctggcttgggcatgggtgtcctgtcaggaagaactgtgaactggaagtatattctaggaaagtaccacacctccctcagcccccacgcagttgacctcagagctgcctattgttagtaagtttgtgattccatttgggctatgtctgcagaacattttgaggtcatgtgatgtactggctagttttgtgtcaacttgacacaggctgcaggtatcacagagaaaggagcttcagttgaggaaatgcctccatgagatccaactgtaaggcattttctcaattgttgatcaagggggaaaggccccttgtgggtggtgccatctctgggctggtagtcttgggttctataagagagcaggctgagcaagccaggggaagcaagccagtaaggaacatccctccatggcctctgcatcagctcctgctttctgacctgcttgagttccagtcctgacttccttggtgatgaacaagcagtatggaattgtaagctgaataaaccctttcctccccaacttgctttttggtcatgatgtttgtgcaggaatagaaaccctgactaagacatgtgatgattgagatttattattgatgcttgcttttggttaactttctgtaactgttttttaaactgataaaatattctttcaaaataaacatctagaacatgttaactaaactaaatccataagtagactcgaaacattctaagtagcgttatcttccgagcatggcccattagttttgagctatcgacctgacatgtcgtttcagccaccacctcaaatttatgatgcccagttggaagaaagagagcatgcgattgaagagtggaaaggtaagaccggtcctttcttaggacgtcccatagtccacaagaacatgctcccatagccctatagaacatgctttttactttttattcatactagcctcttaggaaggacctagaaaccccagggtcttctcttcccgtgttcagctcagaacaactgtgacaccagcagtgttagagtagaatatatatgacatcatactttgcttcaggtgaagtgcaaggacttttcatgatttcccatcatcacatactgataacaggcctggaggtcagtaagcatatcacacttcttgatagcatgggagtttaaagcaaacccagtatacaggccacatattccttacaagattcctgtctaaacagatatgggggagcccagacatgggacatgtgattgtctgtgtatattaagacatgtagttatgttttaaaatctagtttggaggaaattgccaaaaataggcaggaaggtattactagagctttaagatgtgctacacagatcagtgaactaagttggttaacaaagaagcaaaacctggaggctttcatcatgacttggaagcagggttaagagtaactaagggccatagtcagcacaggtcaccgttggtcatagaccttccagactggccagagtgggccagtagcccactcatgcacacagtcatcatggcaatgagcatcatctgtgcttacaaaatgctgctaatgtcagctcctaataacgccatgtggcagccaaaggaagttgaggcatcccagggccaggctggtgcttgagatctggaggcagagttcggtgccggggaaatgacaagtgtcttgacttctgtttctctttgaagagctaatttacaaagaagtgatggactgggaagaaagaagcaagaatggggtaaaagaccagccttcaggttggtgattgctttaattttgttgtctaatattttctttgtctattcaatgcttataaatgtcagtgatgtgttaatgtcacttgggccaccttagtgtgacactgtcaccttctggcttgtcctaatgctggtggcagtgactttgcactcatgtcttttgaggtgccaggccctaagctgcatttgaagcattcctgttgtgaccttgcggcagctgttgtcagctctgttgagagaggaagggattgggtttgaggagttttcgaaatgtgtggctgtctctgctcagatccatccagtttagaaaaggaaggactttgtgcagacctaagaccctgtgtactttattttgctcaggccatgctaacacatgggtaggaggaggtaggatagctttatttacctttgaaattaaaataatggtttcctgactcgctagacaaaaataaaatctacaccaggcaccaaactttcctttttgggtgtatattttagaaagcatttttatcacaaaagattcatttgaatcctgatgctttttttctgtatacgaggtgagatatgtctgttgtaaatgaaatgtccatgacacttggatgctacgcagacctaaacctcttgtggtaattgtaagataaactcatccattttcttttaaggtctacttgaagtatatcttttaagtaatcaacatggtcttatgtgaccacagggtgtggggggagggtattgtagggaaagtccaagactgttttgaaactgaaccaaagaaggactcaaggaaaaatcctagaagctcaaagtatagttgagcagtcttggttctgttgatcattaggatcaggaaactgcaaggcacaaaatggagaggtagcctgaagccccatgcctggcgtgcaggatgcgtgcctcagattttattccatttggttttcttagcacagatgcagcagtaagtagcaaggctactccttctcagtcgtcatccatcaatgacatctcatccatgtccactgagcacaccctggcctcagacacagacagcagtctcgatgcctcaacaggacccctggaaggctgccggtgatatgtatgttggagacggcgcacttgtctgtgaaggaactctcacttccatggccccgagcgcgtgggagctgatggaaccaaatcgaaaaactccatgttctgcatgtaagaaacacgatgccttgccctgctcagttccagtaggattgcctgcttagactataaaatgaggcagactatgtctgaagaaaaagtacaaaccacactgttagaaattttgttcaagatcatttcaggtgagcaattagaatagctgagtttcttttccagttgtgtggtatctgtggtgacagctcatgtgtaactgtggggactcgtatgcatgtgaccacaaatgcttgcttgaacttgcccatgtagcactttgggaatcagcatttaaatgccaaataatcttgcaggtagttctgcttctagaataatctcttaatcctctttagtaatttggtgtctgtccacaaaaaaatagattatgtgtattaattggccaccgtcatatatcatatcttacccactttatggtatgatttattctatcttttgtatttcagaaggaatataattaaatttatttaataaataaaaatacagctattcttaaatttgtgatgttttaggctgagaattaccactgctctatgtagacactctgtgccctttaaactgcccactgtgggatactttatgtacagctttctgcatgacaaagttcccagttgtattccatgctgcttaagacatctgtcaccttaaatcctgcccacgaatttcctttttcttgttcctttggacatggatctagaatcctccacagaacttcaccttctttatcacaaagcaccccatctcaatagaatgaagcggcaggctcctgaacccactgcctaatgttggcatagagctgacagagtggcttccccagaatggtcattgaatggtgcctccttccctgaacccacccatcctttgctcccctctccttatttaaggtgaaaggtgatggggtctcacagccgttccctctgcagccttccctcctgacttttctttctcactgacagaagccaccccgtccagccagagcgcttggtctcctaggagactgagctcactcactgtgcctgttggctgctgtctttttccattttgtggaggcatttcctttttctaagggaattcctcagatgttctagaagcactcagaagaacacagaagaaatattctagagagtaggggttcattcttgaatattttctgatttaaaactgctcacctgaaattgatactttcagatcctgatctgtaaattactcaagatttgataagaggctgagttctctgtgttgctgcagaaatggagttgggacggtcataccgtggctacctgcgctcagagcattttctcccttgagcttattttgttaacgattcatatcttgtgttcagttactttgggagctatggagtgtgttctaggaggaaacttgatagcttttatgaaaagtaccatctaatatgtgattctgtctgcacccgttgcatcctaatggttggtctgatcattggaacctttaatggacaacattaatctgaaatctgaaataaggattagctttgtatcatatatggatactttcaggtacagagtggaaatgctagtgtgggtgggggctgagacacctgtctatggcttcaggttattgggccctgggagcctgaagtcccacagtgcatcagtcagcatcatgctgtgctcttcctgctgatgcacattctttaaatgacttcccggaaacttaaggaggaaatacagaaaggagctgtatcatctaccctacactgtaaggggagtgtgctatgatagaggctcaccctggtcccacgggcaggagacagctgtgagtggatccaggtgcccccaaagagcggctttctctctccccttactctgcatatccattgagtctgttgtggatggagtctgtgctggtgtgctcagggtcttgtgccaagaccctcttccatccaggcaagtgcacctatgaccggcctcagagccccaaagaaatacctcaccccagtttcagggtcctccctcctgagcctagatttgccagggtcctgggacaatgcgaatggttttgaactaacttctgtaggcaaatgctgatgttggatgaagaactgaaaaatgtgctcaactttttcatcttttctattttatttttgtaatttatattgtacaccctggaagtcactattttggacatgtatttttataaaccgggtaactaatgattatctggaatttgcactaggttagtttttgttgttgttggcttaattttcagccaaaagtggaatgactgccccttccaggtccgggtttccatttcaagcgcaggtctggagggcagacatgtccagccagggtaggagagcggcctcagaacacaggctgctcagtgcctcgagcattgggcctgcagacaaaaccaggctgtgctctcaactttagaacacaaagaccagacccccggtgtgagaaggagaaagccctccattggcccttgctgacagccggggcctgcatctaaagcaaaaaacccaaccctggtttcatctgggctgagtggtgtgtgagtctgtctgctgactcctctgatgtcccatgccgatagtcagtacaggtgtgacctttcagatcgcgtatctcaaaagtggctttgcctaatgttttataataaaatatgtcatgtgctttgattggtggaaaataatacaaactacattttaaaagagaaaatgtacagcatgtccaattcctgtgtgtttcaaagtgacagttgactgtatctctccacatcaccattttgattacaaacctaacacgaatagatgttgaagtgtcgtaatttcagacattcagaagggttttcaaacccaaagtaggaacgctgctgttagttctaatctctgcatctgtttccaaaacaatggcagtagattttaacttttaaaaattgtacaatgtggttggaatattggtgacgttgtattctcacgagatgtaaccaggagaacctgccaaactgtctctatgtatatgtctaaaagccgttaatggtg

SEQ ID NO: 41 - DNA, 132722 bp, Homo sapiens
  source 1..132722: mol_type = genomic DNA
gacgtgcgcgggcgtgcgcggtgacggcccgcgtctctgttactcagccgagcggccgaggccggacgacgcggcttggattgcggagccgcgagcagcgctgggtaacggccgcggcgaccaccccggacggcccctgtccccgctggcgggcttccctgtcgccgttcgctgcgctgccgggtgagtgcggcggacgccgcagggccgggacggcaggcggccccgtcgtgtttatgttattgtgccgctgccgccgccgccgccttctcctcagccgtaaccccctcctgggagtgggggcgggagcgcgcggtgggcgggggcggcgcgggaacaatagcggcgcggaggcgggggccagccgagggggcgtggggctgcgggacctgggtgcgctccgctgcccgccagcccgcctgccgccgcgagccccgcccgcctgtcctctcgcgtcctcttcgcgtgggtcctgcctccgcggcgggagaagaaaatggagcgggggggtgggtggcaagttctgaaacacttcggcaagggtcggacggaggtgtctttgcggcccgccgcgccctggctgcctccggggcggcggggagccggggagagcgcttctgccggcaggtccccaagcctgccccgcgcccatagggaccgtattttgcttctcgatgctttctttgtgctaacgttctgggcgaacgcaggcagcagcgctgaaaagggccagagtggcctgcagctctgggctgcagggcagagagcccaggcccgtggctcgggtgggaggtgtccatccagcttggcccgagcttcggtggtcagcgcgcatttctcttgagggtcatcggtggtgaccttttgactttttcaccccaccctcccatctctttgtctcgcatttgtgttcccgattcagagatggtagaaccaagtccattttaaagtaccctgatgaacactttccgtttttatttctgaaagttccctgcttggtctttactgcgaatttaataacatgttgactacatggcattgtccagtgattactatttttacctctgaaatccagcgatctttccagtagaattctggtccgtcagtccattgtgttttgagataagcatccagcaagtacctccttggcaattagaacatctgttttttcattcattcattcattcagcagctgtttagtaccgtactcagatgaagaggtttggtgtgaaggtaaagtatcctttcatggaagaggatgctttgactgaagtataatagatggacctttaaatgagacagttacataagtgatgtctgttaaggaaggtatggttatattctgggtcattttttaagcagtatatctggaagttcaagtgtaataggaagtagaattagatttggtctaaatatacaacagcttttatttatttctaaattttattttttccagtcttgcagccttacagtcatttgtaatggttacctcagattcccctgctgtggttaacgttaaacctaggaggtcagatgctctaagtgaacatgtttagtgctgtgcctgacaaaagcaagcaatcaaaatgggacttccttgagggcaggcctgtcttgcatctgtttctccaccacctagcctggaatatagtaagtgttcaataaaagtcggattgatgaaaagctctttgtaattgataatatttaaaatcaagccttaaaaaaaaccgtaatgttctccataaagttttggaagcttcatgcaactgtcgcatcagatggctaaatggtcagttcatgtacattatctgttatgatgacatgggcttttgaatcacgtgtaggtcattcactgtcctaaaataaaatcttgtctaaatatttttttaatatgataaataaagtaggttgtggagtgtgtgtttctgtgtatgtgctagtttatgtgtgtccgtgtgtgtgcatgtacgtaatccacacacaggcactcataaactggtatttcagtaggggtctaaaatgattgcatttataattttgtgaatattatttgaaagttttttggtgactcttattgtggaaaattgaggacaaaaccacataaatgttttattagaaatatttctaatattttagaaatgtttacttgaaatgtttggttttaagttctaacttgtattaacacaattggtacaaaatatgagcctaaaactcaaaataattgatttatcgaagttaaagctcttttccacttactaaatacagtttagcgtttgttttgtatttgaaagaatatgaaatgagttaactaatgagtttcttattatttgctgtaaagtggaaatgaagaaataagaaaataatacttttttaagatgatggttgaaaatctttgagataccaaagttttattgctttacctagttagggtatgtcagattctagtaggggttactgacaatcctttggcagtagctcacaggctgtgtaaagaaccagagttgtgttactttgttttccaaattgttggtttttaaaaatagctttattgcaatttaattgacataaaattcaccagttagagtgtatatatttcggtttttagtattttcacagtgttgtgccttgatcaccatcactaattccagaacattgtcatcaccccaagaagaaacaccatatccattagcagtcactctgaatttcacttcaaattatcctttaaagtaagagatatagcatcgattctgttagtaaatatattcctttagtaagtatgaaaagggctccttttaaatgtcctgtcctggcagaataggaaactatatccttcatactcctttagatcctgggggaaatgccatttggaaaggaagtcagtgcaagaataaattgtatacaaattaatgtggttataatcttaactatttgctccatgcctgatattatcaaagtgaccttgtgaggatgagatgttcagtgaaacaacttgaaggaatttgttgttaaatgactagtccccaactatcctagtgctaagaggttgttgaataggagcctgcttcttgttggtctgctttgccagcgggttgaattttgacatatttcagtcatctacatggttgagatgctttgttgcacgagtggaaatacaaaataatgtctgacattaggattccagtgctctagaggtctctggtcaagtcaatggtatgggtagtagcttttctgattcatgtggtccaaggaagtcattataaccacatagctttatatatgaatcatttgcctatgtcagtgaactgtgatgctgattgtcttaatcatgagctctttacctgaacatttagaagccttgcattcttactcttaatgcaggttaagttgaactttgatttcagaagtgagttgactgaaaggtaacaggagtattgaaatgagttatcctgtcattcaggtcaataggtggagctagagcaatccaggaatcagacctaggttcatttctcagttctgccatctggactttgtcatcaaattctggagctttaggcaagtgccttaatgtttttggctttaaaagtataaactgaggctgtcagaacttttttttatagaaggcttgttcctcagataggtggttcttgagaaaacatactaggacaaaaagagcccttcttgggtgataatcagaagcctaagttaagaacagtagtcaaagttaggattttgtaattttgtaattttcagaagccaaaaaaattgttgagttgaattttttctttaatatccagacttagaaaacaaatggaaggcttcaccataagctagagattcttggaaaggtaggcttttatttattccacagcatcatgccttctaatgagaccgtatgctcccagagactttgtggaagacataaaatgagttcattatcctcaggaagcttataatcaaggattagactgaaggcatcgctaaacagttaatttatgctcttttaaaaggtatatgaaagggttcccgccaaacaaaagcccacttcacatctctgtgcaggccaaatttcactgaaatccagtttttaaaattgtgtgtgtgtgtgtgtgtgtgtgtatgtgtgtatacgtatgtgcatggagagagacagagaggagacccctttttggaaaacttagtagcttccattctttttcttggaggtgggttatatcacaaatacaagagatacctgtgtttcctgttaccctttattatatttcagatttagttaaaatctgccattctttagaaagtcaaggaactcaaaccttacaatgattgctagcgtgggttttaaggtcagccctgagttctaatcgtgctccaatctaactgtggtataggctagttcaggttatataacatatttgggcctgttttattatctgtcaaatgagaataataatagcacgtaacctcatagggctgtgaggtttaaattaggtactgcatgtaaagtgcctggcactgttgtggtggctggaatgctagatacaagtattcaggtagtttttgctattgttatcacttatatttaactttgaacaaacataaaatgccaagtaaacgtcaaaccagtttaatgcacagtgtccattctaattctccagaatatgccatttgtttcactctgcatctctggggggtttatttaaaattcgatcatctcatgtaatctgaattgactgagatgatttatattaacatttggaccagtaatcctctctatcttaaaatttggaaatgttccagaagcaaatattgaagggaacatatttgccactttcacgattttttgccttttcccacaggagaaaattgcctaagctttcctaggtttgttatagacatctaaaggaatgagaatttaggagctacgaatagctttatcatgtgacacatttgaagaaaatggaatgctgtcacatcttttaaatttagtgttattgggatcttcgattctgtgaagattgcagatttgtcagagacctggtaaccacaacaattcattgaggcctggaggcctcttaaaaaatgagggagattatttattagtaccacttagaaatattatcttttctgtattttctgtggttttctaagtcttctgtttagcgtttctatgattataatggtggattaaatttcttgttccttctcaagagcatctactatgagatgacactggtttttacttcggcagtatttactgagcattgcactatactaatccaggtattcggtgatgtaggaaccaaaggaaatagaagtcagtttctaccctcagtgagctgagtataatttgatagaagataaggattaacgtaagcacatttatgtcctaacacaaggaagcaaatattgttagtcatttcattaggaatttcttttgtcattggggcatttggggccttccaaaccttacatctcttgccatgcctttgtactcactcgataaacctgagaaagcaagatatcttcttttctgattcctggtttaagttgagagtgtggtgcacattagtcaaaatccaaatcataagaaaaggcaaaccttatgaattcattttggaatacaacagggtatcaaaataagtatatgagaaatatgaaaagctgacagtagaaaagatgctactcaggtactaaccagagttctcaatctcctctgtattgaagctcttatgatgtaaggctggatctgtactagaaacactttttaaagtctctctccagtattgagaagtatagtcctccagtactgcctcttggtgctgagagactcaagcctgccacccaccatatttctggggaaactagaaacgaaaaatagccacacacaagcacttgctttgcttggcaggaaacatcaaaaccataagatgttatttcctaaaagtcattaattgggtagaaaaatcaccattttctgacttgttccaggaaggatggctttctgattttcagatgccattgggtcaaccaaaggtaagataaagaaaagctactgctgtgtggatttttctgtgacttgagaaagcgtcacttttcagttaaacaaaaaccaaagcatctagctttggctgttactattgagaatttaaaagtcttaatgttttaatttgtttacattttatattttgactaagtagtaatgaattcactttgactcaaaattccaaagatttaaaaagataaagaatctccttttctactctgtgtagccacctagttcttctgcctggaaactgttaaaattcctgtgaatacttccaaagatagtttatatatgtttaagtatataatcctttgttcaaaatccttggtccagatgtattttagaatgaaggctttttttgcagttgtggaaagataatgtagcacatctaccgtgttatccaaaatccctagtaagaggttgtagcctcatgattaaacacattaacatttctgtaaaaaatacagacataggccaggcgcggtggctcacgcctgtaatctgagcactttgggaggccgaggcgggcggatcacctgaggtcaggagtttgagaccagcttggccaacatagtgataccccgtctatactaaaaatacaaaaattagctgggcgtggtagcgtacgcctgtaatcccagctacttgggaggttgaggcaggagaatctcttgaatctaggaggcggaggttgcagtgagctgagatcgtgccactacactccagcctgggcggcagaggtgtagactctgtctcaaaaaacaacaacaacaacaacacccagaaataatcaaagacattaatatttttataaaagcataacaaatacaagtagggtgaataaagattataaaatcttatgctacgtctcgtcaggttttaccaccaaatacgtttgtactaaacttattttaaaaacgtatttttcacagctttatggattttggctttgccaatgaaggataggtgtcatacatatatacagtactgtatagcctctgctctgctccctccctttttatttaatgtaagttgttgcatgcaatatgtatcaccttttgcttttttgttttttgcttgttggtttgttttttgagacggagtctcactcttgttgcccaggctggagtgcagtggcacaatctcagctcactgccacctctgcctccgaggttcaggtgattctcctgcctcagcctcctgagtagctgggattacaggtgatccacctgccttggcctccaaagtgctgggattacgggtgtgagccaccgcacgtggcctgctttttgttttaatatagctgagagattattttatatcagtcatatcagtatgtaaatggcatgcttttttaacatctttgtggtattccatttgtcttactctgtttgggctgctatatcaaaataccataacttgagtggtttaaacaacagaaatttatttctcacagttctggaggtcgggaagttcaagattaggctacttagtcaatttggttccctggtgagggtccttttcctggctttataggtggccggcttctggatgtatcctcacatggcccctaagagctctagtctgttcctcatcctatcatgggggctccaccctcatgacctaatatagtcatgagaggcttagttaactcctaaaggtctctcctccagatactatcaagttagagggtaggccttcaacatatgaatttggagggacacagacagtccataacatcattatactggtataccatttaactcctttctgatgcatatttaggtagttttcagacttttgctatcaaaagccatggtgcagtggattaccttgtgcatacgtcgtgttgcacttaaatgcataggataaatttccagaggtagagttcctaggccagcgtatgtgcatttgtaattttatgtattgctgaagtgtagcctgtagaggttgtccaacttccattccaccagcactgtgtaaggatgcctgcttcttattacccttagacgtctttcatcttttaagggctgtttgtgttttctttcttttgaactgtccttgtctttgcatgtttttctattgctttgttgctcattttcctagatttgtaggattaattttacaaattggctccatgctattttttggaaatgtttttccccaatttgctgttttccattctatggtaggctattatgtatggttccaactttattttcttcaccagatatccatccatttgtccctacaccatttattaaataatccatctttgtcttaactgatttaaaatgccacctttaccatttacaaaatttccacgtgtatttggtaccattgtttccattgacccatctgcctgtttgggacctgagccatcctgtttttattattgtagtttatgctgtgttttctgctaggtctaattcccttttatttctcttccttttcagaagtttttttctggcttctatcttgtttattttatatgaacttctaaaaacaacccatctagtctagtctgtacccctcctctgccagtctttctgttggaatcactttttttattttattgtggtaaaattatgcacagctagatgcacaagcattacagtccaataagtttgcctttgtatacacttgtgcaatcccagatcaaaatacagaacacttccatcacccagaaccttttcttacatccttttcaagttaccttgctccccagtgattggcttctattaaatggattcagtgtactgttaggatttctttgtatttatagaataagtgacagctttatgatgtacctttatatccaagaataggaaaaacaaccttttcatttgttgaagtctcattttgagttcctgatagcatttttaaacattaaaatttttttttgctgttttatatatttaagtttttttttttttgctggaaatggcatctttttttccacttttatcttctatctggttatatataagaaagctttttattttgtatattagttaatatttcatatattaaataataagccccctgtagaatatttattatttctaatagttttgtagttgaattttttatttttcttatgtcatgccagcttttttgtttcctttgatttttacctcctccctcccccaactttttatactcttatattttttcttattgcatttatagtggtgattttagaagattatagttttcctccattatatgtaaaatgagccaaaatatctgtttatctgttgagtatttaaatgttatgaataataatgaaattagggagggattatgggaatacttaaagtagtgtgaagttttctctctaaagttaatgtaacttgaaatgaattgtggttttcaaaatgttaaatggacaagttggggatcacttgatagtgaatgtaggattagcagttaactgccttgtgtcttatttgatgatacagtcatgcaccacatggtgaggtttcggtccattacagaccacatatgtgacagtggtcccataaaattataccatatttttactctattttttctatgtttagatacacaaatacttcccattgtgttacagttgcctgcagtattcagtacagtaacctgctgtacaggttcgtagcctagggtcagtaggctacaccatattatagcttaggtatgttgtactatctaggttggtgtaagtagattccatgatgtttgcacagtgacgaaattgcctaatgatgcatttctcagaaggtatccccgtccttaagcaaggtgtgactatgtgtataggctgctttctatgtgcttagcacccagaggcagctcccggaaatataatttagtctggtgtcagagagcatgcagtcaaagtagaggtcaagatatgagaagtatgaagtgaatgaatgtagacaggagggtcttaagcttggaaaaatgcaaaaatcaagtcaggaaagcacaggagtgagagggtgcaaagagtgagtttgatttggcaactggattggggcaggttgctcatccttataaaattatatggtagttaggtacttagctgaacttcagtagagatctcattgcttaatggggattaaatagtttattttctgtctcttcttcccttcccctgctcccaccaaaaagctaaggcagttttctactgaaggacgcatacatcgttaagtaagctagaaacaaaaagttagaacctcgggaaaacaagtatccagactatcctaatggtataggagctaatgcatatttggtgcctatcatataccaggcactgttcttgtgctttatgtatgttaaattgtttaaacatcccacagcaaccctacaaggtgggcactgttactcccattttatacatgaggaaacaggcatagagagattatatgggaagttgttggtgatcttgttgggtggttttattaaagtgggaagaaagaagccaagttgaagatggttaaaaaacaatgaatgatttttctttttaaagacagggtctccctctgttgcccaggctggagtgcagtggtgtgatcgtagatcactgcagccttaaactcctgggttcaagtgaatcttcctgtctcagcctccagcctcccgagtagctgggactcggctggcgaatttttaagttttttgtaaagatggggtctcactgtgttgcctaggctggtctgaaactcctggcctcgtgatcttaccacctccgcctcccaaagtgctgggattataggcgtgagccaccacacccagcccctgaatgaaacactttgaaaaagagtgagaaatgagcaagtgctgacacagtgggtgcagaccactcttttaagattagctctgaagtgaacaaagaaatgggttggtggataaaggaaattgtgaggctcagaaaatgagtgaaaatggcattgctgtatgtaggaaaggggatgcagagtacgggtagagagtttggccctcagtagaggagagatcttttccatctaacaggaggaaatgcagaaaagttgtgtgcccttgcgaggaagtttggaagttggaaggtgaaggcctattctcctggctttcatcttctctgtggtttctgtttgctcaatgaagcatgagattcatacgggcagaaagggatgggagtttggggagtttgaagcagtttgccaagaagtattgattgttcatttaaggtttaaaatcttgaatttaaagtgatatcagtcagcctggttttgtgaccccccacccccccagcattatttagctgattagttacaggcacagattaaggcaggtagttgaatttacccagggtgagattttgccaggtgtattagagttctccagagaaacagcaaatcggagttataggtaggtagactgagattttaaggcatttgtttttgtgagggctggcaagtctgaaatctgtagggcaggcaggaaattcttggtcaggagttaatactgcagccttgaggcagaattttgtttttctcagggaaacttgtttttgctattaaagccttaccaagtgattggatgaggcctacccacggtatcaaggataagctcctgtacttaaacttgactgtttgtagatattaatcacatctacaaaataccttcacagcaactacattagtgtttgaataactgggtactacagactagccaaattgacacttaaaactaaccatcacaccagatcagttcaaaagaaggaaagggggacaagggaaataaggaccttttaactagaatgcttattgtgtggtggtggttgagtgtgtaactggccacagggtttgagtaagttaacttgaaagattgaatgccatggtcagagtggaatacctgaaagagagatttcacaagtatgacaattattgacattaataatgctcaggttaactttgggtgtgggcttccgaggtggaattcagagacaaatcctgaacgtgaggaggccaatgagttaaagagtctgaggtattaaaaaagggtcagtctgcatgcatggtgaaatcagcaactagtgaggggagtaagggtacgtactgtaaaccagttgtaatgtcctcaatgaataaggaagaattggagggaggctagacgaacaagaaaggttaaaggtagtgtaacaggctaagtttgcttgtcacaaattgggaatttcagaaggccaagtaaaggaattaggaggatgaagaattgagtcaaatggaggacgtacacagcagtgtggcagtgagaattcagagaataatagataaccagggagagctggattttttctggtgaccataagcagggatgtgaggtatgagaggattagtcctgatacaggagatggtggttatcacttttagtgttgtaggactctgtggcagtgctttcagactgttactcatgacccattagtaggttatagaattttgggagatcacaatttctgttacgttgttaaaagaaatgaaatagaaaataccatagtgtgtcatgtgtaataagggactaagaattttttaacggttttattgagatataattcacataccattatagttatctatttgaaatatacagctcaaagcttttttagtatattcctggaataatggagccatcatcacagcctaactttagaacatgtttgtcaccccagaaagtaacctcatactcactagcagtcactccccatttcttcacacacaccccctcctctccctggccctaaacagccacttacccactttcttctctatagttttgttcattctggctatctcttttttatttttttgagatgacgtcttgctctgttgcccaggctggagtgcagtggcgtgatcccggctctctacagcctccacctcccgggttcaagcaattctcctgcctcagcctcccgagtagctgcgattacaggtgcctgccactaggcctggctaatttttttgtatttttagtagaaacagggtttcaccatgttggccaggctgatcttgaactccttaccccaagtgatctacccacttcagcctccaaaagtgctgggattacaggtgtgagccactgcacccagcgcattctggatctctcatgtaagtggaatcatacactgtgcgatcttttgtgactggcttatttcacttagcatgatgtttttaaggttcatgtatcatgtatcagtacttcgtttctgtttttttttcttttctttttttttgagacagagtttcacccttgttgcccaggctggagtgcaatggcgtgatcttggctcactgcaacctctgccttcctggttcaagtgattctcctacctcagcctccccagtagttgggattacaggcgcatgccaccactgccagcttattttgtatttttggtagagatagggtttctccatgttggtcaggctggtgttgaactcctgacctcaggtgatcccccaccttggcctcccaagtgctgggatttcaggtgtgagccactgctcggccttttttttttttttttttttttttttttttttaaattagatcaggtcttgctctgtcaccctgttacccaggctggagtgcagtaccatgatcgtggctcactacaggctgaaactcctgggctgaagcaatcctcctgcctcagcctcttgagtagctgggaccacaggcacatgccaccacacctggctaattttaaattttttgtagaggcaggctctccctatgtttcccaggctggtcttgaactcctggcctcaagttatcctcccaccttgagctcccaaagtgctgctgagattagaggcatgaaccacagtgcctgaccttcatttctttttatggtgaaatattatttggttgtacgatatgccacattttatttacctacacttcatttgatgggcatttggattgtttacactttttggctatagtaagtaatatagtacacaagttatgaatatgaacatttgtacacaagtttttttgtgttgtatgttttcatttctcttgggtatgtatccaagagtggaattgctgggtcatatgggtaactctatgcttattattttgaagaactgccaaactgtttttcaaagtggctgcaccattttacatttccaccagcaaggtgtgaagattccaaattctccacatcctattcaagcttgttattgtctgtcttgaaaatagccacctgatgagagtgaagtgatagcccattgtgattttaaattgcacttccctgatagctaatgatattgaacatagtttcatgtgcttcttggccacttttatatcttctggagaagtatttcagattctttgcctattttaaaaattgagttatttatctttttattacgttgtaagagtttttttttttttttttttttttaagagatggggttcttgctctgtcacccatcctggagtgcagtgatgcaacctgggctcactgcagcctcaaactcttgtacacaaatgatcctccctccccagcctcacaagtagctaggaccacaggtgtgccctgctaatttttaaaattttttgtagagatggggtctcactgtgccgcctaggtgctgtaactcctgggctcaagtgatcctcccaccttggcctccaaaagtgctgggattacaaacatgagcttccttgcctggccaaagagttctttatatattatagatacaagttgcataacagatgtatggtttataaatattttctcctgtttcagaggtagtctttttactttcttgatggcatcatttgtagcacaaaaagttttaatttcaataaagaaatccaatgtatttgtttttcccttgtgcttttggaatcttttataagaagccaatgcttaactcaaggtcatgaagacaacttctgcattttcttctgagttttatagttttagctcttacatttaggtctgtgatccattttgagttaattttatggtgtatggtataaggaaggcatgtgaggtaattcttttgcatatagacatgcagttgtcctagctccatttgttgaaaatactgttctttcttaccaaattgtcttgggcattcttgaaaaaaaggcagatttatttctggactctgaattctattccattgatctatgtgtctattcttaggttcccacggtgtgttgattactgtagttcagaattttttgaaagttgtgtttcacatagatgtgtgagtatatttatatatagatacacacagaggtgtgtgtgtaatgggttatgttggaaaatgttggaaaacctatggtgtctccccattagttcactcgcttgtggcaacttagtggagtatgttccctctcaggtaatatacagagaagacaggttagagggtctgtctgtgagtgtatgaattccttttagattggatgactgatttttcttactttagtaaagttttcaagtgcatgtggactgaagggcagtaaggagggcatagaacagctatgggaattcctaaagaattcatcagagatgaatgtaacgattatggagtgaagtatttgaaattttgaagttagcagggttttgtactgtgccagtctttcatgatttaaaaaaaaaaacttttttgaatatattaagcatgtctgtgtcggataacttaagacattatataaggaaaattatatagataatttaaggtttgggaatgatgctatctccttctagagaggatttttgttgactttggcaggaggcaagctagtggcactagcaatcccgaatcatcttaatccagtcagagactatgatgtttcaaaactgggttccggagtctacgaaggctggtctattttatgttttatttacttctaggtatgaccccttggagttctagcataaagccagggatgttatcagccccacatgcccccaccctcacactttcttgggcccttaactccaatatttaatcctctctagtcatgtaaatctattgcaagttcaagctcagcttctcagccacgtctttggaattggcagatcccttcagggggagaaatggccccggatgccagactcccttatgagcttttccttactctcccagatcttggtcttcatgctttttcactaccttggcactctgatgccctcaaacaggttttttggttttgatttttaaaacattttttctggggacttgggcaggtgtccagtttttctagttgctctcagtacgataattggtttgaattatctagttcaccattttaaggaaagcgatttgttaggttgatcaaggtttatgtcataagattctctgtttgaaattgtagtatatgtggtttcagtttttcctgagggtaagattttgggtaccagtttctacagattatagaaattattagaaaagggggaaatagccttaggaatagaaatgggagggaaaatggcagagaaaactagatatttttgcaaagtttgggaaagataaaggtatagggtaacattttcatgtctattaggagtgtaaaagggcattcatgtatcaaaggcgctgacatatttgttgtaatgatattgtcataattaaaaggctgtagaatctaggtattgtgggggtggctttgagaagtatctacttagtcgtgttgaataaaatttttaaatttcgcagagaaaccctaggatactgagtcattaattgaaggagtcaactttggggctggacttatggttgtgtcttatagcagtataaatctgcgcagccagtagtatgtaagggattgcagaaagaatttaatttcatagaacccattattaatatgagagatacaaaatgatactgattttgatttagcatgccatcttcatttatgtatgaaaataaatgtaaggtcttaaagagtttttgtttttgattctctaagctattcccatacttcttaaatttcaaaattacaaagttttccatacatcttaatcattataattgaggaaaaatggtatatctttaatagccccttcttctcttgagaaaatgatagatactgggtgtatttcagaaggttttatcagcagagttttggttgatattttaaactttttgaggataggaattgtttagtaaaatgatgccctctcttttttggctccatcttccagtatatgtgtcataggaacctggtttaagttcagtgtgtttctttgttacacctgtcagtagaatcggctattactgttttttggttccttacaactgaacattttggtcaccgtcctcacccactttttaaagtgacttcattctcccacatcactcccaactgaagaatgttcagacatacacattgaaagaatattacggtaaacacctgtatacttcatttggatattgtggttgttagcttttttgtcatattcgtttatgtctctcctaaaagtaaacacattctcttacatatgtcatacttaagcccttaatatctagttcatattcaagttttgctaattattcccccaaaaggtcagtttgtgctgcaaccaggtactgtgatttctcacctagtttccatagctcttgtgaaggtgttttcgtgcatggatagtgttcaaattgatgtttctgttaggggacaatcactggagagtcctattcttccatcttattctgcccctctcctccaaaaaggtcaacttgtaactgcttttttcaaaccaatattcaatcagtttatgaaccacatttgatcgttgttgctttagtcacttatacaacagttgtcctgttttctagtttttttttttttttttacactcatgatattggcttcttgaagagaccaggccatttgtcatatagaatgtttcccatattttggatttgtctgattttcttgtagcaattaacttttatctcaattcccactgtatttcctaaagtagaagattgagcctaaagactggattatatttagtttttttttggcttagttactcctgtgtacgttatattgactcataacacaggcatcaggtggtttgcctaaagtgtgatcatttggtgttaaggtggtattcaccagatctatccattataacaatgggtttccccttgacaatcagcagatcagtgagatgacgttttggttccctttgaatatcctgttttccagcagccttttacctgtgtgttgagtctcttggtgagctttgaatcagttatttcatttgggcttgcaaatggtgtttttttgtttttctaaccctatcatccttttttttttgagatggagtcttgctctgtcacccaggctggagtgcagtggcacaatctctggtcactgcaacctccacctcctgggttcaagcgattctctcacctctgcctcccgagtagctgggactacaggcacgtgccaccatgcctggctaattttcatatttttagtagagatggggtttcaccatattggccaggctggtctcgaactcctgacctcaagtgatctgcccaccttggcctcccgcctgtcatccttcttgatcaattaatattaaccagctttcctctgttaagaagacctttccctcttgtcaactgggattgaactacagttcttcctaacaagatgagataaatgtttatttctcttcaatataccaactctttttaacataccaattttgaaaatttaaccaatttggagtagtcatcttcaaaaagtggcacataactttcagtctctctgtatcacagggatttttgtttttttcagaagttttatgatcatttcagtcattctttttaaaatagtcttcatttgtagaagttttagttttacagaaaaattgagtatatactacagtttccatataccccagacccaatttctcctataattaacatcgtatgtttgcatggcacatttattacaattagtgaaaagtattggtacattattaactaaaatccatagcttattcagcttttcttagtttttagctagtgtttttgttttgttttttcaagatcccatctggaataccacattacattttgttgtcatatctccttaggatttcttagctgtgagtttctcagatattcctttttgtgattaccttgactgctcaaatattttgtaggataccgttttattggaatttgatgtttttctcatttttagactggccttatgggtttctagaaggaaaatcacagaggtaaagcatcatttcatcacatcctgtcaagggtatgtactgttaacataatttatgacttgattttgactttgatcacctggctgaggtaatgtttgtctgatttttccattgtaaagttactcttttttcctccttttcatactgtaatactggggaaaggtgaccatgcacagcccacactttagggagttatgtcctgcttcttgatggcagagtatctacataaattattaatatttggaatccttctgtgcaggagatttttattttctcccatttagtaatttgttcagtcatttatatcagtatggactcatggttgcttattttatactttgggttatagtccaatactattaatacttaattttgctacacacattgtttcagatttggccattgggaacccctttagttagctcctgtgcctgtgacatacttccatcggtgtgggtgttttgtgagcacttactttctggcactgcaggatactcccagctcatcttgtatgttttctaccctagtcctgggatcagccgtttctctaaggagcactgtttcctttaattagaaaatggtattagaaacaaagatctaggtgcccttgttgctactgggatgttgtgttttaggtactctcagcagatagagcaaataaatatattcatatattagaaatatctgtatatctatgtgtctagagagagatataagtatttaatattatatatcagtatttatatgtgcataaatatttgtaaccatctgtatctatataagctaaacatgaattcttaatgtcttcaactctaatctattaccatacggatcattcctggtcctcccgttactgaccagtaaatttcctccaatagcgggaaacctgcctcccagcacacaccatttatttacttagttgttcaattccaacataggtcttatagcagtatcagaattgttaactcacacccaatggaaacagctgtatcaactaggagtgttttttgtttgtttgtttgttttttgttgttcaattcttcagaaatttctaagtggacaatcatgtcatctgcaaacagaaacagttttatttcttttcccccctccgtctgcatgccttttcttcccttttattgtcttattgcagtatttaggactttaggtatgatgttgaataggagtaatgggaggagacatttttgccttattcttgttcttggggggaaagtagtttttcaccattaagtactatgttcactgtagagggttttttgaggggagtagagtagatttttttaaaaaatcaaattgaggaaattcttctccattcttggttttctgaccgttttcatcatgagtggtgttagattttgtcagacgctttgtctgcatccattgatatgaccatttgatttatcttcattagcctgttgatgtggtggattagggttacattagtagattttagaaccagccttgcatacctgggataaatctctcctggttatggtgaataattccttttctacattattggattcaatttactaatattttgttgaggatttttgttacctgtgttcatgaaagatactggtctgtagctttcttttcttaccatctctttgttttattattattagagtaaggctgctcttttagaataagtcaggaaatgttccttctgtttttattttctgcaagagattgtagagaattggtatcacttttttccttaaatgtttggaataattcaccagtaaaactgttcaggcctggtgttttctgttttaaaaggttaataactgttgattcaattttctaatagatacagatctattcagattattgatatagtttctttaatagttaacaggtttgttcaggttatctgtttttctttgtgagaactttggtagattgtgtctttcacagaatattggcttatttcatcttactaaatttttggtgtacagagttgttcatagtattcctttgttgtacttttaatgtacttgggataagtaatgatgacccctcttccatttgttacattagtaatttgtgccttctctctttttcttcttttgttttttttgagacaaagagtctcactgtcacccaggctggaatgcagtggtgcgatcttggctcactgcaacctcagcctcctgggttcaagcgattttcctgcctcagccttccaagtagctgggattacaggtacatgccgccatgcccagctaatttttgtattttttagtagaaatggggatttcaccatgttggccagggtggtctcgaacttcttgattagtctggctagaggtttaacagttttatttatattttcaatgagccagcttttttttttttctttgtattttcctgtttttaatttcactgattttgactgtaattcttttttttcttctgctcactttaggtgttactctttttgatgatcagttgtctcacatttggccagtgagagtctcttgaggtggctgctgtgtccattttgatctgacctggttgatcgttgaatgcttccttgctttctggcaggataaaatgtatttcaacctgtacttatcttgccttaacctgggacactccttttctttaggaagttggcttcagtcttaattttatgtgattgctcacttctttcatctaaactttaaacagatttgacacattgagatcagcacttttgcctttttttggtagtcaacaagagcaactgaggtgtcctgttgatgctagtatttaatgtcttaaaacttgtcttaaaaacagaacattttcctgttcaatttatataagcaaaaagacactttaactgtatccagccaaactcttctatggcatctctgaaagtaatttatactttgccagtttgtacttttgctaagagatagttgaaaaccacacctttttaagaagttcagaaattgaggatgcggtattctgaattatctaatttgatttttctgcatctctacagttgtttcattacttagtaaagcgtttccaactttagcttcagggtttttcttttacttttaacaaatattatgtgccaacacttacaaatagtaactcatttaattattttaaccttgctggtagatatggttattctcctctctccctcatagatggggaaactcaggcaagatgaagttaagtaacttgcgcagggtcatacacgagtggcagggccagagtctgaatccagacagttggctccagacgccagactcctagccactgctttgtgctgcccctctttcctctgctagttaagtcgaaaaagttgtttgtgattctgcatcttgctttcctcttctcttattaattatagtataatgggtgtcactcttattaccataagccttagtatggcattgcgagcaccagttaattaagcaataacgttttgagatccctaattggaagaattcagagcggtgtattgctttgagttagttggccctttgctgcaactctggccatgagacaacgttatcttgaatagtgataatgtgtaaaaagatgaggcctcctttttttttaaaaaaaaaattaaattcatttagagtatgaattttaaagtagtgtagtcagtgatgatataagatcaaagaataagtgaaaacacttcataaggcacagagagctaaatgtgtgtaactgttttattggtgtacatagttactgctggaactacagaggaagaatcattattttatgggaagaacatatgttactggaaatcctagattcttagatcacaattctaaattccagttctttgatgtgttaacatagggtccattgcatcctatttactggtttatttttatccttgctctgcttcttcataattgtaattaagtaaaactttctggttccccaaggtcagggcatactctttttgaaaataatattaactactgctgatgagaggaagagagcaacaggaagcatttaaaaaaattttttttaaactaacggcaaatataaaatatttaggaaaaaggtaaagattaaaagtacctatagctagtaatattttggtgtacttctttttatgtattttgtgcacatgtgagagagatttatatacatgggtacacacatgtataatttgtaaggatacaaaaatcatattagcttacgttaattgaggactagagtactgataactgcttttatttaagtctaggaaatagattttgtttaaaagaaatgtattcttaatagagaaataatttttataaaataagagatttgcagcattgctttttttgtataagtatgctaagactgccatctctttatttaacaggaaggagttttaaactttaacttaataggaagatgtttcaggggttctctgaagtcaagaatgttttcatataatactagaagtgttatttgcctttttcatgtctgttctcaagagtttttctgaggccatgtgacttgccctgtgatgtggcaacagactgtatagaagcaaatgagagaacccagctgtctgaaattaagccagaccataaagggatttgcagaaatgtagaacaatgtgtgagaaacacattcacccgtccaaacccaatgaatggactcagagacatgaagaacagcggaagtgagactttcaatggcagtcttgcaagatcaggtgtctggtaggcaggcacacccggggcaggtacagcaggtaatttatctcctagcacgcaggtctcttccccagttcctcactggtcgagtactatggggttacagtcttcccggacgttgcctaagtttcattatcccccttaaaaggttatactccagtccccttccccccgtaactttcaatttcccaatagcaaaactttcttcccttttatgggctgacccctcctctacattctgatcacttatcatgactttataggtgcatgagccatgcaatttgtcacatccgcaggctgactgccagtacttagatttgtttctcggtctagaatggatggattgtcattggtgatgagtataggattgcattctaaattgtggcagttatttggcagggagcccttggacagatgtagtttattcttcaagggtctccagcttagagttacccaccccgtttactgtccaaccctgaaaatgggtagtctaccatacatcatcccagctgggtggggcaggatgatgctctactgtaacctgtatctggttcagggcaaaggtacttatctgcctgcgagagctatccctgattttccaaattcccacaaggtaagacctggcaggcatcaaatcttacagtctgggatgctactgtcttggttacactaattaccaacctcattggatagggaggagtcccctgccagtttccattttgaccttctgctttttgtatagtagcccatcccagccatattaacttcgagaaatggggccaacccatgttttctttttagatttttctcagagttaactttaagggttcctcagtgcactttccactggtcttttcccctcccttccagggtctcttttaccaatcccttgactcaaggatagtgagtccacccctgttcagctgtttgcacagctatcttagtggggaccttcccagcttgggtggagcttgtcttctttccaaatcttaatcagcaccaagttgccaggctggaagtggtgaaccgtgaactcaagaggtggcatttgagtcagaagtcctcttaacctaagggatgacagggtggaggatatggccagtatataatttcttaagcattgatccatggtttccatagtagggaggatctgtagctctgcccaaatatgggtgcccctataataactcatagggggataatcccaagtattttcttggggctgtcataatcctaaggagtactattgggagacatttggtccagggtattttagtttctagattagtttggtgattatgctttttgagagtttgattcattctttctacctttccagaggaagggggatgccaaggggtatgataatctcatctaatttgtaaaccttccataattccccttaacacccttgagataaagtggctcccattgtttgaatcaatattttctaccaggtcaaatctaggtacagtctgttctaatattattttgaccacattactggcagtggctgttggaaggggaaaggcttccacccagctggaaaggtgacctacgatcaccagtaaatatatcagtcttcctcctttgggcatttctgtgaaatctacttgaatgctttgaaatggtcttagtctgggaggtcttcctcctgtggcctgttttctgatcacctttttgtttatcctttgacaagttacgcaacttccacatacttgtttagcaggggtataaatccctgtacacccataccctgttgcatcatgcagagtcggggatccccaatgactccttttgtgtaatatagacgttagctctctcatcaggggtttacttatttttcttccatcgggaagtatccatctcatcttcagtttgagtgacccctatcctgtctaattcttctttcttctctctgataaactggggccttaatactaccttagggatgtctgggatcaggctaaatagtctaatttcttcctccagggaggcttgcttagcagcttcagctgcaaacctgtttgctacagcttctgtggtgttccctttctgaaaaccatttacatgaactatggctacctctgctggaagcaagaggctttctaaaacctgtttggccagttccaaatgtaccaattattttctcctgctatttattaggccccactctgtccagatttttccaaaagtgtgtaccactttggattttaagtaggcatacttaaattcagtgtatatagtgcctttttggccttcaaggagctttagggcctggttaagagcataataattcacaggtttgggctaaccagcaattaggtaatcttcctttctcacataaggagtgtttatttccatcaatgacaccatcactgttatgtcccttgccatctgtcactggagacagcccatccacaaacagccttatctcatcatgtagtagagcttccctaaggtctggtctaactttggtttggtattctatgatacctaagcagttatgatctgatgtctctttgttctcctctcctttccctagaaaactgtctggattcaggcaagtatttgttgttacgaccaagtcatctttttctagtaatacagcctcatattttagaatccgagaatcagttaaccatcttccagctctttgatttaatatattcctgactaggtgtggggtgcttactattagggccccaccaaaggttagctttctagtctcctctaccagcaggtctgtggcagctattgtttgcacacatttgggctacccttgagagacaggattgagaagcttggagacaaaagcagcaggttgccttttcccaccccatatttgagtgagcactccaagggccatgccctagtctactgttagaaacaggtggaatgggttctctaaagatgggagggccagggctgtaatgagggcctggtttagctctttcactgcctgaatttcttctgaggaccactgcaagtgatcaggttcctcttctaataacttgaccggccggatgcaacagggaaagaagaaggggtggggacacggggcagagccagtcctcctgtttggggcctgggcctaggaaagctaactaggggcaggaaaggggagccccaggctgtggatgcctctgcgggggaacgttgggtcagcaacggccagaggaaatcctaaggccaaacagtatctgtggcctccctacctttgggcatcttctggtcgccaatttgctgcaagtcacagctcccaaatctggttgtgcaggctccaaagcagtggagcctggcgcttctgccatctccacctcctggatctcagagctgctggatggctccacccaccacccgctgagctggccccacttggggctggcattggtggacagcatgttccgggcgcctctgctcctctttgctggggcctgcacctttcctggctgctgactcatagatgtcagagctgcaggacggctccacagaagccctgtgtttaggacacctcattagtgaaggagagtggagagtaaacccaagggactatccagaggaatgtcagatggagtctctttggctccctctttcctttgtcccctaagcctagaatttctgtttctcattttcagtcagtctctgtgtctgagcttttccctgtgtactcaactccccaactggaggtttcttgcacaccccgagaatcgctttgtctgtctctggccgtttccctcgcagaacggaactgcagattgggactctgcacttgccttatatctgggatacgtctcagtcacacacactcgacctccaaaaatgcccaaccaccaaggcagtacttagagtccaattttcctaccttggcttgtgcatgaggtttcctggttgctgcagtgcctgcttttctccgtatgtcacctccactgcctcctgaataacagtctcaggtttgtctatggcctttgcaaggagctgggacactcagacagagcgggccacctaaatcgggtgagattcatctcccttttcggccggagtctgactctacgcaggcataaagatcccagacgggcccccaagtttgtaagggaaacattcacccgtccaaacccaaataatggactcggagacatgaagaacagcggaagtaagacttttagtggcagtcttgcaagatctaggtgtctggtaggcacacacacccacggcagttacagcaggtaatttatctcctagcacgcaagtctctcccccatttcctcactggtcgagtactatggggttacaatcttcccagacgttgcctaagtttcattatcccccttataaggttataccccagtccccttcctcacttaagtttcgattttccgatagcaaaacttttccctttcatgggctgacccctcctctacattctgatcacttatagtgactttctaggtgcatgagctgtgtggtttgtcacatctgcaggttgactgccagtacttagatttagcatgccttgaaaatggatcatttaaaatgttttctcacacaatggcactcttttcaccaggttttccttttttttaaattgtcgttttccatcaaaattctagttaatcatgcagtggaagtttattatgtttaaataaattttaaaaagtttaagtgctcacttctgtttaatatattaaatattgatatatcaacataaataaaagcttctgttaacaaagttctttgtttaaaaagtataaaggaatagtgataaccaaaaagtttgacagctgccatattatataatatcaaaaaattatttattacttactactcatctcaccagcaaaatcattggatcctgcacagggatagatacaaattttgcaaaattttaattttcacttgatagttttaattttttcattggcaataaatactgtcatttatttttcttgaagtgataggcacactttgttcattttcaagaaaatgtcttccacataccctagcccaaataacatagtttgtgtgtcattctttcaagtaaaaattgtattatttaaaaacatgtctcacaagtgcttttcctgcaatggcccctgtacttcagtatatagcaacagtgcttatgtatacttcccatttcatcataacagataatgtggatattcctcttttatatgtgctacaccagaatttaacaaggtaactgcagggagaatctgaaactatattaataaatttttcatattctattatattaaaatccatttgtctatcttgcgttttaaatgagtgttttgcccatttataagtttgaaacatcatgtattagtcatttggaaaatactgatttagtgaggcctgcagatctttcaaatgtgtttctttataccaccattgtcatagtgtggtttgaggactgacagggctagcagaaaactccatctgtatcaggtatttgacggtcaagatttatgtaattaagaatttttggaaatagtaagattgttaaatttctaccctgactgatgagtattaaaaaaaagaaccacagattatcagtatgtggagtgaaagatggacatcacaacatatatggcagatattaaaagaataaaggaatattataaacactcaaaagctaagaaacaatgtagatgaaatggaacactcttttaaaaaatattcattgcccagatttacacaagaaaacagctacgtatttattaaggaaattaaatttgcagtaaaaaagttcctcacaggccctgtgatatcatgagggaataatttgatgtggctcctacttctaaaagcagcaattctcaaactttttaagagttttggaatgtctgtgttgttaaaaattattgaatatctcaaggtgctttatataggctatagctattgaaatttactctattagaaattaaaactaagaactctaaaaaatatttattcatcagttcattgacaaagtaataacccagttaaagttaacataaaattttatgaaaaataactttttcaaaagaaaaaataatataacctattgtgataaccctgtgggttgcttagcccctggaaaactgctgtacacatgtaagagaatgccagtgaaaaaggcaaaaggtaggcatttctggaatggaacttttatttctcagcactttataggttttttaaagagaaggtgttgctattgttgtatcagataacacagatattaaaccaacaacagtaacaaaagacaagggcattatataatgacaaaggatttaattcaacaagatttgtatctcctaggtatatatgccatacccagtgttgtagcacccacatttataaaacaaatactactagacttaggaaaacgagacaaccacacaataatagtggaggactgcaacagcccactgacagcactggacagatcaccgcagaaaactaacaaattctcgacttaaattgaagttttgaccaaatggacgtaatacacacgtacagaataccctacccaacaaccacagaatacacattttactcatctttgcatgctctaaaaatgaccacatgctcagtcataaagcaagtctcaataaattcaaaaaagcagaaatcataccaagcatctgtttggaccacagttgaataaaattagaaatcaataccaagaataactctgaaagccacgtaagtacatggaaatgaaacagtttgctcctgaatgacgtttggctaaacaaaattaaggcagaaatacaattttttttggaacaaatgaaaatagaaacaatatatgaaaacctctaggatatagcaaaatagagttaagaggaaaattttagtgctaaattcctacatcaaaagaaagatctcaaattaacaacctaacattgcccctaaaggaactagcaaaataagaacaaaccaacctgaaagctagcagaacaaaagaaataacaaagatttgtgcagaactaaacagaattgagaccaaaaaattacacacagaatcaacaaaacggaaagttctgtttgtccttctaaagggtaaacaaaattgatagactgccagctagatgaaccaagaaaagagagaagattcaaataagcacaaaaatggcaaagatgtcattacagtggataccatagaaatacaaagatccttagagactactgtggacatttttatgtgcacaaactagaaaatttagaggaaatagataaacatctggaagcacacagccttccaagagtgaaccaggaagaaatcaaaatcctgaacagaccaataacgagttataacgttgaatacataataaaatctaccaaccacaaaaagccctgaaccaaaaggattcatagccagattttactagatgttggtagaagagctgataccaatcttactgaaactattccaaaaaaatcaaggtggagagatatcctccctaactcattctttgaaaccagtatcatcccaatatcaaaatctagcaaggacacaacaacaaaaagaaaaacagaaatgcaggccagcatccctgatgaagatagaggcaaaaatcctcaacaaaatactagcagactgaatctagcagcacataaaaaagataattcaccatgatcaggtaggttttttcctagatacaaggatggttcagaatatacaaatcaataaatgtaattcaccacataaacagaattaaaaaacaaaaaccatattcttatgcagtaaaatccagcatctctccatgataaaacctcaacaacctaggcatcagaggaacatacctcaaaatagtaagagtcatttatgacatacccacagccaacatcatcctgaatgagcaaaagttgaaagcatttcccctaagaaccagaacaagacaaggatgtccactctcaccattccttttcaacatagtactagaagttctagccaaagcaatcagacaaaagaaataaaagatgtccaaataggcaaagaggaagtcaaattatatgcttgttgatgacatgatcctgtacctaaaaaaaccctgaaagattccccgaaagactcctggacctgagaaacaactccagtaaagtttgaggatacaaaataaatgtacaaaaatcactggcatttctatacaccaataacattcaagctgagagccaaattaagaactaatttacaatagacacacacaaacacacacaccacacacacacaatatctagaattacatttaaccaaggaagggaaagatctctacaaagaactgtaaaacactgatgaaagaattcatagatgacacaaacaaatggaagaaacgtcccatgcttgtagattgaaagaatcaacattgttaaatgaccatactgcccaaagcaatctacaacttcaatataattcctatcaaattaccaatgtgattttttttcacagaattagaaaagacaattctaatattcatgtggaaatacaatagagcctaaataggtagagcgatctaagcaaaaggaacaaagccagaggcatcatattacccaacttcagactatactgcaaggctattgtaaccaaaatagcacggaattggtacaaagatagacacatacatcaatggaacaaaatagagaacccagaaataaagccacacacctgctatgaactgatcttcaactgagtcaacaaaaataagcaatagagaaaggataccctattcaataaatggtgctgggaaaactggctagccatatgtagaagaatgaaaatagactcctacctctcactatatacaaaaattaactcaagatggattaaagacttatttaagacctccagctataaaaattctagaagaaaacctaggaaaatatcttttgaacatttaaagaatttatgactaagatcccaaaagcaaatgcaacaaaaacaaaactagacaagtggggtttcattacagagcttctgcacagcaaaagaaacaaacagggtaaacagcgtacagaatggaagaaagtatttgcaaactatatatccagtaaaggactgatatccataataaataaggaatttgaatcaataagaaaaaataactcgattaaaaagtggcaaaggacatgaacagaccttctcaaaagaagacatacgagtggcgaaaaaaggtgaaataatgtgcaacatcactaatcatcagagaaatgaaattgaaaccacagcaagataccatctcatagcagttagatggctgttattaaaaagtaataaaataagacatgttggtgaggatgcagagaaaagggaacgcttacacgctgttggtgggaatgtaaattagtacaacccctatggaaaacattctggagatttctcaaagaactaaaaatagaactaccattcaaaccagcagtctcattactgggtatctacccaaaggaagagaaatggttttatcataaagacagctgtgcttgcatgtttgttgcatgcagcactattcacaatagcagaggcacagaatcaagtgttcatcaacagtggattagataaaagaaaatgtggtacatatgcaccatggatactacagagccataatcaggaatgaaataatgtcctttacagcaacgtggatgcagctggaggccattatcaagtgaattaatgcagaaacagaaaaataccgtatgttcttacttataagtgggagctaaacagtgggtacacatggacgcaaagatggaaacagtagacactagtgactccaaaaggaggctgagggggtagggttgaaaacctccctcctgggtactatgttcactatttgtgtgatgagttcaacagaagctcagaccccagaattatgcaatgtacccatgtaacaaacctgcgtatgtgccccctgaatctatacttaaaataaatatactcataattctctattaaatataattttcactataaaacaaagttttagttttcttatctctgacttgtgtagtttcagatgagaagtctgttgtaattcttagtgtttctgaataagttctaggaattgttcatcttatagtttcctggcatttgccctttgcctaagacttgtgaggttttgctttatgcatgtgcaaattagtattcaaacaaaaacataagaggatccctatgccaatttctggtgctctctattctctgaatctctctcttctctctatactgccctacaaattctagtcaccttcacctccttgatctgtctcctcaacttggcaaagtttccatactgtgtttggtgtgaccctttctgcacagtgttctggaaagagcctcctgccagaatggcaggacagttataggacttacctaatttgttttccttctgtctgttgctagtgtctgacaacagtttcttatattctgtccaatttctagttgttactgtaagagggtaaatctgatcccaattactctaccatgttagaagcagaagttatattaatttttatttttagagttgcctcaagaactgctgttctaaaataaactgaaccctatttaatatataatggataatactggacagtgaaatgttttttccttaggaaaatctaaacagctgtgggtctgggttaaaccatattaacagccttgctaatgaaatgtaaaaagtaaaagaagaaacgttaggtgcttccaggacactcatacttgaagtacaggttgaacatcccaaatccaaacatctgaaatctgaaatgctccaaaatatgaaactttttgaatgccagcatgacgctcaaaggaaatgcttattcaagcatttgggatttgggatgctcaactggcacatatataatgcagatattccaaaatctgaaaaaattagaaatgaaacactttttggttacaagcattttggataaaagatactcaagctatagtagatttcatttttcaattggtaaatactgtttggtgcttattatgcgccaggcagtatgcttagacttcaagatgagtaaatacaacaagcattacctatcttcttggagtttatagtctagtgaagaagaggattaattgtaaaaataaacaattagaactctgatgagtacaatgaaagagaagaacatggtgccatgaaagtatataaagatacctgatttaggatggacagacagggaaagcttccctgagaagctggtagctgagctgaaatttgatacttgaaggatgagcaggagctcaatagtaaggagaaggaagtaagttgagtagaacatttgcacagcaatctaggctgagggaaagcacatgcagaagcgatcaggagagagcctggcatatgccaaggaactgagggaaggctaatgcagttggactgcagagagcaatgttttggagggagtggtggaagatgtggcaggagaagtatgcagggcctatatcacacaagactgagtacaagttattcagaatttattcattcattcatttatttattgagacggggtctctgttgcttaggctgcagtgcagtggcgctgtcacggctgatcacagcctcaacttcccaggctcaagcgattctcccacctcagcctcccaagtatctgggactacaggcacacaccacctcgcccatccatttttaaaatattttgtagagacaaggtctcaccatgttgcccaggctggtcttgaacttcctggtctcaagcagtcctcccacctcagcctccaaaaatgttggaattacagccatgagccaccacacctggccataattttattttttataaaaaaaaattttacaataaaattcagatttgttcttattgggagaacagtagaagtcattgaatgaggaatcagtgagcagattttaaataagaaaacataattttgttattgtgaagaatggatagaatatggcaaacctattagggaactattgcagttatccaggaagacatgatggtagcttgaaatgtagtcgtgtgaatggattcaagagagatttagagggaaacagtataatcaacctgttgttgataggaggagtaactcctcagagtagttgtgggtaatggaatacatgtttctaccgtttgctgagacaacaccggaagaggaccagattggtttttggatatgttgaatttgaggtgccttttgaatgtccagatggaaatgtcatgtaggcatttgagtttgaaatcagaggagagatcagaattggaactcacacttgggttttattatattgaggtagtaattgctgtgggtgtgaatgagattagccagagcaaaggaatatagaaagagaagagcagtcctgtattttgaggaattccccctattgaatatccaggtagaatagtgaatcattaaagaagcctgcaaagaactgatttcagcaaacctaggacagtgaattattaaagaagttaccgtgtgttgctttcctatggctgctttaacaaattaccagttctactggcttgaaacaacagaagtttattctcacagttctagaggccagaagtctgaactcagtattagtaggctggattcaaggtgtctgtcaccagggccatgctctctccagagtctccaggggagaatctgttcctttcctcttccagcttctgttggctgctggcattccttggcttatctccacatcactccagttactgcctacacggtcagattgcctcctccttttctgtgtgtctaatctccctctgcttctcagacagctgtaatgacatttagggcccacaagataatccaggacaatctcatctcagaatctttaatgacatctgccaaaatttcccataaaagataacattcgcagcttccaaaggttaggacccagtatcttcaaggtagcatttttgaacctgccactcaagggaagaaaatgcttcaaggattcaattgatcagcaatgtcaggtgtttctgaaagattaaatgtgaatttaaaaagtccaatcagtagcctcagagagtggaagccagattgagaggtgttaggagttaataaggtgttttgtagctagacgttgcaagatttcttgattgctttttctctgtgagatggaattattggagattgaaattttgaaaagaatggagaaaattttgtgttggagagaatggaaagtaattttaacaaagagggcattattgtatactcattgtatactgttgataccatgcatgaaatgatagctgaatcgtctgtcctcttgtgttactttgtccatttgcacttggatatagctatggagaaagcagcttgctgggttcatctggggttggtattttgcaagacaggaatctaaggagtttgatatgttggtttgcagtagtttgaatcctctactgcttaccccgtgaacatttttggtgtacctccactctgtcccatttagccaggatttacttaaggaatgcaaatgaaatagttggtaaaatagaacaatatcagagtaaacaaagatcacatattttcactcttaattatgggtcccctctgtaaccacaagaagcaacgatagttggtcacttctgaaaattgttataatacagtccagatgtgacttagaaagtctagggtaacagatttgctttttctatatgcatttttaaacctgcacagattttgtcagctacttttgtttttagtgctatttataactccctgttgcctttattcctaaagagctactgctgtttaagatggttgccagattggccatctgctgtttcccactagtcatcgatttttcatcaggtacataaccaaagcatttcttcttttcagtccttttggggagtttcacatcagtccactgtatagaagctgatagaatattttggtggtggcattctcagcatacatttctgaactggcagactgttttcttaccaggatctcattgttgatatactgcctagcttcctaatgctgcaagattaatcttcttgagtaatttaaattcaaaatgtatttttaaaatatcttctataagcaaggctacaggctgaatacttttagaaatttaaaaaaattaattaaaaattttctaccttccaaatgcatatagttcttggggagacagtgtgtttgtcaatatgcccaaaccatataattagaattacaaagagacaaggaaaggtaaaatgctgtataagaattcaggaattctagataagattgtgatgtgattgtgcatatctcgcattctgtcttcctctttgtccaccgaaatccaggtagagtcagtaaacaaaatctaagtagatgctttctaaaagaaaatcatctaaaacaaagtgatacagaagggttaaaagttttttaaaaaaatccgtgaatgcttgaaaaagattgtgcaatttcaaaagaaaccaagaattgtaataatataagatgcggcagaattcaaggcagaaaacattaaacagaaaggatcattttttaatagatcatagtgggagattttaaccattgtctctgagagtaaagtattcggagaataagcaagaccataggagatactaagagatctagataaacttggcaggaacttccggtttcattgcttgacccaatacttctgtgaattacccactttatttctttattgttaaccctctctctcaactattgggtaccttctcaatttggttaatgagtcacttggcatacagttctcgggttctttgacattttctggtagaaagtgaatcctaagtattttgcgaaataaatttcagggttcttgtagagtcataaagaggcaaatgaatgaaatgaattaggcacatttcttttgagtccaagatctaattctgttcacacacacacacctttgcctatcaagcctaaccatgaagaaaatgatacgtaaacttctaagtgatatggtacacatttctgcttccaaaatgggatagatatacttttccatagttttacctattattcttgctaagtagagctaaaatccctggacattacatttaaaaacaaacataagaaaacagaaaaatggagagaactgggtggatctgctcaggacccagataatatcacagtaaaagtcctgagttttcttattaccttatgtatttcagaatggtgcagaaaagctggcaatccagaaatgttgggcacagacaaaagccccaggaaaaaaatgatgctctttagctggggaccaggaaaagggtagcctagcaagacagaaaataaccacttcagccaaagaacatagaagagtcaccctgattagcaaagaccaagtgaggacctagactttcacagtgtttaggctgtaacaagacaactcctcactccatagtggcagcagagccaatatgggaagcagtaaccataggcagggagcctgaactcccacgtatgcttaatatgagtcccgtcttcccttcacccccaagttctttggtatacaaaagcctgtgggcggcaagccacccaggcaccgaggcaagagacaggggacacgagctgttccagtataataaaatataaaacaagaatagttataccagatatagatcttagatatgattatatatgaatatcattaatcattagtttgtagcaattactttttattccaatattatgataatcctcactctataatcatagtctaggaaaaaccaggccatacagagataggagctgaggggacatagtgaggtgtgaccagaagacaagagtgcaagccttctgttatgcccggacagggccaccagagggctccttggtctggcagtgacgccagcgtctgggaagacgcccgttaccaggcggatcgtggtccagcagtagcaaaaggtgtcaaggaacaacacccgctccttagcagactgggaagcaggggggagggtctccctttccccgggggagtttagagaagactttgctcctccacctcttgtggagggcctgacatcagtcaggctctcccacagttatccggaggcctaaccgtctccctgtgatgctgtgcttcagtggtcccactcctagtctgccttcatgttccatcctgtacacctggctctgccttccagatagcagtagtaaattagtgaaaatactgatagtccctgatatgcagaaataatggcgtaagctgtctttctctgtctcctctccctctctgtctcctctccctctctgcctcagctgccaggcagggaagggccccctgtccagtggacatgtgacccacgtgaccttacctatcattggaggtgactcacattctttaccctgccccttctgccttgtatccaacaaataacagtgcagccagacattcggggccactaccggtctccgcgcattggtggtagtggtcccccgggcccagctgctttttctcttgtctctttgtcttgtgtctttatttctacactctctcgttgccgcacacagggagggacccaccgaccctgtggggctggtccctacaaaagcctagtgagaaacctgcacttccaccccccactaggcattttttccaccagagcaatgtcaaaggaagcttactataatggaatattaaaagtagatccagtcacctaatgtaataacccaaatatccaggtttcaatgaaaaaaacctctcataccaagaagcaggaaagtgtcagctcaaattagaaaagacagttaatacatgctgacactgaaataacacagatactagaattatttgacaagaatttttttattgtactttaagttttgggatacatgtgcagaatgtgcaggtttgttacataggtatacacgtggcatggtggtttgctgcacccatcatcccgtcatctacattaggtatttctcctaatgctatctctgccctagctccccaccccgcaacaggccccggtgtgtgatgttcccctccctgtgtccatgtgttctcattgttcacctcccacataagagtgagaacatgtggtggttggttttctattcctatgttagtttgctgagaatgatggtttccagattcatccatgtccctgcaaaggacatgaactcatcctttttgatggctgcatagtattctatggtatatatgtgccactttttatttatccagtctgtcattgatgggcatttgggttggttcccagtctttgctgttgtgaacagtgctgcagtaaacatacatgtgcatgtggctttatagtagaatgatttataagcctttgggtatatacccagtaatgggattgctgggtcaaatggtgtttctggttctacatccttgaggaatcgccaactgtcttccacaatagttgaactaatttacactcccactaacagtgtaaaagtgttcctatttctccacatcctctccagcatctgttgtttcctgactttaatgttcgccattctaactggcgtgaaatggtatcttgtggttttgatttgcatttctctaatgaccagtgatgatgagcttttcttcatgtgtttgttggctgcataaatgtcttcttttgagaagtgtctgttcatatgtttcacccactttttgatggggttgttttttcttgtaaatttgtttaagttctttgtagattctggatattagccctttgtcagatggatagattgcaaaaattttctcccgttctgtaggttgtctattcactctgatgatagtttcttttgctttgcagaagctctttagtttaattagatcccatttgtcaattttggtttttgttgccattgcttttggtgttttagtcatgaaatctttgcccatgcctatgtcctcaatggtattgcctaggttttcttctaggatttttatgtgttatgtcttacatttaagtctttaatccatcctgagttaatttttgtataaggtgtaaggaaggggtccagtttcagttttctgcatatgactagccagttttcccaacaccatttgttaagtagggaatcctttccccattgcttgcttttgtcaggtttgtcaaagatcagatcgttgtagatgtgtggtgttatttctgaggcctctgttctgttccattggtctatatatctgttttggtaccagtaccatgctgttttggttactgtagctttgtagtatagtttgaagtcaggtagtgtgatgcctcgagctttgttctttctgcttaggattgtcttggctatacgggctcttttttgggcatgtgcaaagacactcataggctcaaaataaagggatggaggaatatttaccaagcaaatggaaagcaaaaaaaaaaaaaagcaggggttgcgattctagtctctgataaaacagactttaaaccaacaaagataaaaagacaaagaagggcattatataatggtaaagggatcaatgcaacaagaagagctaactctcctaaatatatatgcacccaatacagaagcacccagattcataaagcaagttcttagagacctacaaagagacttagacccccgtacaataatagtgggcgacttaatacccaactgtcaatatcagacagatcgagacagaaaattaacaaggatatccaggagttgaactcagctctggaccaagcggacctaatagacatcgatagaactctccaccccaaatcaacagaatatacactcttctcagcaccacatcacacttattctaaaattgaccacataattggaagtaaaacactcctcagcaaatgcaaaagagcagaaatcataacagtctctcagaccacagtgcaaacaaattagaactcaggattaagaaactcgctcaaaaccacacaactacatggaaaccgaacaacttgctcctgaatgactactgggtaaataatgaaattaaggcagaagtaaataagttctttgaaaccaatgagaacaaagacacaatgtatcagaatctctgggacacagctaaagcagtgtttagaaggaaatttatagcactaaatgcccacaggagaaagcaggaaagatctaaaatcgacaccctaacatcacaattaaaagaactagagaagcaagacgaaacaagttcaaaagctagcagaagacaagaaataactaagatcagagcagaactgaaggagatacagacacggaaaacccctcaaaaaatcagtgaatccaggagctggttgtttgaaaagattaacaaaatagactgctagtcagactaataaagaagaaaagataaaagaatcaaatagacaaaataaaaaatgataaaggtgatatcaccactgatcccacagaaatacaaactaccgtcagagaatactataaacacctctatgcaaataaactagaaaatctagaagaaatggggaaattcctggacacatatagcctcccaagactaaaccaggaaaaagttgaatccctgaatagaccaataacaagttctgaaattgaggcagtacttaatagcctgctaaccaaaaaaaagcccaggaccagacggattcacagccgaattctaccagaggtacaaagaggagctggtaccattccttctgaaactactccaaacaatagaaaaagagagacttctccgtaactcattttatgaggccagcattatcctgataccaaaacctggcagagacacaacaaaaaaagaaaatttcaggccaatatccctgatgaacattgatgcgaaaatcctcagtaaaatcctggcaaaccaaatccagcagcacatcaaaaagcttatccaccatgatcaagtctgcttcatccctgggatgcaaggctgtttcaacagatgcaaatcaataaacataatccatcacataaatagaaccaatgacaaaaaccacatgattatctcaatagatgcagaaaaggcctttgacaaaattcaatagcccctcatgctaaaaactcaacaaactaagtattgatggaacttatctcaaaatagtaaaagctgtttatgacaaacccacagccaatatcatactgaatgggcaaaagctagaagcattccctttgaaaaccagcacaaggcaaggatgtcctctctcactactcctattcaatatagtattggaagttctggccagggcaatcaggcaagagaaataaataagggttattcaaataggaagataggaagtcaaattgtctctgtttgcagatgacatggttgtatatttagaaaaccccatcgtctcagcccaaaatctccttaagctgataagcaacatcagcaaagtcttagcatacaaaatcaatgtgcaaaaatcacaagcattcccatacaccagtaatagacaaacagagaaccaaatcatgagtgaactcccattcacaattggtacaaagagaataaaatacctaggaatacatcttacaagggatgtgaaggacctcttcaaggagaactgccagccactgctcaaggaagtaagaggggacacagacaaatggaaaaacattccatgcttatggatagaagaatcaatatcatgaaaatgaccatactgctctaagtaatttatagattcaatgctatccccatcaagccaccattgactttcttcacagaattagaaaaaataactttgaattttttttttttttttttgagacagagtctcactctgtcacccaggctggagtgcagtggcatgtgatcatagctcacagcaatctcaaactcctgggcttgaatgattgtcccgcctcagcctcctgaggtctcgctatggtgcccaggctggtctcaaactgctgggctaagcgatcctcctgccttagcctcccaaagtgttgggattgtacccatgagtcatggcacctcgccctgacacaaattttaaaggagtcatcaagacagtgcttcaacaagcagttatgaacatgcttgaaataaattaaaaaaaaaggaagttttcagcatagcaaataaataggtaaagaaaaaccaattggaaactttataactgaaaaatacagtaaccaaaataaaatcttaatgggtaaaactgtagcaaaactgacacaaaaaaaagaagacacaaatcatcaggagtaaaataagagatacaggttgagtatccttcatctgagatgcttgggtccaaaaatgtttcggatttcagattttttcagattttagaatatttgcattggttgagcatcccgaattcaaaaacccaaaatctaaaaatgctccagtgagcatttgctttgagtgtcttgttggtactcttaaagtttcagattttggagcatttcggatttcagattatcagatttgggatgctccaccactctggagcctgtggacatgaaaaggatactatttttaaaaatctacagaaataaatttgacaactttgatgaaataaactaagttttcagaaagtacaacatactgcaagtcactcagtatggcatagataatttgaatagtgctacaacttaatagaactttataattttaaaatgaaaataggcccgaatgatttcattggagaattctagcaaaggcttaaagaagaatttacactatttctgtgtagtctctgccagaaaataagggaatacttcctaattcatttatgaaatcagtattattttgctaccaaaagcaaagacaataccaaaaaaaaaaacctaccaataaagaccaactcctttttaagtatagatgtagataatccttaacaaaatgttaatcagtataatccaacggtatataaatagaattaaacacaatgaccaagtggactttattttgggaatgcaagattgattcaacatttgaaaatctgtcaatgtaatctatcaatgtaaccatattaacaggatcatgaagaaaatatatcaaatgctatagaagcatttgacaaaattcaataccatttatgattaaaactcttagaaaactaggaatagaagcaaacttcctcaactggataaagaatatttatagaaaataaacagcatcatacctgatgaaagactgaatgctttccccttatgattggaaacaaggtgacaaggatgcacacactcacaactcttattcaacaaaatattgggagttccacccagcacagtaaaacaagcggggggaaagccctgacaattggaaaaggagaaatgaaacaccttccttttcgcctgtgacgtgatcatctgtttagaaaatcctaagtaatctacaaaaaatctgtggaactaataatgtagcaggatcacaagatacatttaaaaagcaattgaatttctctacactagcaatgaacgtgtgaaaaccataattaaaagtgaaatactatttggaattgctaaaaaaaaagtgaaatacctagatatcagtctaacaagacatgcataggacttgttggatgaaaactattaaatgttgatgaaagaaatcaaagacccaaatgaatggaaagacatactgtgctcatagattggaagactcagcatgttataaatgactattttcctaaaatagatgtaatacaagtttaacaaaatttcagcaggttctttttgtaaatatagacaaaatttttctacgatttatatgaaaagacagaagaaccagagtagctagtttttcatacagttttgaaaaagataaggtgggaggaaacactctatactcaatttcgacttataaagatagcataatcaagacagtgtagtattggcagacagatagacacataggtcagtggaacagactagaaacccagaaatagctccacacaagtaaagccaattgattttgacagacgtacaaaagagactcagtggaggaaagtggcctgttcaaatggtactggcacagttggatagccataggcaacaaaataaaccttgacctaaaccttgtgcaaaaattaactgcaagtggatcatagattctaaatgtaaaccctacaaccataaaacttaaaacatggaaaaaaaaatctctgggacatttgtgattcatttgtatcatggaatcctactcagcaataagaagggaatgtgatgtatatgcaactaatcagaactcttaaagacattatgctgagtgaagaaaagtcagctcgaaaagtcacatatgtatgactgcatttatagaacattcttgaaatgacaaaattatagacatggaggacaaataacagattagttgttgccagggattagggatggggttatgggaacagagagggaagtgaatgtgactataaagcaggtagtctttgtggcgatggaacagttttgtatcttgattgtgattggtggtagtgacacaaatctgcacctgtgataaagcgatacatagctatacacacacactgtactaatgtcagtttcctagttttgattttatattatagtaagatgtaaccatgggagaaactgggtgcagggtacaggggacctcttttgctatctttggaacttcctttgaatctaaaattatttcaaaattaaaaaaaaatttttttaaattatcctagctaaagcatcaagtgaaagttcttaagagaaaaaaagaaaacaagggaagggaaggtacaggatgtctgggaaattgtctgtgacatttaaactggtttttgcccagggggcatttgccaaatctggtttcctttcctcagcatcagagagcattgaggaacctgaggaaataataaggtctttctttctgggatgatgaatctgatacgttcttcctcttcaccttaaagctgagactcagctaaactggaaaccaccaccaatcccaccatccttcaagattgcagggaaagttgattttctgcatgcttcttagtttttaatgtgcatcagaatcacatggaggacttgttaaaacaaagattgctgggcaacatccccagagtgtaagattcagtaggtctggggtgagacttttaaaatttgtacctctaataagtttccagatgatagtgattttgctggtcgggaaccacactgcaaaaattatttgtatagctaaaaccttgtcggagtgaatatgggggcaagatcactgctgagaattttaagcaaccagctgacccttgtataatttgcagtgcgaatttaacgctgtgtaggtgatctaaaaaaaaaacagaaaaagaattccctaagataatttatccccataatggcagtatacatagactggcagtgagtatccccagactcttgtagaagctaacagaaattctctttggagaaactcatctccatcccagagttgaaagttttcctagaaataaaattctaagtaagtagaacaactgtgatagtcaaaaagaaaaacataaagaaactaagcactgtgagcaggactcaacagcagacctgctggaaaataggaataggcagctacagaatatgaagtaagtgtttcatatgtttcaacaaaagttgaaaatatgttccaagattcagaaactataaagactattcaaagagattttttaaaaatagctagaatttatacaattgaaaattatagtagttgaaactttattaaaagtcctcaatagggctgggcgtggtggctcacgcctgtaatcccagcactttgggaggccgaggtgggcggatcacgaggtcaggagatcaagaccatcctggctaacacggcgaaaccccatctctactaaaaatacaaaaaattagccgggtgtagtggcgggtgcctgtagtcccagcagctcgggaggctgaggcaggagaatggcgtgaacccaggaggcggagcttgcagtgagccgagattgcgccactgcactccagcctgggtgacagagccagattccgtctcaaaaaaaaaaaaaaaaatcctcaatagatgaatttaactgcagattatataaactcaaaaaaggaaataatgaactgaataattactcaacaagcattcaagagaaacagttgaaaagtacgaaagagaagttatacatatttaaaaataaatatttatctgaatggttttctgtaagagagaatggtaaacaacagttaaaagaataatggctaagaattttctgcatcttgtgaacaacactaaactatacattgaagaagcacaggaacctaaggtggttaaataaataaatcctcacttagccttgttacaataaaacagcagaacatcaaagacaaagaaaagatctttgatatatctggggaggaagacagatttaccgtgaataaggtcacacccagaagacaggggaacattttcttaaattaaaataaaaatctagaattttatactaagagaataaatccagggaaattcatacgtttcttgcagacaaaaactgagcatttgcaattaggaagtcttcacttgaaatttagaagtgtgtactctaggcatgaagaaagtgactctcagacaggaggccagagatacaagaaagatcaaaaagcataagagtaataaatatcttagtaaatctaaacaaacatttttataaaacagtaatcattttcataggctttaaagcatattaatatatatgtcaatgatagcacgtaagtcagaaggatgaatggagtttctgtaaggtacttgtgaggacagtaaagacacataacttttcagagtctaaagttaatcagtatgtgtgtcataatagcagatagaagaaatagaggtaataacttgtgaaataacatagaggatgaaataagggaaaatatgaaatccaaaaggagaaaaacccagaaacacatagttcacagattaagtagaaaacaacgtgatggatataaatccaaatatatcattaactacattaaatgtaagatgaattaagccccaattagtttgagtggcctactgaatttttaaaatccaactatgtggcctggcatgatggctcacacctatagtcccagaacttcaggaggccgaggcaggtggatcacttgaggtcaagagttcaagaccagcctggccaacatggtgaaaccccgtcttcactaaaaatacaaaaattagctggttctaatggcatgtgcctgtaatcccagctgcttgggaagctgaggcaggagaatcgtttcaacctgggaggtggaggttgcagtgagctgaatttgcaccactacactccagcctgggtgacagagtgagactccgtctcaaaaaaaaaaaaaaaaaaaaaaaaaaaaaaaaaaaaaaatccaactacgtagtttaccaaaaaaaaaaaaaaaaaaagtttaaaatggttgaaagtaaaaggatggaaaaaagatatatcgtgcaaatactaatataggttttaaaggcaaaaatcggattgttttttgcactgataaaaggtaacacttcgatgggaaaatacgattgtaaattccacatatttaatgctgtgactacaaagtatataatgcaaacaaaataccaggaggaaaaagacattcataatcacagttggagggtttttaggcttgtctcattaactgatagaacaagcagagaatacactgacataaaccttgttttacaagtattctttaatctgtttcacatctgtaacatctgtagtcacatcctgtttttcaccactcataattggttttctgtgccttctttgtttttgtttagtcttgcaaacaccaaatagtaaatgccgctatctttatggtttgctaagaataatcagtgataagtgaacataccagagagttcatcatttttgtttgtgttttgagacagggtctcgctcttttacctatgctggagtgcggtggcatgatccaggctcatgcagccttgacctctcgggctcaggtgatcctcccacctcagcctctgaagtgggagctgggactatagatacatgccaccacacctggctaaattttgtattttttaatagagatggagtttcaccatgttgcccaggctggtctcgaacccctgggctcaagcaatgcatccacctcggccttccaaagtggtggggttataggttacactgcacctggccatcaatcttattttttaaaatcttttaattataaaatacacgtaacataaatttattatttgtttagtacatttagaatgttgtgcatccgtcaccactgtatagttccaggacattttcatcaccccaagaggaaaccctgtatccgttacgtagtcactcctcattcccctgtcccatttccttcctggtaagcactaatctgctttttgtctctgggtttgtcttttttggatatttcatgttaattgaatcatagaatatgtacctggtttacttcacttagcataatgtcctcaaggttcatccatattgtagcaggtatcagtactttgtttctatctaccacattttgtttatccagtcattagttgatgaacctttggatgttgctaccttttggctgttgtgaatagtgctgctatgaacatgtgtatccacgtttttgtttgagtatctgttttcagttcttttggatatatacccctgactggaattgctgggtcatatggtaatctatgttttactttttgaggtacccagcaaactgtttttcatagcagttgtaccattttatatttctacccatgtgatatacaaggattctaattatccacatcgtggtcagagcttgttactttctttttgattatattagtagtcatcatagtggatatgaagtggtgccttatggttttgatttgtatttgcctcatggggtaatgatgttgaacatcttgtaacatacttattggctgttttgggtttgtcttttttgttgttgaattgtaagagttctttcctgttttggatacaagacctttgtcagatacatgagttgcaaatattttctcctcttctgtgggttgtctttccactttcttaataatgtcctctgatgtacaaaagtttttaatattggcaaagtctaattcatctggttttcttttgttgcttgtgcctttgatgtcatatctacaaaaccgttgccaaatccagggtctaaaagatttaccctcctatcttttcttctaagtgttttatagttttagttttatattaggtctttgatccattttgagttaatttttgaacatggtataggtaacaggctaatgtattctttgtgcatgttggcaatctagttgtctggcaccatttgttgaagatactgttctttccctcttgtcttgacacccttgtcagaaatcgatgaccattgatatatgggtttacttcgggactttctgttctattccattgatctgcatgtctgtccttatgccagtaccatactgtttttattactgttactgtgtagtacgttttgaagtcagaaagtatgagtcctccggctttatcttataaaaaacccgacttttggttttgctgattcttcttctgttttgcttcattaatttgtgctctcatctcatcttcattattttcttccttttactatattctttgggttgatattactgctcttttcctaattcaaattattatttattagcttattaacttttatctcttaaaaatacgcattttaagtgtgtacattttcttcagtatactgcaccagcggatccacaggttttcattttttaaattaatttatctcagttttcatttttagtagttttctgtttataatttgctgttgtaattcggatacatttagttttgccattttttaaaagcttgttacacatagttttgtaagctgtgatcattttagtgtttaagttctttgcaggtctttttctcttgtctgtgtcaagagtttcttgacagtttggggggctagccctatcagatatcgatatattataaaatgaaaataattaaacattgtgatattggtacaaaggtagaaaatagacagtggaaagaatagagtacccagaaccacccattccctgcctatttgaatactttctatgtgacagaacaccattgcagatcactaaggaaagggcttcaatgacttgtgctaggttaatcggatagacacatgaaaaaaaataaattggataccttcctcacatcgtataaaaatcagttccaggttgaataaatacctctatgtaaaagccaacaactgtataaagcttttaataacataaagagcatattatccatgattttaaggctggaaagattcttaatcaagacacagaaagcatgaaaaggattgatcggttcagctacattgttttggaactcatctttgccagaaatctttataaggggagtgagacagcaagcctccaactagagaagatatttgcaacacataattgagaaaggactgttacaaattaaccgggtttggcagcatgcacctgtaatcccactttcttgggaggctgaggcaccagaatcacttgaacctgggagatgtaggttgcagtgagccgagatcgtgtcactgcactccagcctgggctacaaagtgagactctgtctaaaagaaaaaaaaagaagaaggtgtaaagaactcgaacagttgaactagaaagagacttcaaaaataggaaaactgaaaggaaagtatacagaaaagatgcccagtctccttagtatttaagagaagtgcagactaaaaccaagtgagatattagttacatttaaaagtctgtcaattccatgttggtgttacccctttggaaaattggtttttttatcacctaaaatagttgagcaggtgcttatcctatggcccagcagattaactcgtagataccctagaagttagggtaaataaccctagaaaagcataagcaaatgtgtgggggaggcatctacaagaatgttcatagcaacgttttttatcatagcctaaaattggaaacagcctaaatatccctcagtagtagattagataaactgtggtatattcatgtagtggaatatcattccataggcccaatttgtgaactacagccacacacactctcacacgcatgtatcacagttataaaatcaggtgaaagaagcaaacgcaaaaggatatgtatgccatgatttcttttatatgaagtttggtaagagccaaaaccgaaaaatatgactgggataaatacttagattgtgaagttacaaagaaaagcaaggcaatgatttccacaaactttaggataaatggtacctcttgggtgtgagaggaggagatgattatggggggaattttaagggattggtaatgggtgatggatacactggtgttcattctttttttaagtgtgtgtatatacagaatacactttgttatgtaatagtttttgtaagatgcattttttgtacatttctatgccagttatctgtaatcatgatgaagtggttgattttttttaaaggaaaataaaaataaccaaaatcgataaaaagaaaaagacctgattgattaatattatggaaacagcatcagaccagctacttttatacatgaattctatcgaggaacgtgacccactttttagagttccacttttgtatttccgtacgtctgttgcatattacccctgatcacattaatagggtctccaaattaacatgtccaaaatcagtgtttttatctttttgcttttccagtgtgtcacttgatagtctgtttgttcttggttgactgcccttagttgacttatgactgcctctgtaattaccttataatgatttcattttccttatgttctcagctgttttccacttcccttctcccccaatctcttactgctccacaggacctcatgtccttttctagggtgaaaacagccactgaacatgaattatttcagtttacctttcctaggcttgaatgcttccctgttgctttcagaataatacttatacttttaaaaaaggaaatgtattatagctatcatcactttcacactttaaagcaaataaagtttttaccacttcatactactaacattgctctctcttgtactattatacttctctaagttttcctttctaccctgatgaccgttgtgcatttcttcttccatccttgcctttcttctttctttcccctggggcgtaggggggagcttacatataggtcttccctaaggtgctgtccttagtctgcatctttcttcttactaatttgtatgtaaaatgagaatttatatgacacagtaagtatgttttctacttgggttaataatatcactacccttcctggcatgcagactgaaatttcttgagttctagcttcttcctcattgcctgtatagccagttgactagcaaatttcattgattctttccaaaacttcagaaaattttcctcattttcattgacatgaccagctttatttgccttgcttaatgtcctcagatgtggtttgccagtggtctgtgatgcaaaagtaaattcatcgtacctttttccagctttatttcctgcagtggatcctttatgaaacctgtatgcccagcaaaatggaatatttttctttgacagttgctgtttttgcctctgttctttcctctcactattcattcccttcaccatatcccccatcccttctacctcttttctccttacacaatgagtcttagaaagaaagatacggaagtgaaaattaccttttttcaggccagattcttagcctcaaagatatctgtagcatttcatttgtatcttttctgacccttgtttctgccttgctttaagatgaactttgagtgttttatttctactaactagtttctctatttcttgggatcagggagtcatctttgtgtcccagactcagaagaggaaatcatatactgttcatgtgaattaatggggaacaaatacaaagaaaaaaaccacattttctttttattagcctctattttgggggtggggggtgggaagtgggtaggggtttctaaaatcattaaattttagttaagagcgatcttaccactaatttattccaagaccatagttttatgaacaagaaaaatgtgcctccaaaatttaagtggattccactgtatcacactgctcacgtaatttgtgatttccaaaattttattagttttttttttttttttttttgagatggagtttcactcttgttgcccaggctggagtgcaatggcgtgatcttggctcactgcaacctccacctcccgggttcaaacaattctcctgcctcagcctcctgagtagctgggattacaggcgcctgccaccacgcccagctgatttttgtatttttagtatggacagggtttcaccatgttggccaggctggtctcgaactcctgacttcatgatccgcccacttcggcctcccaaagggttgggattacaggcgtgaaccgccacacctagcgtggtatttattttttagaaatggggcctcgctgtgttgcccagactggagtgcagtagctattcactggcctgaacataatgcactgcagccttgaactcttggcgtctagccatcctcacgcctcagcctcctgagtactgaaaattttaaggtcattttgccttcagtcccacatgggagcaggagtcctaggtgagctggggttgccataaccataattgaatgtgagtcccctggcagaaaggtaacctccttttctttatatgcgctcatagaaattcatttatctattcctatttctcttttctccccacctttggctttggtagctggagctggcaagaaatctttcttattttctgtaatgtgttttataaattatgtgtggtctaatgattatatggttgtaagaaaaataccataaaggaagagtgtttgtccttagttttcatctttagttatccataaaatctgaactctaccctgaaaaatttgtcgtcattgtatttttcatctttcctcgatatctacttgttagttcaatactatcttttatcaattttaatgtactgttccaaagaacatatttgttactgttttcatagggaattgagcagtaggacgtttttcttacagaattaaacttacatttttctccatccactagatggctcaagtgcaccactttggcagctcagattgatccttgcttgctttgcttgtagtttctactttgagtactgtttgctttttaaaaactggatgagcccttacctgaacctagctttacatatatgtgatggcagatttcctcgcattttctgattatttacagacttctgaaaagctggtgaagtgttcttcatatcagtagtaaaaagtgcattacagtgcttagaagattttgttttttgcttttaagttattttagactttaattcaattgccaataatctatttagatttcttcaaactaggcatgcagttaataattcatccatttcttcctgattcatagtcatttggagtcattttccagcacatggtggtacctcaggagtttttgaggcacacggggctatttgcttcagttctgtagtaatatttatttagtgtttttgtgcttggaattgtatggggcagtggagggaaataccaggatgactaaagaggatattttcatcagcagggagctcactgcgttaattcgtttccttaagtttccttttttattattttttatttttattttccctgaaagcacacattggtatcttgagtttttgaagccaaataatgagtataatgaaatggctcattagagcttatgtttgtaaccaaccctgaggagaattttgtttttgacattgaccctgttgatattgcctgaaaaaatttaaaaaaaaaaactgaattctttagaaatattttatgcttatggctttctgttttgagttaagtaaaaaggaaaaggaattaagatttgttgaatgcttatcatgtgccagtttcttacttaatttgatgctctcaataatttggaagacaagtacaaatatctctatttacagatgaagaaactaaggaatcagaagttgcctaggatcaaagaaacagtaagttagagaggcaaactctttgtgatatcaagggttgttttttatttttttgcccaagagaaaataattattttctgaaatggcagaaacatttgtaatatcaactagttggatactttcatatcctaaagacagaaaactccaaacaaaggattgattgcctctcacagttgatctttgagattataaacaaatattcttgccaagctagagcaatcagtcatactggtatctcttttacagatacctttagaatgacagcaaacactataaaattgatttttccagagaaagtgtttgcacctaataatcttatttttcaggaataataactgaattatttcatcagtttgaaaatatagtgtacgatttaaaggagaatggcaagttattgatgtaaatacacattatttacaatattataactagattacattacaaatattgtaacaacaatttgtctttataaaatccccttgatttctctttattgtttaagagtccttgcagctaagccgtgtaaaacaggaaatatggctgtttgccagtgttcttaaggaagcaggagtgaagtaaagcaaacaatacaaaaggggtttgtttaaaggatgtacttaatttctgtgtggctgtggtatcatttttctggctctgttgtctttgtcctttttcactgcaaagttgaaattgtactttcacaactattaaaacaaaaataaccagtaatgcgaactgaacccaaagatatctaagataaatatcctcccatgactgtaaatttgtatcctccatatcaccttagaaattttcgtatgcattgactagatttattgctatttttgttctttttttatgtattatcagatattgccgtcagtactattaccgcatttacacaatgttgccttgtgtggaaattctaaacctttgctaactcttggtaaccaaaataacgataaactaaagagattattatcccatcttttgagagaaatgtaaaattattcatttgtctataaagaatctttgacaaaagtattttttaaagcatattgaatcctagccattttattattattagctgtgtacctaaatgatattttagatatgagtataaggaagacaaactttaggttgtcaaagaatgagcatgtctcatgtgttacagtcatggcatgacagttggattacaattatctcttgatgaatcaacttcatctaaaccttaattgcatattaaattatttagtcatttcctgattcagtaatgagaagtcagaatatatagtaatttactgggtagcatgttacatgccatagtttgcggaatgtacttgatcagtaaagtccacagtaaatcaaagacaaatgagaaaattcttttagaattcagttttttttttcttaatttgaagtcactttaaatgctcttatgtaataagaaaagaaccctaggtatatttaaatacttaacctgctataactttttgttggaaaggaggtagattttttttatgagtatttttttcctatgggaaaaaaaataactttggtgatgcagtatgcctttatctgtgtattgttaaaaactaaactaaacaaaaaaaacccctaagaacctttaaacttaacaaagtttatttgagcaggaaaaaggttctagaagcagacagcactctaagatggttcagaatactaccacttacaactggtgagctgttctaataacagggaaaaataggaaatgtcatacagaaattacctgattggtgcaggttggtgtttgccttatttgggcataatctagcagcttttaacctgggattggctgagactcagatgtgtggttataagggtatactcctaagttaggttataacttgtttacacatcaagctagagtacagttaatagtgtatggaggcagctttgggccaaatctgattgaacagtataaaaataagttttgcaaatatttatccttaccacatgagttacatcctaatattctttattctcttctatttcactaaaaaaaattcaaatccaccaaattcatttcatggcccatcggtgtgttggagctcattagtttggaaaacactgccatatagggttgaaaaattttttttctttttttaccctgttaacaactgactagtctgaaggagctcaaatatttggaaagctttattagtgcagtttagtagctggcttttaaaaaaaaaaaattgctttctagaatcctccctgctacataatcaccaaatgttatttcaatattgttttcctaacttgaaaatttaactgaatgactagaaggtgttggaccaagaaatatctgaagtaccaagcccacaaaggaaaatttaatattgattgaggtatcatggttatttgtgcacccttaaaattaagccaattttagttaatagaagtttcagctgggtgtagtagcgcagcactttgggaggccaaggcaggaggatcacttgaggccaagagtttgagaccagcctgggcaacagaatgagaccccatctatacaattttaaaattaagcaagcttggtggtacacgcctgtagtcctagctattcaggaggctgagatgggaggattgcttaagcccaggagtttggggctgcaagtgagccatgcttgtgccgttgcattccagcctgggtggcagagtgagatcttgtttaaaaattaaaaataaataaataaataaataaataaatacatatatatgtttacatatatatataaatttcaagttaattgtttaaaggatgtcattaaccaaaactaagcatcagtctttggtaatgaaagcattctaaaagtctttcttttagatagattgaaaagtctatcttgcagacaaagataattttattaatcataagtaacattattatgaaaagtatttgtgaatattaataactcagtttcttcacttatgttgagttgctttacatgttttatctttgcataatctgtaaacttgatgtttcgtagttgacagaataagtttacagttagatatataggtaacttttagttcaatgttttaaaaattgtgtcatgagaagtataaataaaattcaacgaaagataccatttcttggccttatataatggcatatatttgaacacttggagatagtggaaaagggcatttcacataaggggacagaggcatcaaggcagaaaagcttaatatggtccaggaataaaacattcaactggatgggctttgttctaaaggcagtttttgagagaagagagaattaaattaacttatattacaatacctacttgctacaggagataatgggtggatttgaagggagtgaaattaggcagagagagtagttaagaaatcattgaaatattttagagaagaaatgagattgaagtaggacagtgtctaaggaaataaaaagtaatttatcaagacagtaaaatcaacacaatttggcagctgattagattaattcaaaaatatttgagtgtgtgctatgcaattctgggaatccaactgtgaacaaaatgcatgctctttacccttacatgtgttttagtccaatgggaagcacagacatttcaattcagggtaatacatgtgctgccatggagaaagactcagtgttgtcttgggagtgagtatactgactgaacttgaagcctcagggatgagtaggtcttgaccaggtaaagttggggttagagtgtgttacagattcctccctgtcctctccccgcatgttggcttggaggtgaaaagattgtggtacttttaaagcagttaattgtggctggatcctgggattggagagggaggaggatctggtaagagagggccagggccaaatcatccagagtcctgaagttcctggaatcccctagttcttggtccacaaccctaatgaagccttggattttatcttaggaacagaaattaactgtggtatgattttaagcaagggagattcagggtcaaaattgcatgttagaagaattattttagctaagaatgtcttagttataagtcagaaacttaagcaaaagacaaagaaagtgacccagaggattcagcatatgcagaggtaggaagtgcggctggacttcacaaagatttggaaccagacatggttcagtatcagatgcgtcctcttctgttgtatcgcatagtgtcttgtctctcatgtctgcttcattgctctgtgtatactgtcttctcttaactatacagctctaacttaacagcctctgaatttctctcccactttcaagtcctctggagagagtctgactggttccttgtcagttgtctacccttggtttaatcagctgtgctaagagggcagggtcatgtagcataaacatggtgcttcaaagccaacccctctcacagttaaggggtatggtgagttgtgggctaggcagaattcttagaaagaaccaacttcagaagatcattttggctgcagaatgaagaattcaggggaagggaactaaaggaaggggacctctttaagagaatacagtaatccaggcagtaggtaatactgccctgaatcaggggtaagtaagaagagaactgatctgtggtagattaaaggttgaatctccagaagtgtatgtagattggatattggagtataaagagtcaaggatagtgtttgtgtttctggcttgaatacctgaatggatgatgatagcaatccctgagctgaagtagcatcgcagcaaatttagtggggattgaagacgaagaatttatttttgtgcacgtgcagagtttgagatagcctcaagacatctaagtggtaatgattagtagacccttgaatatatgcatctatagcagagggaaaagctcaatagtagatacatatttgaaattctttagtgttaagtgataactagagccatgagggtagatgaaattgccatgggagagtgtaacaagacaagagggccaagacagccatgaagagaatctgagggctagcagaggggggaaaatgagcctacagggcagactgggaaggaacagaaaggtgtgagaaaaatccagagtatgcagtgtttttagaaacccaagaaaagtgcttcaggcaggagaatgtggtgaaagtgtcaggtgctgatgagcagcataggaaaaagtcaagttctgtttaggagcaagaagtttgttgatgaccttggtgaatgagcttaatgggattggtgaatatgggaaacaggattgaggactctggcaagtgaagaaatcaaaataaatataaacagtgcttgagctataaggagaaagagtgggtagagatgattatgacagcgaagtaaggtttttatgtattttttaaaatatcagggtcttgatcatatttcagtgctaggagaaagagtgataatcagttgagcaagatcaggagattcttcagggcactattacattgtaatggtgaagagtgaagcaaaagtatgtggaaactagtttagtgaatggaagaagaggtattccctgactttcattttctctaggaagaggttgggattatttacaaataaggtaaagtcgaagacttagggaacaggaggacagtttgtaatagatactgtagaaattagactagtgcaacttgggattttttttttcactagcttaattagaggtcttaaattgaaagcagcaccagtatacatcattgtattggttttgttcagcagtctgattacatgcttatgttgtgctacttcaggttggtacattgagagtaagatattgacatgatggtggtctgactaatggaacatggaatataagctgtggaaggaaagaagtaaaagtgaggactaatagaaaagtgagttgttaaaggcctagaggtcttatgtgcaaagaataagtgacagtaactcagcttgagaggcaggtcctaaaatgagggtaacactaaaggggaatggaccaatagcgtcttaggagattttcctgcatttgcctgcattgctggaagaatggtattgctgataaaagaagtaaacatggaaggaagagcaagttagttttagagggaagaaaagttagatttttactgtttcccctttgagtacctatggatcattcatactgagatgaccaagaggcagttgaaaatataagggagaagccagggctggaaacaaaattgggagattataattgaacccataaatttacaaagaatataaagtggtaaggtctacttagacgctatgtacatttaaggagtaagaaatagagaaaagatgcttacaagctttgagaatttgtgaagaaactcaaaagaggttgaaagggttgaccaagcagatcaccggatttgtgagtggctttccagagggtttagtggagcatgaaaggagattggaaaggtttgaagagtaactgactttctgagagtatgtatattgccaatgaatgatgtattattatatgtgatttttaaaatctccccaatatactgatatttttaaaataactttaatttgcttttttattaaaaaaattattagctatagtctggctttctgaaatagagtatactggtcatttaatttgttaatgcctcaggagtatcatagttatcgattattactcagagctataatatggttgggccctttcaagtgctgttaagaccatttgtttttgtactgaatgccttcagtgtgttgtgtttttcaaggccttctttcccttgtcatttgttgcattaagtcatttgacagtattattcaaggatttttttccccctcgaagcactttactgtgttatagtttataattattggaagcctctgtagatatatctgaggatatgggggttggtggggagtagtatctcctactataatcatacaagacagaatacttctgtggcctctggtcaccaaaatgtatgaagatttctctccaacagacaccaactgggtgtcttctgattcaattctattctgacattgtcttccggaaaacagcatcagatcccacaggatgaggtctcagtcccacaacactgcccccctacttcagatgccagtcacaggcataagttgtagccttgtgtctgactgaatagctataaattggggttcccatgatccgctccttgggttcgattaattttctagagtggctcacagaactcacagaaatacttacatttatccacttattataaaggatattacagagaatacagatgaacagctagatgaacagacaagatgcataacacaaggcgtggagaaggggcatggagttttcatgccttctccagctatgccacgctctgggaacctgcatgtgttaatgttatccagaagcccacaaaacagtcctttagaatttttatggaaacttgtttacttaggaatgattgattaaatcattggccattggtttatcgactcaaccttcagctcctctccccttcctagaggttggagtaggaccgaaagtttcaaccctctaattatgattacaaacagaaaggaatagtaccaacatcaaagaccaaaggtagataagtccatgaagatggggagaaaccagcgcaaaaagtctgaaaattccaaaaaccagaacacctcttctcctccaaaggatcacaactcctcaccagcaaggcaacaaaactggatggagaatgagtttgacggattgacagaagtaggcttcagaaggtgggtactaacaaactcctccaagctaaaggagcatattctaacccaatgtaaggaagctaagaacctggaaaaaaggttagacaaattgctaactagaataacccgcttagagaagaatttaaatgacctgatggaactgaaaaacacagcacgagaactttgtgaagcatacacaagtatcaatagctgaatcgatcaagtggaagaaaggatatcagagattgaagattaactcaatgaaataaagtaagaagaccagattagagagaaaaaaaaaaagagtgaaaagaaacaaataaagcctccaagaaatatggaactatgtgaaaagaccaaatctacgtttgattggtgtacctgaaagtgaccgggagaatggaaccaagttggaaaacactcttcaggatattatccaggagaagttccccaacctagcaaggcaggccagcaacattcaaattcaggaaaatacggagaacaccacaaagatattcctcgagaagagcagccccaagacacataattgccaattcatcaaggttgaaatgaaggaaaaaatcttaagggcagccagagagaaaggtcgggttacccacaaagggaagcccatcagactaacagtgaatctctttggcagaaaccctacaagccagaatagagtgggggctaatattcaacattcttaaagaaaagaattttcaatcgagaatttcatatccagccaaactaagcttaataaactaaggataaataaaatcctttacagacaagcaactgctgagagattttgtcaccaccaggcctgccttataggagctcctgaaggaagcactaaacatggaaaggaacaactggtactagccactgcaaaaacataccaaattgtaaagaccatcaatgctatgaagaaactgcatcaactaatgggcaaaataaccagctagcatcataatgacaggatcaatttcacacataacaatattaaccttaagggtaaacagactaaatgcctccattaaaagacacagactcacagactggcaaattcgttaaagagtcaagacctatcagtgtgctatattcaggagacccatttcacgtgcaaagacacacataagctcaaaataaaggggtggaggaagatttaccaagtaaattgaaagcaaaaaaaaaaaaaaaaaaaaaaaaaaagccagggttgcaatcctagtctctgataaaagagactttagatcaaaagagacaaagaagggcattacataatgggaaagagatgaatgaaacatgaagagctaactatcctaaatatatatgcacctaatacagtagcacccagattcataaagcaagttcttaaagacctagaggcagactcccacacaataatagtgagagactttaacaccccactgtcaatattagatagatcaacgagacagaaaattaacaacgatatccaggagttgaactcagctctggaccaagcagacctaatagacgcctacagaactctccaccccaaatcaacagaatatacgttctcctcagcaccacatcgcacttatactaaaattgaccacataagtggaggtaaaacactcctcagtaaatgcaagagaacagaaatcataacagtctctcagaccacagtgcagtcaaattagagctcaggattaagaaactcactcaaaaacgcacaactacatggaaactgagcaacctgctcctgaatgactactggaaaaataacgaaatgaaagcagaaataaagatgttctttgaaaccagtgagaacaaagacacaatgtaggagaatctctgggacacattttaagcatgcctagaggaaaatttatagcactaaatgcccataagagaaagcaggaaagatccaaaatcgacaccctaacatcacaattaaaagaactagagaagcaagagcaaacaaattcaaaagctagcagaagacaaaaaataactaagatcagagcagaactgaaggagatagagacatgaaaaaccctaaaaaatcaatgaattcaggagctggttttttgaaaagatcaacaaaatagaccgctagccagactaataaagaagaaaagagagaagactcaaatagatacaatagaaaatgataaaggggatatcaccactgatcccacagaaataccaactaccatcagagaatactataaacacctctatgcaaataaactagaaaatctagaagaaatggagaaattcctgaacatatacaccctcccaagactaaaccaggaaaaagttgaatccctgaatagaccaataacaagttctgaaattgaggcagtacttaatagcctgctaaccaaaaaaagcccaggaccagatggattcacagttgaattctaccagaggtacaaagaggagctggtaccattccttctgaaactactccaaacaatagaaaaagagggactcctctgtaactcattttatgaggccagaatcatcctgataccaaaacctggcagagacacaataaaaaaacaaaatttcaggccaatatccctgatgaacattgatgtgaaaatcctcaataaaataccggcaaaccaaatccagcagcacatcaaaaagcttatccaccatgatcaagtctgcttcatccctgggatgcgaggctggttcaacatatgcaaatcaataaacataatccatcattataaacagaaccaatgacaaaaaccacatgattatctgaatagatgcagaaaaggcctttgacaaaattcagcagcccctcatgctaaatactctcaataaactaggtattgatggaacatatctcaaaataataagagctatttatgacaaacccacagccaatattgtactgattgggcaaaaacgggaagcattctgtttgaaaaccggcacaagacaaggatgcactctctcaccactcctattcaacatagtattggaagttctggccagggcaatcaggcaagagaaagaaataaagggtattcagttaggaaaagtggaattcaaattgtctctgtttgcagatgacatgattgtatatttaaaaaaaccccattgtctcagcccaaatcttaagctgataagcaacatcaacaaagtctcaggatacaaaatcaatgtgcaaaaatcacaaacattcctatacatcaataacagacagacagccaaatcatgagtgaactcccattcacagttgctacaaagagagtaaaataaaatacctaggtatgcaccttacaagggatgtgaaggaactcttcaaggagaactacaaaacattgctcaaggaaataagaggggacacaaacaaatggaaaaacattccatgcccatggataggaagaatcagtatcatgaaaatggccatactgcccaaaataatttgtagattcattgatatccccatcaaagtaccattgactttcttcacagaattagaagaaactactttaaatttcatatggaaccaaaatagagcccacatagccaagacaatcctaagcaaaaagaacaaaattggaggcatcatgctacctgacttcaaactatactacaaggctacagtaactaaaacagtatggtactgataccaaaacagatatatagaccaatggaacagaacagcagcctcagaaataacaccacacgtctacaaccatatgatctttgacaaacctacaaaaacaagcagtggggaaaggattccctgtttaatagatggtgttgggaaaactggctagccatatgcagaaagctgaaactggattccttccttacaccttatacaaaaattaactcaagatggattaaagacttaaatgtaagacctaaaaccataaaaatcctagaggaaaacctaggcagtaccattcaggacataggcatgggcaaagatttcatgactaaatcaccaaaagcaattgcaacaaaagccaaaattgataaatggtatctgattaaagagtttctgcacagcaaaagaaactatcatcagagtgaacaagcagcctacagaatgggagaaaatttttgcaatctatccatctgacaaagcgctaatatccagaatctacaaagaacttaaacaaatttacaagaaaaaagcaaccccatcaaaaagcaggcgaagcatatgaagagacacttctcaaaagaagacatttatgcagccaacaaacatatgaaaaaatgctcatcatcactggtcattagagaaatgcaaatcagaaaccacaatgagataccatctcactccagttagaatggcaatcattaaaaaatcaggaaacagatgctggagaaataggaacacttttgcactgttggtgggagtgtaaattagttcaaccattgtggaagacagtgtggcaattcctcaaggatctagagctagaaatactatttgacccagcaatcccattactggttacatacccaaaggattataaatcattctactataaagacacatgcacatgtatgtttattgtgtcactgtccacaatagcaatgactgggaaccaacccaaatgcccaacagtgatagactggataaagagaatgtggcacatatacatcatggaatactccacagccataaaaaggatgagttcatgtcctttgcagggacatgggtgaagctggaaaccatgattctcagcaaactaacaaaagaacagaaaaccaaacaccgcatgttgccacttctaagtgggagttgaacaatgggaacacatggacacagggaggggaacatcacacaccagggcctgtcaggggtttgggggagggatagcattaggagaaatacctaatgtagatgacgtgttgatgggtgcagcaaaccaccatggcacatgtatacctatgtaacagacctgcacattctgcacatgtaccccagaacttaaagtataatttaaaaaaaaaatacatttcttggacccgtggtagaaagactgatcactatatccagatatccactccctcactgctcttggtcaattgaacccttcaacttttagttgggtacatggctactttgcggtaagatgtgactgtggtgtgtgagccaagctaatttgcgcagaaggaattgtgtagcttgcaagtcatatcctcagaagagaagatgctcacccttgtcttctttccacccctcccctggattggagaagagatacgttattgcccaccacatgggcagtaactccctaggaggtgacagagcaacaggataaaaggaacctgggtccttggataacttcatgaaatagagttgccttttctctgtggctctcccacttaactctggactattatatgagaaataaataaactaaattgtttgaaaaataaataaaagatgaatagggagggagtgactacaaaagttgcttatcaggaattctaattggtttacagaaataacattggttaatgattttctatacattgttaaattgtaaggtgtgtggcattttatgtcttcttgaggtcagttagtctagagcttgaatagcaagtggcttcaaggggtaattatttacctcaagggagaatgaggcatgactgctgttagattttaaatacctttttgggactgataacttaggcccatattccttagataaaaagcttttcttcccccctccctccgcaacctttactccttgtggtcaaaaatctttcttctcgaaagcattgttaatcaaaatctaagtgtcatgatgtcccttgtcaccaggaagtctcactcccaggtagtgctgtcccatgttgatgagggaggaggaaatgtctcagtgaggaattttaagagttcccaaaagctgacttaggatggcatcacagagtggcagaaatgagacctcagttaagtcattgatttatgtaagtcattgcttgttgaatcatccctagtctttggaatcccatgattttagtttcctccaaagtaaaacaatgagagatacataacagttaagaatttgtattgcagaaatataatgcacacattgactacaatcaaaaagtgaatttacatgtcagaatgaaaaaagaacctattcattagggagccaacaacaaaatcttgaaaaaaattaaaacctggttcttctttacagactggttgtagccaggaaataattcaggatttagtccaagtggtagacaaataagaaaactcaaaaacaatggtcaggctagaatctaataacaggtgtgttatagttttcttatgaaacgtgatttttctgtctctagtctcccttttatttttttaaaatacataattatatatatataaaatgtatacatttatacttagaaattttttctttagtaacaatctcactctgtcactcaggctgttgtgcagtggcatgattatagctcattgcagccttgaattcctgggctcaagtgatcctccacctcagccgtgagtagctgggcttacaggcacaagccactacacccatccagtgcctcttttctaccgaagagaaatagaccaatttatttgcaaaaaaagttttagagttattatacttggcctgatttatttgcataaagtgcagcaagagtagtgattggtcatatagactagttggctttgcctgaaactttttcgttagaaattttggattagacttttggaaacttctcaagtctaagaagtcaagccagggattaaccatcagcctgtgcctgtaatactttcacagtttggtgaattcttctcttcttgaagtcccaaaatattttgatattcctgaaactctcagaaagtgacattctttacataccgcaagtcaggattcttgtaagggaacagtatagacaacttattaggtcaagtctttccaaggggctttttattggctctataaagtcaaccttaattcctcaaagtagtttgatcatatgctgttccagttaaaccttggtacaataaccagtgtctccaatgcgtcctcttacaaaacaaagaaaatattgcacttatacaaacaactatattgtcataaatgtcataaaataagaatattcacaaatagttcccaaattctggagaaaatcaggtaaagaggaaggtaaatgtttcacttttccccacaaaagtatactttacctaattgctatgagctataaatggctcaaaaaaaatgtggactctggcaaaacaaatatgagaagaatcaacaatgtttcaaacaaaaagtgattaaaaaatcatttcagtcctctatcagttcagtcccatgtaattaattcctgttctgtttcatgttggcttagcaatcttcattaacacatcagttttttattcgaattttggaaatttttacctagtccaatggtatcatctccatagttatctgaaacctgtattcaagaatacttgaatatggtacaaactcgtattcaaagtcctttccacgaatttctttgaagacacacattttaggatttggagggaaacaaagctcttaaaaaaaaaaaaaaaaaaaaacagactagatgcagtggctcacgcctgtaatcccagcactttgggaggctgaggtgagcggatcatgaggtcagtagttcgagaccagcctgaccaacatgatgaaacaccgtctttaataaaaatacaaaaattagccgggcatggtggtgcgcacctgtaatcccagctacccgggaggctgaggcaggagaatcacttgaacctgggaggcggatgttgcagtgagctgagatcatgccattgtactccaccctgggcaacagagcgagactccgtctcaaaaaaaagacatgagaataaaacagtttactgcatataccaaggcatatcagatgtttaggaattgcatacaattttggaacacatatcaatacaactgtaactcaaagaaagctgaacactatttcttgtctgacagtgctttccatgtttgaaatttgatttgggggaactgtatcagatatcaaaggtttaaaacactagatatggccgggcgtggtggctgacacctgtaatcccagcactttgggaggctgaggcaggcagatcacctgaggtcaggggttcgagaccagcctagctaacatggtgaaaccccatatctactaaaagtacaaaaaaattagccgggcgtggtggcatgcacctgaatgtgagctacttgggaggctgaggcaagagaatcacttgaacccaggaggaggaggttgcagtgagccaagatcacgccagtgcgctccagcatgggcgacagagcagggctcccatctaaaaaaaataaataaataaatgtaaattaaacagatatcaagataagaaaggtttgaaatgctcagtgttaaaataggatcacaggtcattgtaaaacagtcatttaaacaaagtgataagtcagtgatttttaaaaagtcaaaacctgtgctctttgattagcaggagactccatcaaagagtaagtttgaggagactgtatcaaagagtaagactccatcaaagactcacttttccaaataagacctaataaaggcagcatgagctcaagaaaatctctctctccctccttttcttttgtagtttactcaaaagtaaacaaaaccttttactatctcctgttaacactacctgaaaatcttgttcaaaagagaaaacgaaatcctacctttgtatcagtatattattaatattaaacctaattttaataaaatcttacaataaacagatccatctgatcccagtcagctttgaccagataagattttcatgaatcttttataaactcttacaattttattttttctttctccaactttttagttttagctatatcatgtaaattttgaaacaatctttaacctctaaactaggcaaaattacttttcctttagcaaaactcacaccctcctctcttttttataactttcttcaccaaaaacacatcctactttcattgtatactttgcatacaagagtgtttcccatgtatctagtacttttaattacatatattaactacgattttaactcttagtagttctaatttcaagtgaaaaacctagaaagtaagtagtagttaactggtttatgtctgtatttgtagacaaatcatttcatggtttcgtagaaagatatttctataaaatataattgatgcctacttttttgtttattaacagatctaaagattattaacagatctaaatatatttagcttttttataccatgtaaaaacaaaataccaaattatgtaaactaaactaaaacatatctaataattaatgtttttgtatcttaatgtatgtagaaatgactcaaacattttatgattatctattactttattaaacctaacatgacttcaaaactttaaactactgaaaagaattttgaaactgcaacacagatacccttcctaatgtcttcctcagtcatactgagtcgcaactacccacgtggcacccaagtatgattatgaaggggcagggcctatctgagtcctgattttacacacccataatggagcccaggacagaggacagaactgtgaagataatgtctgactcttcccaccatagccaggagacaacagccaggccagagggagtaccacatatgtctgcagtcctcacttgttagagcccagaatctaatgagtctaatacataagctcacagacaagtcaaataagcatcaaacatatcacagaagcaatagttttatgagcttcagacatctagtagagaaagcctaaacctttctgaccagcagacccaggcaaaaatgtctgattgtgtttaaaactgacaagtctgaagacattctaattttattttaccaacaattaaaaagctaattttatttctcaaagattactaaaatcacattaacttgaaaaatatttgggattattaagctatgagcattaatttgtcagtttggtaccatgtaaacaatatacaaacagatctgtacacatatatacataaaaatacaaacataagtgaagatttcatagctttgatataaaaattctagccatgagacaagtaaaactcgctattttaaaaggacattggattcaaagttcataaatagaacaagttcaagtttattgtatatgcctgaagcccttaccaagttttaaataacaagtagcaaatttatatttcaagcacagagaatttaagctttccaaaaggccaattcaattttacgttatctttggcaaaaatcatgttaacagaatccaaaagagtaaaacataaaggcctttcttctacaaaaaaaaaatattttatatattttttatatattatatatctttatatatacttatatataatatatattatatatatgactcaggctagctatatatatacagctgtgtgtatatatacatatatacacattcaggctagctatgtgtatatatatagctatgtgtatatatatatatgtatatatatatagctatgtgtatatatatatgtatatatatatagatagcctgaatgtcagcttttaattaagctaatttctggctatagacctctttcaaagaaaaaaaaatattttcaagtttcttaacagattttagctggaataaacagccaatattcctggcttttgactttttttttctttttaaccaagggtacctttccaagtgactcaccaaaaccaataagccttaagaaaaatttttatgacttgaccaaggatgcacaagccatctccaaagaggtgcaaagcaagccctcacaagatccagaaccaccccaaagacagtttaaataatgaaagtcttggtagccacaaataaggtgcaaatccacatttttgcttgactgtactctctagggtttcagctgatggcagacagaagaagacaggaaatcaaaagctgttcatggaagggaaaaggatcagtaacaaatgggtaccctaaagggtcaagagtcatattaatattgtaataattgaaaatattcaaattcttgtaaatgtttctctcctaagctaaagatattaaccaaagaaaggaattttttgttgttctaaagaattttaactctgttttagatcttatctcagctggaatgctgcttggctaattccctgcatgttaacatttcaaacacatgataagatttatctctccaaggtactgtgaactccagctgggcattaaaggatatcatcagtgccattcattagtcctggttttgaaaaaaaaaagttgttagatctgtatttttataatctcagtagtttcattctcattttttagttgcactgtttgctccttttgttccaaatttaaatacatttctctcttttagactattaattttccagttacccattttattgccctaagtagttgttaggttcttctaaagggatgacacttaacatgaaatatgtagaaaaaatatataactcaaaagtccagagctgaaatccaaggaagaaggatgtaggtaaaagccagttaagacaagatggcctggcccagtgccgtggctcatgcctgcaatcccagcactttgggaggccaaggcaggtggatcacttgaggtcagtgagactagcctggccaacatgatgagatcccgtctctactaaaaatacaaaaattagccaggtgtggtagcgggcacctgtaatcccagctgcgtgggagggtgaggcagaagaatcgcttgagccggagagtcagaggttgcagtgagccgagatcacgctagtgcactccagcctgggcgacagagcgagacagtctcaaaaaataaaaagacaagatggcctgaaaagcaccttcaccaaagacttatgtaaatgtaagccaatggtaagtttctagtgactcagcactccctctccaggtacagtgaggtaaagacccttacaaatgaagatttcttttgtagatgtaaatttcttttataaatagccaactaaatgacagaaagctgtattttggacactgattttgttgaatgggtggtctttttatgttcacttttgttagcttaaaaattactgagttcagctgggaaagcccattaagaaaaagggcaaaaaaagcataatatatgtgtggactcagcatggatagctctgataaagaagcaagcctgaagggttacccctaggttaaagacctcttctaaaaaagaagggtttgaaagaacagcccaaataaaatgtacaccttcaaccaaagagtggtataggtccagattattagtaggacttttgtccaataatttatcttggaattggaagaacatgagagtttcatagttggccaggtgccaagtccaggaatggctaagggtggcttactgtgaatcctgctcacagtgccagaaatgtcaacctaaagggaagaaaatgaggcatagttaatacagataatgtatttgggccaaggttgaggactgcagcctaggacacacttccaagtggtcttggggagtgctccagagaacagaagagaggctcatatttttagagaaaaaaaggatgaatcaggaaagggattgattgcaaaaaggtattcatcaggaattcttgttggtttacagaaataacattggttatttattgtctatacattgttgaactatagtgtatatggcattttatgactacttggggtcagttagtctagagcttccatagcatgtggcttcaagaggtaattatttagctcaaggggtagtgagacatgactactgtacatttaaaatgcctctctgggcctgataatttaaaggggctcgaattccatagagcaaaagttttttttgttttgtttttcataaccctcatgtttagttaacattgctgacattcatgaatcaaaaaacccaaaccacaaaaaaacaagctatttttattatcacttctgctacctagcatgtcaggcagtcatgttatgtttaaattgccttcaaatggtttcaggaacttttcccatatgtatgttattgaaccactccagaaaatcgtaaatcccttttgtagaggaagagatgattagacgagaaatacttagtgtctggcacagatttatacagaaaaaaatttttgtttttagtttctggtctttgttgttactttgttggtagtaaaaaatgagttttttttttaattagccaggctttaggccttatccagtgaaggacaacttgaagatgagatagagcataaaattcaagctatttctagagattgatacaggttcattagctggacaattaaactttttacttgtcttgcaagtcttcaacttagatttgtcatatttggttatcataatcaaatggaaatagtagtttttgccccatcttgctgagcttttagattttgagatcatttgtaacatactctgaaattcagtgaattttatttttttctgctgggggcaggcacatttaattacagaaagccatttgccatggaatctttttttctaaaaactacctagcgttaaaaaaaaatctgatcataattacgttgctagcaagataaactagcaataagtatatgtggtatcaactaatatgaaaaaaattatctgtaaaatgcatctgggacacttctcatttgctattcttaatttgcagttttaggaattgtctcgtggtggttgaatgtgatcagcattttcttttatgagcctgggagtcttattagtgaaagatttggcaaaagttagaagaaaatgtcaggcattcgggtcttctcaaggaatgagatttttcagtatgtaaccaatttttttggataggcaaagatttaacccaagtagtacactgtacaaaggtgcctttaaaactcagcattctttcttgtgtaaaacctcataaaaattttatggaaatttatgggtatcaatttttcttagatttaaaattaaaatagcttttgagtaccttgggaaatagtatattcttacaaagtagatgacctatttattcagttgaatgtccttgtgaaaattgacgttgctttactgacactaataatctacatgcagttgagcaagcccagaagccaactttggaatattttgaaatgtttaccattttgagtacaaagtaattttagaatcttggataccagctcactgaagtgttatggtaatatcatacccatatcatttccgttacttatatttgttattgtttaaacagtagccaaaaatggccaggcacggtggctcacatctgtaatcccattactttcggaggccaaggcaggaggattgcttgagaccaaggagttcaaggccagtgggccatatagcaagacctcatctccattgaaatatatatattttaaagtagccagaaacatgtacttactttactgccaaggatatggctgtaaagtcttgagatctttaataaataacttgaatgtctgaatgacttggaaacaagttctgaattagcttactgatttcatgtgtctggcgctatttagctaaatccaccctcctcaaaatgtagaaattgttaagggacagtttcttgttgagacagtttctgtcttagcatcattttgtggttagaatgtagtaaacctactcaaataagcccaattaagaattaaatctattttatgaataggtctttaaaaacccaattgcagaactacaaaccaggcctctttctcccctttgtgggtgggggtcagattctcctagaagagagggcaaactaggtatgattagtatacctgctagaaagaacagttaagtggccagggcaaacaaagttgtctcttggctgtaataatttttttctggactcatgggcaactaaagaaacatgctaattatactgatgcttaaaggatttgccctctattacggagggtctgtgggagtagaactgtaacctcttctttataagcgagtagtacagaaaagggagaaggagaaagaagaatcctaaatatggaggggaatcatctggaaagagctcagattaatttttataaaattgtgtaagattttataagattatatatttttataagattataacctcttcctggaagcctcatttttaaactgcttatggtagtgacattttattatacatgaatttaacttttgaatatccagctgtacctgtcttgacagataaaatgacagtttcagtagtacagacaattctgcccatcctaggaagcttatgcccttgcagatgagaatctgctgttctctcttagtttgtacatgtctcccgtcagatgagcatgtcatatgtagtgtaaatactttaaataaaatcatggccctgaatgttattgtactaaatgttacattatgatttaaggagattttcggggtaattttgactatgtcagttttgtggattatttggaagagtggaattttgtgcactctgggctcgagtctaaagttagtgtgtaaagccaaagtcagaatcacccttgaaagttcctcaactcataaaagccaatatgaaatcttttgtgtacatatacactcttgagcattaattcttacacacatttaaattggagagtgactaagctagactgaaaggcaaaaggaaagtatacaggtgttgtatattcattcagctttaaacatggtataggtagggaattctaaaatgttccttcttgcctgccagctttacttcattttgttttaataataaactctagaatcttaattcttactaatcgtgtatttgttgtgggaatttcaggagctcgttagcctcacctttctgtgagatagcttctgaaatcagttggctaaattctaaggttagccattaagtaggtttatgataaaactttgttttattgtagttttcattatttcccttttcttttgctttagtattttagtaacatcacttttaagatgttactcatctcaaaggaggcaaaggaagagatttggtatcaagtccttcattcaactaaagtagaaagagagggaagtagtatgcccctctaggctggtggttgctgtgggaatcaatgtaaaaacccctttaagaggataaaaatgggacagttaactggaaacttaccaatgagacattctctttctagagctttttcttttctagcatgttccccccagttttaagaagataacccacactcttatctgtttcttcagtatataatctcaattgtgagattacaaaataatttctctttaataatatgcccaggtgagaatgggagtaaaattctggttttctttatttggtgctagtgtcagcagtgactgaaacataggctgtctcagtctgggccctgtagtacaatgctcagacctaggctggcttactcttcatatggctctactaccttagtatagaggaggaaccgtaaagtccaagattgggcacttcattcacaccacttagtaggcagtctcctaaggaaagaagaaaagtgtatgtccggagagacataaatggctagtcagccatagttttttggggggaaaggaggaaggggagagtaccctaggatgcaccctatatttcacatattgtttctactacttttggttaaattgtagacaagtctgttgttggaataggccttcttagtgcaggacatagtggtatttctgtattaattacttaaaatatagttgaaaaatgaactttgagaatacctagaactgaaatagatgcatttgtatggtggcagctgagatctgatctaaaggccagttgagggctaataaggagtgaggttaaatttaagcttattactcttttaggaaaatgatgtgagttagggttgaggccaagaaattcttactatattctgaaagtagtgagacttcattcgttagagctaacctcatagtgctcactatgagcactcaccttaaaggttattatctgcctcttgaagaagcacttactcagcggatcctgtaacatgtggttctgccactttgtccataactgattagaccagggcaagcctctggctcaaggctaatggcttatgaagtggcctggtatgaaaactgcataaacagcaataacaagattaatcatctttctctttctctttctctcctgtaaactactccttgagaggagaaagacaggcaattcataatgggaatttaaaataacagtttgttcacttgttcattggttcattcaacacttttttgaatgtctgctgttagccaggtactactcaaggcactggtgatttattcatgaacagaacaaaattcatgctttcatggaacttgggtttgagtgggacagataataaccatgtactagaatgttagcaatggtaagtgatatgaagaaaaatgaagtgggttgaggggagagagtgtgcttaaaggggaatttagataggctagtcaagtaaggcatctctgaggagctgtattaagagatttattatacggaattagttcatgtgggtatggaggttcataggtcccaagatctgcagcttgcaagctgaagaccctggatagctgatggtgtagcaccagtttgagtccaaaggcctgagaaccagaacaccgaatgtagtttcagtccaaaggccagtaggctcaagatctaggaagagctgatgtttcagtttgagtctaaaggcaggaaaacaccaatgtccaagctcaaggcaggcaggaagagttcccacttattcatactttttgttttattcagggcttctactgattgaatgaggcccacccacatcacagagtgcagtcagctttactcagtctgtttatttatataaatgttaaaattatccaaaacaccttcacagaaacacccagaataatgtttaaccaaatatatgggcaccctgtgtcctaggcaagttgatgcataaaattaactgtcatagataggtctattggtagccaaagaaccaggttaagtaaaaatagataggctctaagttacctcagtgacttattgccaggattgcctgatgattacagctgtcttaaattctgaaccttgttgtattacctgaattattttccagggtctctaaagtctggctatatggttgcattgaacttattcttttctccttaagtatgttttatgtaactagtttaacctgtgtgtttctacattcaggcttgacagcctagccattttatggacggggcggagcgggggcggtcagcctgatatataaagatatcacagaaataaaccttgagtcataaaaacctaatatagccgcccccctttactaatgaagagaaacactggtaaagacacatgaaacaatttattaagtaatttgttactttaaaaagatttacattttggttaacttttttagcagttgtttgttctaactctgtgaagagcctgttttggaaatctgaaaatgtaggagatgcagctattgtcctcagaaagaccatagtctgataataaaatctgcataagtaaatatacagcaaagtagtttagatgagaatttaggttagagctggtttgaatggaaaaggcttatgaagatcacatttaagctagtcttagacaaaatttggatagatacaaaagagtgttaaaaatatttcatgaaagggaaagggaaatgaacaaatgagatacatcagagtttgggggatggtagtttagctgtgttgacatggttgtagtcttcttgctgtaggagtagtaacaggtgagatttgaaagttaaagccgaacctcagtatttccatacttttggttgcacattaattcttttgagcctcagattattccatctgttaactgggataataatgccaatatttgttcatatgttttaatcagttacatctaaattctataacaagagttcctttgtttttaatctcagaagccttctaagtagggaaatgagtcatcagaaaccatggcatttccttctcacacatactcttgctgttcaagcttcatgatggagagatcagtatatcaaatgcatcctctataaatctcaccagtatccttaatgcccttatcttggtgaatgtggaaaaactcaaagtgctttttttctgttctctcaacacaacaatcacagaagacttatgtgatcaaatgttgcatagggggagttccccacacaccaagcaagcgatcagttttgcagcagatgcctgctaagtgtcttccaattccattctgacactagttacctggagatagcatgagatctcacaagtcgagggcccagtcccctcccaccgccaccagataccagtctcaggtctggaacttctgactggctccaagttgaggttcccatgcccctctctttgggttagattaatttgctagagcagctttacaaaactgagggaaacacctttaccagtttattataaaggatattacaaaggatgcagataatgagatgcatagggtaaggtatgggggaaggaacacagagcttccagaccttcccagggcacgccatcttccagaatcctccacgtgttcagctatccgaaagttccctgaaccctgtcctcttgagcctttcatggagatttattggataggcatgattgacaaccatgtggaaatgggattggacaaaaagggtataatctaatactaacaggccgagtggagaaacccacaagcctgtctgtccaaattcttcttagcctttctgtgcagcattcctttctcaagggtgtgggacaggaccacttctgaaatgagagtcttatgacctgcagtcagaaaggcaggggaagattagactcttgccttgagctggtgaaaggaggatgggaaaatcagagagagagattctgttttctgaggcctggagcaccccaacatcataaccaaagtctgtaacaaggtatatgggagttaagagccgggagctgtggatgaaaacctatatatatgttccctatatatacaatacatagaattatatatatgttattatctaatatgtaatagatatataatatcacacttggaaattgcactttttctcagtcttttgatgatacttttttatggtagtgacacactaatatctccatccgtatggccacacatgtgctctggatcccattcttttcttcctttttggaaataatatgctatctgagaaacctattttctttctcattcccccattctcactcttcctctctttattggatcctttttgttagcatataaacatgttcaggttgtctctatgttatatgtgttatactatgctatatcatatatactatataatctaattatcctcccttgaccatttactcctctttatctatttcatctttggtcttctttgttaaacttctctaaagaagtagctatatccagtttccttataaatttcccagttacatggcagctcattttaatctagcttctgctgcgttcgctctactcaaatggcttatttgacacctctgttaaaatcaatgctattagccattttgttctttaaaacactctcttcctttggcttcttcagtatgttcttgttttctgtctaggtctctggctgcatcttctgtggcttccttgtcagctcatctttctccagttgctcattaaatgtggttgttataaagctgaatcttaggtatctttttacttaacgactactcttgaataacttgtctctcattgctccagttacagtgacaactcctacatttatctttcaccgagactactcatctgggatccagttctatatctagataccaaattgatatttccatttgaatgtcttaaagttatctcagactcaacaggtttaagacttacaacttctcttcctccatattctctttatcttcaagattatatttttggactcattgtagtccaaaatttgaaggactcaaattctctaccccttacattgtaaccatagtcaattaatcattctaagattcagtttcataatctgtaagatggaaaaaatgtagtacctttcctaacataaggaaacatcagacaaaatgtgaatatgggatgtaataccacggactagatttaccctctagctgtaaacaaatagaaaaccctcctagggttgttttcagtattaaaatagtatttacaaagcccttgaaacaggaccccatgtaaagtaagatttttttaaagtgtctgctttattgttgaatatggatatgaagttgtcagatgaagcttgcaatgatgcttaaatgcttatattataaaaagcagttctcaaatcagtacttttaagattgcattttaagaaactaaaagaaagaatagctccaaaacaagcaatgagaagaaaataaagataaaataggaagcattgaaatataaaagtgtaaaacattagagaaaagtaagagaaattaaaatcttgtttttttgaaaagatcactaatagtgataaaattctagccagactgattagaaaaaagaagacacaaatgagattaataggaatgaaagaggagagatgagtatagattctatagacattaaattggacaacttagattattaaatgagcaatttccttgaaaaacacaaactaacaaagcctgtttaagaagaaatagttgccaaacagccctatgtttataagagaatgtagatttataattaaaacattccctcaaaaagaaaacaactcatcatagaagacttcactgagatagtctatgaaacatttaaagatgaatatcatttccatacactctttctgaaaataagagggaacactgttgcaactcattttatgtcagcattactctaatatgaaagaaaactacagtccagtattccttataaaatagatggaaaaatcttcaatgaaattttagctagctgaatcaatacataaaaaggataatattttatgaccaagcgggatttattccatgaatgcaagggtggtttaacatttgaaaatcaatcagtgtaattagccatatgaaccaactaagaaagaaaactatatgattatttcagtatattcagaaaagtcatttaacagaattagtaccattaatgataaaaactctcaaactaggatttaaagggaactttctcaacctgtctgtcaaaggacaactagtaaaatcctataatatatatatcatgcttagtgatgaaagactgaatgctttctctcttaagatcatgaacaggcaccacttctattcggcattgtatggaaattatagttagggcagtggagcaagaaaaagaattcaaaggcattcaaattggaaatgaaaaaataaattgcttttgtatacagaaaatcccaatacacaaaaaaagcctactaagatgaataagtgagtctattacaaaatcattatacagaaattcattgcatttctacatactagtaatgggtaattggaaatttaaatacaaacaaattaaaataaaaatattagcattcaaaatcttaatgcttatggagaagttaaacaaaattatgtaaagcctgtatgttagaaattattatacaggcctatggaaacaagtgtcatgtctgtgaatcaaaaaactcaaaattactataataccatttctccccaaattgatgtataccataaatgcaattctagtcaatatctttgcaggccttttttgtaaaaattgacaagcttagttctgatatttatataaaaatacaaaggacctagaatagctgacaattttaaaaaagaacaaagtttaatgacttaaattgcctgattttcacacttactagaaagctacattactcaagacagtgtggtattggccgaaggataaacatattattaatggtatagaaaatagttcagaaataggcccagacacatatatttatctgattttcagcaaaactgctaaggcaattcagtggaggaaactggtaatctttttaacaaatgatttttggacaattggacatctgaatgcaaaacaatgaatcttaacctttaagtgggcaatgatttcttagacatacagaaccaaactgtgaaagaaaaaataaaccagctgtacatcatccaaattaaaaacttttgatcttcaaaagtcactgttaacacaattcctatcaaaatcttagcattattttttgtagacatggacaaatttattctaaaatgtatatagaattatgaagtaactggaaacaattttgagtaagaagaatagagctgaaaaaaatcacaccactagattctaactaagacgtaacatacagcattatactcaggacactgtggtattgatcaaaagatagatcagtgaaacagaattaaaagtccagaagtagacccgtacaagtagagccaactgaagtttgacaaagatgcaaaagtaattcagtggggagaaatgatgctttttgcaacaaatggtattagtataattagataataaccaaagaaataaactttgacttaaaactcttatacaacagttatcatagatctaaatgtaaagtgtgaactataaaacttttataaggaaacaaaagagaagatctttttgatctagggccaggtgaacatttcttgtaccaaatccataaaggagaaaaaaataatgacttgggcttcatcaaaattaaaaacttttactctgtgaaagacactgttaagagcataaaaaggcaagccacagactggaagaaaatacttggaaatcgcatgtctgataaatgtgtatcccgaatatattttaaaagtctctaaactcaacagtaggaaataagacaatgcaattagaaaatgagtaaaacactgaacagacacttcaccaaagagtatatagatgacaaagaagcacatgaaaagatgctcaacatgattagctactaggaaaatgcaaatttaaagccatgatgagatatgacacacgtactagaatggctaaaattaaaagtactggcaaaacgaagagttggtaagaatgtagaggaactagatctttcacacattgctggtggaagtgcaaaatgatacagcactctggaaaacagtttgccagtttcttataaaattaaacatggagttaccatatcttactcctggatatttaccctaaagaattgaaaacttatattcacacaaaaacatgtacacaaagccttagaacagctttgtcatagccagcaaggggtgaatagatagcaaattgtcatacattcatacaatgaataatattcagtaagaaaaagagcaagctattgatataccaacaccttggagaatcttaagggcattatactgagtgaaatagctattcagttcttttccctattataaaaatacggctgtcttcttatgagttttaagcctatatacattccagatacacatcctttgtcagatgttttacaactatttttttcccagtctgtggcttgcctttccattttcttaacagtgtctttttattttgaaataattttaggctcacatagaagttacaaaatattacagtttctgggtacctttcacccagcaacagcatttgacaaaccatagtacaactatcaaaatgaggaaactaacactggtataaaactattaaccaaactagaaattttcctcagatttcaaaagatttaaaagattacttatggtaattttaatttgtataacctttttttttttttgagacagtctcactctgttgcccaggatagcatgcagtagtgctatcatagctcactgcagcctctgactcctgggctgaagtgatccttctgcctcagcctcccaaatagctaggactatagatgtgcactactactgtggcagattttttttttctttcattttttatagagatggggtctctctatgttgcctaggctggtctcgaactcctgggctcaaggagtccttctgtcttggccttccaaagtgccaggattatagatatgagccactactactaacctataactttttaaatgaaaaaaatgatagtgacaaagaacagattagtagttgccgcaggtagacttgggaggagtatgtgattataaagggatggcatgaagatgtttctttgaggtgatggaatagttcagtattctttttttctttttttgagacagagtctcattctgtcacccaggctggagtgcagtggtacgatcttggctcactgcaaccttcgtctccagggttcaagcgattctcctgcctcagcctcccaagtagctgggactacaggcatatgccaccacgcccagctaatttttgtgtttttagtacagacagggtttcaccgtgttagccaggctggtattgaactcctgacctcaagtgatctgccctcctcagcctcccaaagtgctaggattacaggagtgagccactgtaccaggccggaatagttcagtattctgattgtagtggaggttatactaatataaagtatgtgataaatttgtatagaactatacacacacagggcatgtaaaaactggtaaaatctgaggaaagtttctagtttgattaatagttttataccagtgttagtttcctcattttgatagttgtactatggtttgtcagatgttgttgctgggtgaaaggtacccagaaactgtaatatttttgtaacttctatgtgagtctgaaattatttcaaaataaaaagacattgttaagaaaatggaaaggcaagccacagactgggaaaaaatagttgcaaaacatctgacaaaggatgtgtatctagaatgtatagtcttaaaactcataagaagacagccgtatttttacaatagggaaaagaactgaatagctatttcaccaaaaataattacataaacggcatataagcccatgaaaaggtgctcaccttcattagttattaggaaatgtaaatgtaaaccaccatgaaataccactgtacacccactagtatagataaaattaaatggcaatccgaagaatgtggaacaactggacctctcacatgttgctggtgcaaatgaaaaatgatatggcctctttgcaagacagtttgacaatttcttaaaaatgtagggctcagcaattccactcctagataattaaacgaagatgaatgaagaaaaagtgaaattcataccagcatcatttataataaccctaaaactgtaaacagttgaaatgtccaagtggtacgtccacacaatgaaatttattccctagtaaaaggactccagcatggatgaatctcaaaatcattagaacaaatgaaagacgccaaacaaaaattacatgctgtgtgatttcatttatatgcagatctagaaaaggcacaataaccaattcagtggttgctaggagttggggggcaaggggtagagagtggagattgaccatatagggaatgtattgaagtaatgggaatgttttatatcatgattttcctgatgatggttacgtaattgtatacattaatcgaaactcatcaaattgtacagttggtacaatttttaggtcctttgcattcgatttgtttttttctgcctagaaagctctctcctctccctgtctggttgactcatattcagtgttcagatcttgcttaaacgtcatgttgtcaggagtatctgttcctgagcccagactggcataggcttctttgacatcctgccgctttccttcattgtccttaccacagctgtagtttcagtcaggcaggtagccatcagcttaaggtctctttttctgtcctagctgcaacactgtgaggagccagatgctgattaccatcttgttaacagtacgtagcatggtgcttaaatcaggtttgaatattgcatgactgagtataagtgagtagagagttgtgtgtcttctgttcttgtaagtggcagctgtggcttctgccaagggtactactagctggggctgcctgcttaaccttggagcctgtctgcctgcctctgccctgctcctggggagttgtgactatccatgctcatctgcctgccatagcctttgttcagacttcttgtcaccgtgaatcccactcctgtggccgggccaccctgttctgagaacagaaaggagcttttccttgctgttattcttttagcagaaaaggaaacctgccctactgcatgcatgttcctggatctactcaagctttttctttttttccagcaagtggagaaactctgaaacacagtgttttgttacctgctttggtaacaatatatcacctcctgtgaagcaccagagtacccctttgtctcctgattatcttaatctttttgagagagacatatgactcctccaagtaaggttaggaatcctaatctgcaggtagtctgaatgcttgggtggaaggtttaaccttcccaaaggtgaaaacaccatcaactttgtgctcagcctctgctcatatttgcagattatcagagatcattattactgtctccatgtcccccgctgacccagtttccaggataaatgtgtagaataattaataaagggcttgacagccaacactcctcttccactcttcccacttctcttcttccttatttcactactgtagtaggtaagagggaattcaggttatggtaggaaaatgattaggatgaacaatccctgtatgtgagcattgtgtgaacatagctcagtgtttaaatcattaccaaagctcctttctttattatgggctgtccacttaagaagaatttatgagtcttgtcatttcagacagtcttccctggagcactacatgactagtccagttagtgattttagaaatgtttctctggaccttttaaaatgtatccaagtctaattcctcatttgtttctagtttatttgtcctcggttttacagcttacatagtttggagtttcctgtttagttttgtttatttttaactcctttaggcctaagactcttcattgtttctctttcatctgagtcattataatagtctctcaaaagttcatattccactcttgctccccctttctcctgcagtacaatctacatgtcgcagccaaggatcaggtcaaggcattctcatgctctctccagtggctcaccttcttacctagtttgtgatctggccccaggacatgcagactgcctagtaggcaattaatatctgctgaattaattctttgtattgtaagtcatatcaggatttcttgggggttagcattatcttaaaaccacaaaaaacaataactttagacctaattggtttcatgacttattgaggaggcgaggaataggttaaagctgctttgcatacattttggaatagtctcttttgtctagtaaggatggataagtttgttaataaccagtattcacatgggtagaaaaaaagtgtcttgatttttaatcctacaagtagtaaaggaatggtagtcagaagttgaatcgtacttttaatgcctcaggcaggatagaatagtattgttttgttttgtatcccaatatgcctaactacttctctctctctcctttctgttttgcttctcatcctttcacccattacagtctcagtatgtgtgttacaccaggaggttgccttggcaggtcagaggatctgtcacagtgaaggcactgtggtaccctttgttttttaggcaaggatgacacatgctagtcaacttatttccatttgttgttccctccacttggcactaaatgagacttaaccatttttgaatcaaagtttataaatttcttacaaaaattaaggtttttattctctataataagcacatgagaaagactggttttaaattttaaactgtggagtgacgtaaaaacatgtttaattttaattatttgctttcttttgttcgtcttgtaagttattaatgtattaatactggtaacttctagattggaggaatgatttatcctaatgtttcttttttaaaaaaaactatcagtcattcatatggcatatgctaatcaaggctctgcggtattttttttcttatgttttttaatgaagcagctcttttcatgatctagcagtctgtgttactatcagtacgtaaacagtaaggactcaaattttaagattaaaacaagttcattttgttaacatcatgttttgttgcatcttgcagcttcttggtgaatttttggatgaagccattaaattaattgcttgccatcatgagcagaagcaagcgtgacaacaatttttatagtgtagagattggagattctacattcacagtcctgaaacgatatcagaatttaaaacctataggctcaggagctcaaggaatagtatggtaagtgtttacttccaaaaattaggcaaagaatcattaactgctaccttttctcctctcgtaatttagataccttggcaaatatttaacttgctttgaaaaattaaattaaaactaaaaattaaacgaaaactattccacagtaaattgtttgcttcaggatcaatggtcttttctttattattattattaaaggttgagtatcccttatctgaaatgcttaggaccagaagtgtcagattttggaatatttgcattggttgagcattccaaattcaaatcagaaatacttcagtgaacatttcctttgagcatcatgtcagtgcccccaaaatttagattctcgagcattttagatttcatattttcagatttgggataataacctgtattattcataagatacaactctataaactagcactgccatctttaagtataaactatgattaaatacttgggcatagccattgaagacaaatatctctatcagcaaagaataagtggcatgcttgttaatttcatgtatacatgtattcccatagataattgtttaataagaagcttcacttagtcatcactttcacactataatgaagcgtggaatttcagaaatcttattctatactggggaatgaagtcagctaatatctcactgtgtgtgtttcaaaattcatccatatgtttaaaattgatttattagctaatttctacaaaagcctcaggctatatcagcataattctttataaactgaaatgcagatcactctttgggatagttctgatactgattgcagatcactaaattagcataataataaactagtgttttggggaattataagcctcactcaagaataattatatttttattacctcttcttgaaacaaatttcagaatctattctaaacaaaatgtaaactgttaagtatttataatccagtatttctcctaggttctaaaaaaactgttttacatgtgcacagggagtcatgcataggattggtgtttgcagcaccatttataacagcaaaaattggaaatagcatcaaatctatcaacagaagaataaaaaattgtgatacagtcatgctgtgaaatactatataacattttaaacgaactggagccatatgtgtcaacaaggataacctcagaaatgtagtgctgggcttcaaagcaagatgtagaatatatatatacatcattataccatttacatgtagcttaaaatatgcaaagcagtaccatatatttatggattatatatatgtacaaaagattaaaacatgcataaataccaaacttaggatgttgtttatctctgagaaaatagagaaaagaaaggaggtttgacctataatattatatttctttctaaaaaattcagagcaagccgggcgcggtggctcacgcctataatccccgcactttgggaggccgaggtgggtggatcatgaggtcaggagttcaagaccagcctggccaacatggtgaaaccctgtctgtactcaaaatacaaaaattagctgggcatggtggcacatgcctgtaatcccagctacttgggaggcggaggcaggagaatagcttgaacccgggaggtggaggttgtggtgagctgagatggtgtcactgcactccagcctgggtgatagagtgagactccgtctaaaaaaaaaaaaaaaatcagagcaattatggtaacgtattaagatttaataaatttgcataatagaatggcatttattatctttcctgcattcttgaagtaatttacaatatcaaaaattatagaagttggagtcattttgtaagccgttttgactggcctgttctcattgtaaccaaccacatttaaccaaccataaattaaatttaaagaaaatcatattatatagtcagtattaggattctgaaagccagctctctgttcagattttgttttttgttttttgtttttttgtttttttgtttttttttgagacagagtctcactctgtcgcccaggctagagtgcagtggcgtgatcttggctcactgcaagctccgcctcccgggttcacgccattctcccgcctcagcctccggagtagctggggctacaggtgcctgccaccacgcccggctaatttgtgtgtgtgtgtgtgtgtgtgtgtgtgtgtgtgtgtgtgtatttttagtagagacagggtttcaccatgttagccgggatggtctcgatctcctgatctcgtgatctacccgcctcggcctcccaaagtgctgggattacaggcgtgagccactgcgcctggcccttctgtatttattttattgtgtccaaaaggatagaagtaatgtgtttacatagaattattcagcaaatcttttgagtagaatttatatgctttttttttttttgagggagtctaccaggctggagtgcggtggtgcgatcttggctcactgcaacttccgcctcccaggttcaagtgattcccttgccttagcctctcaagtagctgggactacaggtgtgcaccatcacacccagctaatttttttgtattttagtagaggcggagtttcactgtgttggccaggatggtctcgatctcctgacctcatgatccacccaccttgacctcccaaagtgctgggattacaggcgtgagccactgcacccagcctcgtatgcattctttatcctaccttttcttgatggaagtacaaggttaaggatttatttaggctttaggctatctagtggagctaaataattatggatttgtacattgagtgcccacgatgtactaggtggatctttgaggcaacacaacgaacatgcagggtctctgttggcatagtccactgtctatttggatccattagcattttaggaaatagttgcaaaaaaatatatgttgtaatagatatagaagacacatgttgagcgtcatagacttggaagggatccagttacttgtctttggagaaagtgagaaatgtatatgactgtttcatgaattcagtttacagatttttgcttgaagtttttttgtgtgtttttgaatttcttattacagcgcagcttatgatgccattcttgaaagaaatgttgcaatcaagaagctaagccgaccatttcagaatcagactcatgccaagcgggcctacagagagctagttcttatgaaatgtgttaatcacaaaaatgtaagtgaacatttttggtttcctaagtatagatgaaatcaagatttattcatgaatatgtgaatatcaaagactaaatattaggggctttaaattgttctgtattaaaacattgtttaaaagggatatatatatatatatatatatctacagggtgattttcctcaactttattaaattgtatcagaagaatggcttctaaaatttagattatatgatttcctgtcatttaatttacaaaaggagttttaaaaagataagcgtttgagaagaattttattcagcttgatctcatcttctgctttttgttctccgtcaggctgacatttagaaaactgtagcattagcacagagatgaaattgttcccattatgctttgacactctgactttaatcatattgaatataaaatttatatcacttctccctaccccactcccacctctttaagtgatggcagtattcactgatcactttatgatgaggatagtgggtttagcagaaagtgtttgaaactatctagagggtattaacatgtttctaattctattttctaatgattgcaaagataagtctttataaagatatataagttgcactcattttgagaataaacagttatacttttttaaacttacattaagcttattcatacttttgtgattgttctaatggaatgatttcttcagttgaggaaataaactaggagtgaattgtgtaagggacacttttaggcagtcctaaaccgaaggcatctgactaaagacatttcgtagtgtttgtccaaaagagtttatataatataatgagcacagtaccttctgactacagataatacaatttaccacattttgagatctaaatatgtgcaggcctctgtgtattggagttactgggttcattatcaagggaaaaaaaaatcatggaagttcaggattaggccctttatttggggagcttacaatggtgttttgaatacaaaacagacatacagagagttaaatatcaaacatcacaaagcagtggccgtttgtcaaatgatgatggtggcccatatattgaaatctaaaaagagggacgatttctgtgagctttaattaactgggaaggctttggggaggagtagacctaggctgactcttaaagatggggtaaaaattggattgttgaaggaaaggagccttcagagaggaagaatgacgtaaaaaaggtccagagacaaagattaaacttagataataatagggaggaagttgtggtagccattcttgttccaagcgggaacttgatgtgttgctcatcacagttttgctggtggcatcctgtccatggatagagctgctcgtgccccttgtggcctgtgaacgcagttccatggcagtggtggtgttgccttagtttttccttggggaggagttcagttaatcctacctctcaagcctgggtgactgcaaagaaaggtggttccttcaactgcatggagtatgactaagcatgtctcacatgattaggcctctagcaggggtggcagaggtttatccaggcagaactctcagcacctagaagagtgtggacaagagtaggtactcagaatatatttgttcagtgagtgagtataaagctaaatatgggaaaactggaaatggtaactgaattattccactcacccatggatggatgtttttgtagtgttttgccttttaaacaatttcatcctctgtacagattgtctcttcactggtctaagcatctctggtttttctcattcttttcatagatggtcttgagtttcttttttaatcttggccgtttatctctgaacacactttgaaagtgacctagcacacactactgcataagccacctagcacacagtactgcacgtctgatcaaatcctctgagaggagctgaggcatgtcatctcttaactgtagacattaaaaccctgtttagaaatttcgtccccatctgactcccgttgtctttctttgttacaggcctgccttacagttcccatctcacccagtctttatattttttcttttgattatggagaattaagtatagtacttcatgtttctccctattaaatttcaaaggtgaaatgtggttgctcttcctggtctactagtgattgctgtgattgcttttttcttccttgttctgacttttcacttgtgggcttcacttcccagttttgctcaggatatctttgtaatagctggattaattcattagcaacttttgagcatattgcagaaattacgtgtctaactatcacagttatccagctgtttccaattcatcatcttattcacatggatgttattattagaaacattttgtaaaatgccattttgaaatcttcatatactgtgtctggttgcatttttctgatttattgctattgttctttgttgtttttattcatggaaggaaatagtatttctcaatgaacttttacctgctcttggtaattgttacttcttttgaagtagttatataccactactaatcattgacttttgcttggctgtccagtctataactgatataatttcctttatttccctttttgaaaaatgggacaactatctgtttgaatctcttttataacagctttattgaaatataatttctgtgtcatgcaattcacccatttgaagtataccattcagtggtttttagtatattcagtgatatgtgggaccatcactacagtcagttctagaataattttatcacctcaggataaaagaaagaaatcttttatcctttagctgtcattcccctacctcccatccttctcagttctaaacaaccactaatcaatcttctttctgtctctatatgcctttaatatttaatacctctcttctactctagggcttcccagatattaatgagaatagatttagtatttgtccaagtctcctattgtgcattgcatgcggttggtagacttgaacttatttagagcagccagatgctttcttattatcatttccctctcttaaatttgtttggccctttctggtgtattatttttccgaatttattcactgaacaaatatttaaataccttatgtaaagctgaatgcttaaaagaaaaacatcaattctgcccttataaagtttatgcctaaaaaacaaattcccatccccaagtatcatcgtcagcaaacatttttatatgtgtgtcatgtaacttgccatatactaggcagtaaaagtgattaagacacagttgtttctaataaggattctctgtggtagggatgaggctgatgtgaaaatgagactagattacagtgtgctgaataccataacaacattagaagataactggggacaaagtagagagaatagtcaactctgtcaagaactaggagttgtcagaatctacaaaagaggttcacctggaagataattaagttgagtagataaatgacaagcatagggaatagtatgtttaaaagcatcaaaacattttaaaaatgacattcttaaaactagcatagctaaagtatgaagtgtaatataggacttagcaggagatgaagtgagttgatggcatatcatggaggcttttgaatatactgcaagggagtttcagaatatatttgttggctttaaatttttgaggaggtaagtaatatgatcaggtctttcttttaccatattataggcagtaaatggtagctggatttgtagaaaaccatcgttagtgacccttaatcagctcaggccaccataacaaaatactgtacactgggtgtcttaaacaacagagatttatttctcacaattctgtaggctgggaagttcaagatcaagttgctggtcaatttgattcttgatgagggcctgcttcctgacttggaggtggccaacttttcaccttgtcctcatttgcctttcttcagtgtgtgctcaaggagagggagagaaaaattgctcttttcgtcttcccttgttttaggccactaattccattatgagcgccccactctcatgacctaatctaacccttattaccttccaaaggccccatttccaaatactatcacattgggtgctaggagttaaacatatgaattgtgtggggtgtgtgtgtgagggacaatcaatctgtaacactagtgttagaaggaattacagcatgaacagtctagatgttagtcttcaagctgtttatagcacagggaatggaaaaaagagattgaaggtcagattgacagtagaatggacagcattctatgagtatttattatggtgcatatactgaaaaaggagttaaaaatcaccctgagccttcttttgtaaaagagagggcacactggaaaagtaaggggtttgggtaggaatgaaaatgaattcagtgttaccttattttgtgagatgtccatgcaaaaagtgaaaagaaatgggttaaacacaatagtgtgagaagggatatgcttatggatgaaccagtgaaatagactgggaatgaagaaaactgggcaagtgcagtattatgaaaaaccaagggaggaaagggctgagattatatagagatactgaattggaaaagaactggtagaagggatttaagatttgctgataaattatgtagaggtttgtataatgtaagtgcttgataattgactgttcataaatggaattacagataaatgggttacagatactctgtgcctccacctatccatcccctcctccaactcctgcccataaagttgcaatatataaaatgaaagcaattaacttgagcttagaatgtaaagaaagattttaaactgatggtagttttttttaactcatgtatttgtagttcccaaattaaaatattatgaagtaatttctaatttttctgtctctcgacttttattatagataattggccttttgaatgttttcacaccacagaaatccctagaagaatttcaagatgtgtaagtgtaataattaaaattttgttaagttagtacatttttcttagattgctgctggacactttagctgttctcttttttcactcataaagttacatagtcatggagctcatggatgcaaatctttgccaagtgattcagatggagctagatcatgaaagaatgtcctaccttctctatcagatgctgtgtggaatcaagcaccttcattctgctggaattattcatcgggttagtagaagaaactatcgtcatactctttgttttctcattgaggtgaaattcatgtaacaaaattaaccattctaaagtggcatttttagtacattcacagtgctgtacaactaccacccatattaaattctaaaatattttcattacccccaaaaaagtctccatgtttcttaagcagttgtgcatctttgccctggcatgataccagtctgctttctgtgtctatagatttgcctttatgtttccatttatatgaaatacggcgtgatgttttcaagatttctccatgtttaccgtgtatcaatagttcattcctttttatgactgaataatattctatataccatatttcgttcatccattcatccatcgatggacatttgggttatttctacctttcagctattatggatcgtgctatgaaaattcaagcacaaatatttgtttgaatatatattttcagtcctttaggatatacctgtgactggaagtgctgagtcatatggtgattctatagttaactttctgaggaaccatcaaactgcacagtgactgcactattttacattcccactagcagtgtatgcgggttccagtttcttcacatccttgtcagtacttgttatctgactttttaaattctagccatcctaatgggtacgaagtggtgtttcttgtgattttactttgcatctccctaacgactaataatgttgggcatttttcatgtgcttgtggccatttgtgtatcttctttggagaaatgtgtattcaagccctttgctcatttttaaattgggttgtttgtctttttgttgttgttttagcatttctttatgtatttcatacatgaaacctttatcaggtatataatttgtaaatattttctcccattctgtaggttgtctgttcactttgctgatgatttcctttaatgcacaaaaactataattttaatgaaatacaattgtttatttcatcacttgtgcttttggtatcatgtataagaatccattgtcaaacccatggtcatgaagatttagtcttatgggctcttctaagagttttatagtttaagtctcacatgtaggtctttgatctattttgagttaattttttgtctggtatgaggtaaggttccaacttcattcttttgtatgtggcaatttagttgtgccagcaccatttgttagagactactcttaacccattgaatggtcttggcacccctgtcaaaaaacagttggtcatagatacatggtttcatttttggactctcagttctgtttcacatagctcctatgtgcctgaccatgtattatactagtaccacattattttgatcacttttagcttcgtagtaacttgaaatggagaagtatcaattctccagctttattcttttacaatattgttttagcttttcagagccctttgtgatgccatatgaatttgagtatcattctatttctgcagaaagggcaattagaattctaattagtatttcattgcatctgtagattgcttaggtagttttgccatcgtaacaatatttagtcttccaattcacaaacataggatgtcttaccatttccttccttctcttcttttttcttttctttcttttctctccttccctcccttcccccctcccttccccttccttcctttctccaccctctcctctcttcccctcccctcccctcccctcccatttgtcttgtcttgtcttctccattctcagctcactgcaacctctacctcctgggttcaaacaattctcctgccgcagcctcccaagtagctgggattacaggggcctgcccccacgcctggttaatattttgtatttttagtagagacagagtttcaccatgttggtcaggctggtctcgaacccctgacctcaagtgatctgcccgccttggcctcccagagtgctgggattacaggcgtgaaccaccccacctggcctctttcagcactttagatgtatcatccattgctatttgttttgccatggcttccagtgataaatcagctgttaagctcattgaggatcttttataagtgacaaatgcacctctcttgctgctctcaagatgcctttttgtctttcgctttcaacagtttgattatgtgtcttagtgcagatctctttatgtttatccatcttagtattcattcagcagcttggatatgtagattcatgtcttttttgatcaggatggaaggaagctaaaaagaaaaaatagattcatatcttttatcaaatttagcaaattttcagtcattattttcttaaatattttttctgctcatttttctctttcttctccttttggaactcccattatgcaaagttgatatgcttaatggtatgccatgtcttgttttctcctccactttaatgttttgtcccaggcagcattgggctatttacttgccttaaccatgttttcaaggaatgcctctgtctaaccttggaccagggtcccacactgaaaatgtggctgctttcttcaaaatcctttgctagttagggaggcaggtagagccaaagactagttaaaatgctggaaatatttcccaatgttttttccccacctttttattgtagtaaatacatataaaatgtgccattttaaccattaaatctacagttctgtggcattaaatacattcataatgtgcaaccatcaccaccatccatctccagaattcttttcatcttgtgaagatgcaactctccacccaccagacagtaattccctattctcctctccccgcaacccccgacagacatcattctattttatgtctatatgattttggctactataaatacctcatataagcggaatcatgcagtatttgcctccttgcaactggcttatttcacttagcataatgtgctcaaggtttatccatgttgtagcatatgtcagaattttcttccttttcaaggctgaataatattccatttatgtatataccatacttgcttatccattcatcagtcagtggcaattgggttggttccacatttagctcttttgaaaaatgctgctatgaacatggttgtccaaatatctctttgagaccctacttttcagttcatttgggctacagccagaagtggaattgccggatcacatggtcattctttttaacattttgagaaactgccacactgttttccatagcagctgtaccattttacattcccaccagtagtgcagaagggtttcagttattcctcattcttaccaacacttttatttttttcatagtaaccatcctaaagggtgtgaggtggtttcctgtttttaagttgccattttcttggttctgagttcacttgattgccgtaaacctttgaataatttccagaattctgaaaaagtttattctgacactttgatgttttatggtgcttctgtggagctattttggctgacatcactgcctctcatcaaattcttagtatcactgtatttcactgatttatatggagcaatgtaaagtttgtttttgctctgaagtgaagcagtatacaaaataaactgctgttattaccagtcattccaaattgggaattgaatattaccaagttaccaaaattgagtatttgccagaattgttatatatatatatatatatatatatatatatatatatatatatattcagaaatattttatatttttgttctctgggatttttacctgcttttttgctatataatttacatgccatacaatttattcatttaacgtgtaccactcagtgtttattatatttgaagattgtatgctcgttaccacaatcttaactttagaaaattctattgccctaaaagaaactccacatccactcatctttatttcccattcttctgtgttcctttcacctctagccctaagcaaacactaatctactttctgtctttgtatatttgtctattctggacatttcatgtacatagaattatataatatgtgatattttgtgcttggcttattttacctagcataatcttttcaaggttcattcatgtatttattgtgtgtcagttcttcttgtcattttattgacaaatatttcactgtatagatatattgtttatccatttatcacttgattataatttgggttgttaccactgactattacaggtaatgctgacatgaacatttatgtaaaatttttttgtgtgttggtatgttttgtattttagttaaatctagcttattctttgaaaagtattgagaggatttttttttttttttttcctgagagacagaatcttcctctgtcactcaggccaggatgcagtggcgtaatcatagttcacttgcagccttgaactcctgggttcaataggttgaaaagaattttttttttttttttttttttttttgagacagggtctctgtctgtcacccaggcatgagtgcagtagcatgaacatggcttactgcagcctttacctcctgggctcagtgatcatcccacttcagcctcccaagtagctaagactatggacatgtaccaccatgcctggcaaatttttattttttatttttttgtagagacggggtcttgccatattgcccaggctggtcttgtattcctggcttcaagcaatccagctgccttgacctcccaaagtgctgggatcacaggcatgagccatcatgcccagcctggaatttttaaaaattatttaattcagtggaattacatcttccttctgagtcatctgcgtcaaataaccttactcatgtaataaaataaatacagagagagttttcacagtataagacaattatgtcttagggctattggggctttttttttaagtgaacaatcctgctacaggcttatccttaattatcattgtaagtgaattccttgtatattacatatacagctgctctaatcatttgtctaatgcaatctttaaataacataataaaaatctctttaaatgggagagtattttatcttcctgagcccctactcatacagtatgtgaagtagagcagacgagtgaaacttctaggtttgggttgtttgtttcctgagtccttagaccggggcagtaatccaacattgtggaagttcatttgattttagtaaagcacacccctccaaatagaaaggttccagattaatgaggatagcaggtggctggaccagaaaaacagaccaaatggtagaagatagaaaacaatggaaacaacaagaaccacaaaaaacaaacacaaaattacaaaagagcaatatttatggtaatatgttaatcggattagttccttaatttaaaaaggtcagattttggcagcacacaaggctcaacaacaactgcgtatttccataacacaaacattcgtagctaacttcaaaaggctgaaggcagagaggttggcagacatataccaggaaaatgcaaacattaaaacaagggtaactctatttaatgagataaagttgaatatggtggggtcagagaggaagtgttcctctctgagaataaagagtctcgcgttttcaaggtgaaagatactatccaattaggatacacaattatacatgaagtagggttgctatacaaaaagcttaaactgtagaaaatagaagaatggcacaagcacagttgtattgggatattctaacttactcccttagtatcagtacataaagtggtaaaaatgaagtacatctgtagaaaatttcttaatgtgataaagtggagctaatgagatctactggggtctgttatctattatgaagaatctccctttatcttggcttgggctctttgggaaactctagagtggggatacgcatttaagttttttgcaggtggtcttgaggccacgattggtactcatctctctgctctactacttattctagattcacctccacccttggctagtacttctgctagtctgaggttacttacttggtaaaataacctgacctttcatcccttgggggttcagggcaagtcaggattgctactgtgagaccaaagctgacgaggtcccaccatctagatagttgcgggtcactttgtcggaaagagaaagccaagtgatgtgcatggatggctcttctttgcttggaagtgacacacatgacttctgcttagagtgcattgacaaagctagccatagacttgcttaatttgtaaggaaactcggaaatgtggggagagcagacttcagcatagtggtgagccccagcctctgccacagtctgttcttctggctggcaaacattcctttgctccctttattccacaccttcttaagggaaataacccaaagttctattccatcaagacatttatcaaatccaggcattgttcctcttggtccagaaacataggaactggaatgaccaaattatatggccaaccctataaccactgctcccctgccaaataccatagatggagtggtcagacagggccagtgttatcacagtgaacaatcccatttagaaaactgaaaaatgcagtcattggttagttgtaattaaattcttctgtacagacattgtgagtgtcccttgccgtgggtggggaatattcctaatcagtcctcctgactgatctctgtggttctctatagtacctggctctaccctgtgggagagtcatctttttgctatcctcatgaatatatctaaagtggatattgaagaatgtattttccttgagggctgctcacctttctcagcctgcttcttacctataaaagattggggcccaagggtcattttaaggccatccttctcagccttgccactattgacattttggagcaaacagttctttcttttgatgatggaatgtttagtagcattcctggcctctacccactagatgccagtagcactccccagttgtgacaatcaaaaatgttttctgacattgccaaatattattttggggcaaaattactgtgaattgagaactcctgtttgaagtgtagaaggatcatagacctttggcgttaggtctgacagttaactaactctttcagaaatttaagagatttcttatctttctgattgtagttcctttcatagtatcttttttagctcatgggtcctgtattcttggacttaattgaggctgtcttcagtcttcctgtaagctttcaagcttctgttggcagactgaggcaaatttatcaattgaaaattttacaggactttttccctgaaagggtttcataattattatgtgaaaatgatgcatagaaaccaacccaagatatcagtggcttaaggcaatatttattgtttacttgggtctgcagggttggctgtgtgacactgctccaaactgtgggtcaagttcaggcttgtcccatattcaggtttcagcatctaaactgaagcatacaccagagacatccttttctcatggtgaaaggtagaagagcaagagctatgctgagtcaaacacattcccccatattccattggacaaaataagacaagtgactgaacctatcgatagggtgaggacacagtctggggtgagcaggaatatttgcagaacaatctaccatactttcttccaggggtctagtagcatttagcttttccaaaatggcaagaccctgaaattctaggctctgttcccttttatttctgctttaaaaggtggctacttcttttaaatgcaaccagtagctaccaacacaaactactgaagttttgctttccagtcttttctagagcagggttcaacaaactttttctgtcaaagccatgtagtaaatattttaggctttgtggataatagtctgcgtcacagctacaagactctgccattgtaacacaaaagcagccataggtgatctgtacttgaatgagcatgactgtgtttcagtatcagcactttctttacaaagcaggcaggccttaatttgccagcccctgtgctagagcttcaggttcattgtacaagtggctgtgcaggtgacagcttcatgaaatgttttgttactacgtaacctagatcacctttccagccttcgatgtgagtttccctgctgctcaactgctaagccaggatcttatgtttttataataattaacaccccacctctgacaccagtttcagtgttagaatagactcagctgtactgaataacagataaacccttaattctcagtggcttagcacgactcaggcttatttcctttgctgaatgtgtggtgcagatcatggtgggtttgtggactgtgcgtttacatagatgatcagcaacccaggctgccagagaatcctctggaaagttcctaatcaccaaagcagggcaggagatgacaggaagttgtgcactggcccttctcttctttacttccactcacatcccatgaactagaactacccacgtgcccttgcctaactgaggaagctagaaaaattgggggaagaagacagaatgttgggttagttccactgcctgcataaattctaagttgctattcttatatatagttagcagtgtaattaacagctgtaaggtacatattgatatatatggatgaatttcaattaatagtctttgaggctttttttgacaatttttttgcttaacaaaaatatctgtctttaaaaattgttactttgctcttaattttttcacaatgaagtgcttgaaattggaatgttatttctaaattggaatctgctagtataaagagccagtaaccttcaaccatcacactaaacattgaagtagtatcaaagcttgtaatatttattcttaaacatgcagtgtttctttgctgaggtactgtattttagaagtattagcaacattatatttacagaataccaataatgaaaatttttttcttctgtttcattaagacctttgaattgttggtatatttaatttcataaaaccactagattacatatcttctaaacccatccatgattgcctgtcgaaatatgttaaagacaacatacatgcttttctgtatgttaacattacaaaagtaatacaaaagtaatagttgtctttcaagcaggctattttccttttttgtattaatcggtgatatttaatatgtatactgcatgtcagtacaggtaatacagtgcatttgtgttgtggatttatgctttcttcgttttttggtcctttggcttataatagtattcatcaaagctaacaggcaaagtatgttaaacatgaagccatgagtgtttatgctgctgcctgacttttgatgggcacagcacagaatatgttaaagtaggggccaggtgaaaaattctgaattattcagtagtatctatagcaagtaattttatagattagtggcaccaaggcaatggtgtcctacttctacaaacagacagaaattttatagcaaatttgtgtgacttcaggtgggaaatcagggatggaaaaatggataatgactcttctagtcctttggaactgggtatctgccagtctaaaagatcaaataacatttgttaggattgacaagatggctcgttgttgacttaaaacatctgtataaagcttattgtgactttaaaatgagattttaaaaatattggtaatatgttatgcaaatgaatataaatgctaacttatgactttcttttactatagtagtttttttatgtgagctttgcgatgtcttttcaaatcccttttactctaaccaaaaatgtctagctaatcataatttctagcaattaaaacattactaacttctctaataactgtatgtattcataaattttaaatcccataaaactgacttctcaggtttgccttttaacgatgaatcagtgcagtaatattacagtgagaaaaacgaacaattaacatgaatgttttgcaagggatagtataactttattgtgaactgtaggattttcctatatatcatggcagtcattttttaatttttattttctgaaggacttaaagcccagtaatatagtagtaaaatctgattgcactttgaagattcttgacttcggtctggccaggactgcaggaacgagttttatgatgacgccttatgtagtgactcgctactacagagcacccgaggtcatccttggcatgggctacaaggaaaacggtcagcacacacatttatttgaaatatttttctgatttagcttttttctttattcagtagatttttaatgtaaatacttaagcagaagtacgttgagttaaatgtgtatcattgtttgaaatgtgtatcaaaagtttgcaggtaactataaattttttcatcaatgtttggaaaaacttggggcccttatttgtttaaatacggatacataacatcagtactaccattggatgaagaatttgttgccgtggccctgagacagaatttatgctctttgcttgcctataacttgaaaatgaacatttctaacatggtctcagggatgtatagtgtactgacagtttattattagtgtacatcagtgatatttgcctatatttccaaccccatgaaactaaagctcatagcagtagcactcattgtaaattttaagagatacattaaggcctctgcaaagctgatggataattaaggtgacctcttgaaggaagcagtaaagtttcattaaaacgttgtatccagccttaaggaaatgacttttagtattttgtatgggtatatccagttgtatcaatcaacctaagaatcagtgttgaacaaaattatctggcatgtagatcatgaatttaaacattttgtatgcatatacctacttatatttaatttaggaagaaattttgttgagtcttagaaatttaggagatgaataaatctgctaagaagcatgggattttatggaaataaaccatcgttttaaaaaatgtggtgacttcatccaaaatactaccaagaataaaacctagacattttttctggcaaggaatctggaatagcagttcattttgaatcaggaaattgtaataagtcaacttttaagattctttttttataaaagatacaattaagctgagcttgattttctgagctgattaaaaacaaatactttaaacatttgctattaattttttattcttaagtaaatatgctgttctttttacttacactctacctgaaatttgaagttttttattttttgggaattgataacttcacgtgacccaccagcatgaagattgcttttgcatttgctgtaattgattgtcatagatatggtgttatgtgtcagtgtcctataaatatgatcttaggatagctccctgccagaaattagcactaagaaaaactgtcatatatagaattgaggctgggtatggtcgcttacacctgtaatcccagcactttgggaggccgaggctcgtggatcactcgaggctaggagttctagaccagcctgagcaacatggcaaaaccctgtctctactgaaagtacagaaattagtcaggtgtggtggtgcacacctgtaatcccagctattctggaggtgaggcatgagaatcgcttgaacccgggaggtggaggttacagtgagccgagattgcaccactgcattccagcctgggcgacaaagcaagactctgtctcaaaaaataaaatagaataaaaaatgaactgacatatggttcctctttagttaagaattatgtagatcaccttcttgccttcccactcccaccctaggaaacggagtcaaatgtaatgcttaatgattataactacattagccagcaaggttaaacataagtacttcctccttttaatgacacctcacactcattttatttatcttatttatttatttatttatttatttatttatttatttatttttgagatggagtctcactctgttgcccaggctggagtacagtcatgccatcttggctcactgcagcctccacctcctggcttcaagccattctcctgcttcagcctacgagtagctgggactataggcatgtgccaccatgcctggctaatttttgtatttttagtagagacagggtctcattatgttggccaggctggtcttgaactcctgaccttaggtgatccacctgcctcagcctcccaaagtgctgggattacaggagtttgagccacaacgcctggcctcccacccattttaacaactttgctttatgtaccttttattgcaggctactcagagcattttggaaagcagtgtaatcaatatatttttaactgcttaatagactaagcagttagtttacagctagagttgtgcatgaatcagacttatgttcctagtcttcactggcccagataatatcttctctcatgcttgcagctttcaaaatacttttgtttaaaaatgagcttttctgaaagttaccaaataagttgtaagctggatatttaaagtttaacattctctataaaatctgtagagaagatttattctaatagatttttgtcaaaaacggaaaccttagaaaaaatttttctctgaggcactaatttataaatattaaattttttttctaaaatcttatccttgaaagctgaaccatgacataaatatgaaaatattcattcattttaatatgacattttagggaaactttagttccacagtatttccaaaagtaatttccagtttagctcttaagactcttcagtgaactggcagccttttaataagaatgtactgtattagaaagtacaggctttaattttctaagtcctttaacatgagtaaagggcacgtgtctttctgacatctatttgtgccgttttccacttgtcattttaaagaattgggaccttcagatgtcacaactaaatgcaagtttctaaggcttttccttctaaattgctcattcttccctcttttcctgttacactgcaagcacttactctctcctttttgtgtgatgttcaaacccaaaggcataaaatgccacgatgtgttgtcagtttcccttagtaagtggagattccaaattgtctgtttctgtgtctagcagattcttgtcaacattgattgggattcccatttacagttggcaagggtcatcagtaagtcttccaggagactcttcatactcaattcgtgggaactgacttactgtatctagccaaaactaacttcttaagccaaaagcagtttggttttatgggtttaaaaaactttaggtaggaaacatgaaatacatttctcttactaagttttccttgattagttgttcattctctgtgcacttgttccttttgggatagtagggtaaatgtagcatgatgttgccaagaaaacaaatggacttttaattcagaacaagcatagcacttctcagttaaatgtatttgggaaatccagtttaaaaattccaaagagctttagattaacttttttatcataattattcatagagattatttctgttagatattttaatatgctgaattattttctcatgcttttttcttagagagtataatgcacagttgaacttctaaatagtatagtataacaattttatttttataattttactacctcatgtacatttttatttacaaagtttgtgtttggttctatttcatattttataaacaagttctcagggacaaacatgcagggtttttctatttatgcaatttctgtgcatagctctcactttgaaattagatatgtagttaaaatgccacactttacattttcttttgtgaaccagactttcaaaaaataatttgtgttttaaattattccgttagctaaagttacaatcactttttttcttttcgtgacgttttgcagtttttatataatgcagtcatattatgcttctttgattttaatgaccttttgctttgcttttccttcttttgtgctgcaaacatatagtggatttatggtctgtggggtgcattatgggagaaatggtttgccacaaaatcctctttccaggaagggactgtatccttgtgctgctgcagcagttaattagttaggcgatgaacttctttatgttctctaatgaaaatgaatatgctacatttacacagatgggtttttaaacaggcataaagtttgtggctattatagttcaaaaattgttgagataagaagctgaaatatttgtaggctgcatctggcagtaggacatacagtctctgctggtagtcagagcacattcactgtcactcatttttattttatactgctttttataattttaaagtatacatggtgtgtgtgattttatttctttctttttttttttattttaaccaaaatctttatgttaatgtcattgcattttgttttcagttgacatttggtcagttgggtgcatcatgggagaaatgatcaaaggtggtgttttgttcccaggtacagatcgtatccttatctttggcctaaaatgtagtttctaaaggtcaaaatgtatgatagcacttcagtttggtcaggtataatgtattttgtctctccctaatatattgttaaattactcttaaaataccacctactatttgacatagacttttccttccgttatttattgtttcatatgttaattctgaaccctgctcaattgtaattatgcacaattacttgctggctttgagttgatttaacctaaatcaaaaatcatggcttgcattaaaaatttataataattatacacttaagtctagaaatacgtacaacttaatatgaattttggagctgtctgttgcttctggccatccttttgttttgtcccctacctcctttttgttaatgttctgtgtggtttgtgtcttttgattgttgtctcattactcacataacatactgaccctttcatctgagaatttcagcagtagtagttttgtatggtaacgatagctttggattcatactttttgttcatcccactacttttaatatttatattaacagtgatttgttatgtgtttaccagctagtaacacttagaattgtttcaggaggaagaatgggaaaaggcatattcacaaggttacaataagtgagttttaggccttggccttcagggtcctggagtgtaaagactagaggaaaggagaccaagaaatcctaaccttacaacttagcaaaaaactgaatcttttttataagggtcagagctttagaaaatttttttaaacctaagctaaacaaagaatggcaaaagaaaatgccacttttatcgaagcctttatttttattacaactgattattttctgttagtgtagaaaactcagtaaaacaggatgtgttctagaaatattgtctaggagatataatcatgttttctgataaattgacagaaaaggaaaaattttgtatattattatagcattgtgtgcagtttgcagttagagccactatggatagtaattgtcattattcttagttgcttatcattttatttagaatttgtgagtttaagcttccattttaaggtaaaatcagttagtttgaacacacaataaataaggttaataaagcttatttattgatcatttctgtccacctacaatcattgccttttgcagggtgcctgtgagatataaaatttataactgccacatcctttcttaggaatttttaaatttctattttcttgtaatatgaatatgactaatgtattgaacattagttatggagtatttttcttagctacttgatattagatattgatcagtggaataaagttattgaacagcttggaacaccatgtcctgaattcatgaagaaactgcaaccaacagtaaggacttacgttgaaaacagacctaaatatgctggatatagctttgagaaactcttccctgatgtccttttcccagctgactcagaacacaacaaacttaaaggtactttttacaaatatgtacatttaatcccatttggggtgtgtagtgtgtgtgtatgggtttgtgtgtttatatgtattcatattcttatgggacatgaacccaaggttttctctggatggtggggaaaaaaatgaggtttttgttttttttttctttaatcttatatattttaatcatatgtataagataattttacagtaatatttttaaaacatatgctttttaaaaaatctcaaattgctgaaagttattaataatttgagaatctttacaaatatatgtacattaacaccattatgtttgcagccagtcaggcaagggatttgttatccaaaatgctggtaatagatgcatctaaaaggatctctgtagatgaagctctccaacacccgtacatcaatgtctggtatgatccttctgaagcagaagctgtaagttattttcttaatgtttacagaacatattgcattcttagagttagaatgacagttaggtttggaggagaccttttaattttaaataaaaatgtagatacatgatgatgatgtttttctgtttcttcatgaagactacgtcaaataaactaatgaacatattcgagcccctcctacacaaaataaagttacctcccactgttttttgcaatcttgcctggatacctaaccagagaactaggatgttgaatgctctgggggaacatcctaactcaggtataaaacaaattactgtatccaaaggaaaacagaattctgtgatctgtgatataaataaaatgtggcaatttcaagagctagaagaaaagaaaaaagacagttaaacattttatttcctgcaatgaaggagtcttcctaaactattatgtctgtataagtaagttgatgattgatcagtcttgatctaatgatatatttttataagtcatctgtgtggctaatatttcaaataactacagagttaaaatactcccagcatactgacttggttattattgccttgtgtttttcagccaccaccaaagatccctgacaagcagttagatgaaagggaacacacaatagaagagtggaaaggtacattcgtcagattcttagagggaaaactgtgaaggagcttctggtttttatatggtgatttattatcatgttagagaaatttgtgactttaatatgcataaccgaaatgtggtaatattaatatttttacataagtagaaagtaagtctgcttccttccttaacttaatcttaagttcccaagtttcccaccccagacacagacacattagtgctctgtctcatatttttttccatggtttgtgaatacacaaatgtgtttagtgtctcccacctctcctcttccacccttttaaaatcacgtatggttgtgtacggtgtatgctatatgtacttgctttgtttatttattatatatttttttgagttggagtctcgctctgtcacccaggctggagtgcagtggtgtgatctcggctcactgcaagctctgcctcccgggttcacgccattctcctgcctcagcctcctgagtagctgggactacaggcgcctgccatcacacccggctaatttttttgtatttttagtagagacagggtttcaccatgttagccaggatggtctcgatctcctgacctcgtgatccacccgcctcggcctcccaaagtgctgggattataggcgtgagtgctttgttgatataatcagatatctggaaggttattctcttttagttcacgtatctgcctctcttgctttaataactggttagtgttctgctgtatgaatatgtcacactttatatatccatctccctcttggtgaccatttaaattgtgtccagtctgttgctgttagaaacaactctgcaatattcatgttcacatatgagaacatgcctggaagaaaaatcctggaaggagatgttctgagccaaagatatttttcagttatttccaaattactctccaaagaaatggtagtagtgtacacttccgtccatgttatataggagtctctctttgccctcacccttgcctacagaatgggttaatttttaatatttgtaaatctaatgtagttttattctattttatgaatgtggctgaaattaatcatgctttgatagtcatggaagttttcaaatatttcttcaaaaggtgccctgggacatgtgggtcaggtaatttttaggtcccgtttacttccatttgtgttattgtccttcagtgttttgaccacttttgtaactgcgtgactttgagtaaatcactcccccttcatctcaccctcctacactgccccctgcattttacctcatcttaaaatagaggcagaagacctgttattaagagttgtctctaaatcctgggaaaggaaaggggactggggaggtataaacatgaataagtgacccatctataaatgtattttgctaagcatgaatttgattctttcttagaaattgaagagatttagagattggttttctctgaactttgggaaacccatggttagcagagcccgtgataaagttagaagaatgacaaaatgataaaattggatagagtctgctgcatttgaatatgtaatgtgcatttgaatatgtataaagatatagctctgtactgagtatgtatgaaaacattaacctaatatttttacatcctactaatttacagtagacgatgaagtattttgtagaatcttgtggtttttttggttgttttttttgtttgtttgtttttttgagacagggtctcactgtgtcccccaggctagagtgcagtggtatgatcatggctcactgcagcatcaaaactcctgagctcaagtgatcctgctgcctcagcctcccccgtagctgggatcacaggtgtgatccactgcacttggctaattttgttttttttttttgagacagggtctcactgtgttgcccaggctggtttcaaacttctgggcttaagtgatcctcctgcctcagcctcccaaagtgctgggattataagtcttaagccactgcgcccagcctaatttttaaaaaaaaattttgtagagatggggtctcactgtgttgtccaggtcatagactcttaataggccagcagttgtaaggcacaccattatgtgccacaaagaaaaaaacaccttcggttgtacagcaccattggttataagatatagtcaatttcagagattaaactgtgaaaaaagtacatcttaaaatcagtgagatacagtgttttcatttgtataaggatatatttgggggttttgattgctttaaaaacatttacctttattctgtatcctttactcctagccccaggtgcatgtcagtaattacccacagactgcctttttcaagatctacttaagagttttagcgcatagcagaaagaaagattaattgccaaagccattaattacagatggctttgcctagttagtgctcctaattagttttggttcttctgccttaatccctttgtgctttttcccagaggagtgctattttctctcttaaaaaatcctcttactgcaaatgtttatcattcctttttgtttctttgaagaaaaccatctcttattctctcctttatcagtgctttctatttttctccttccaagccttaagttactatagcaaacaaacttatctccagttgttgttcattccaacatattcatttgttttaccttattaccaatataaatgtcatactctgtaatcagggattctttatcagaattttattcttcaggaattaacacagactccttgaaattcgatgcaatattttttgtttgtacatttttctcagaagagggttcactacttttatacaattctcaaaagattccatgacccaaagaagatgataaatagtgttgatgtggcatccaccattaaggttaagtgtggtgtgccctgtgagtctgaatgtctacttaagaaccttaagtagacattaagaaccttaagaaggttttttgtttgtttttgtttttttgttgttgagatggagccttgctccgttgcccaggctggagagcagtggcgcaatctcagctcactgcaacctctgcctcccaggttcaagcaattctcctgtctcagcctcccgagtagctgggactgcaggcgcctgcccccaagcccggctaatttttgtgtttttagtagaaatggggtttcaccttgttggtcaggcttgtctcaaattcctgacctcaggtgatccacccacctcggcctcccaaagtgctgggattacaggcatgagccaccacacatggccgaaggttcttcttaagtagacattcagactcacaaggcacatcgcagttaacatcagaatcacttctgatgataatataagtgaagaatataagacaggaggcgcatatattaataccagcagagcagctcccagtgtgtctcttcagttggaacagttgttgcagtggtctacttgctgtccagaagcctgataagagaaaaagattcccatggagaaatgttcttcgaagtgataaccatgcttactcataaggagttgaaatgtagcttacctgctagttttcctccaataaaaatgtgtttatctttcattctgatttgttgtgaagcttttgcacactctaatttaaatcttggtagcatatatctagttgagtacccacagtgcaccaggctctattccagggcccaggaaatggaagtcagtaagacacgtggttcaagccctccctgagacagatggtagtacagaatggtatgtggtatgatgtgctgtagcacaagttgctggtagagtgaaaaagaaagcttctaccccagcactatcaaaccaacttcagaaacagtgaattacaggaaagattagtacttccttttaatatgatccattgttgagtgtcaaggaattgttattaattaacatccttgaatcttaggccgacatttaactgactgtcattgtaaggacactgtttgaagtacttcacatgtataaaaatttccacttaaaccatacatgcgttgtgagattggctcttagactttgaaaagttcatttttgtttacttcttttacagaattgatatataaggaagttatggacttggaggagagaaccaagaatggagttatacgggggcagccctctcctttaggttggttacaatataagcttggttaagattacagtttacttcttgtgttgtaatcttcagtggcctgaaacctgcagttcttcccatatttacaaaatcattattattccaggcttaataagtataaggaaatacagttttgttttttctactaatacattatactaatatatcagtaactgttcataagatgcacatctttttctatgatactgacattctgaagaacagaaatttaaaaactttttgttggcattgttgctgggtctttaaagaggaaacttctcaaaattcaatatacatacctttctatgatcttgacagtctttactttggataaataaaagcttcactgcaaaatttagtacatgtaataccaaattgctgtctttctctttttgatattattgatttgttgaatgaaggcaataacattaaaaccatcactagaaagtattctttctctaagaagaaaactgggtttgtaggagttaaaacttttttttatcataagctgatcttatatttaatgttagtacaagtaaaagtataaagaatagaggggaaaagttaaatggcaggtaacatgtacactaagtacataccacataacagacactagtggtttatatactttatttcattcagcccctaagatcctaaggtataggattattgcacacatgttatggatgaggaaactaaagttcagaaatttgaagtaacataagattccaaatctattatgtagatgaactaatacagtaacttcagagtgtgtggttttttcagcctcccattttgttatctggctggcaacagagacttctctggctacagaggttaggacagttgtatgaaggaggtgaaatttgagctgagccttaaagagtgagtagtatttcaaaagatcttgattttgaagtaaaactatgccattttaattcctcagaaacttctacttttgaggaaaaaaatagatgttgtatctagcatcttgtatatgggtaaggttttttaaactatagcgacattgtatactataaacataattgtttaagccattttttgtggcttgctttgacatttttggttatatattttagagttgtatattttaaatctttgatcaagaatgcaatcttccagattatagtgtagatcctgttgaatatatgaattggttttgaccgcttttacctattttggaaatggccttttctctacaatttacttataacaaatttaaagctctattataaatgctttgtgtaattaattagctttgtattgctatatagtagtagtagtaacaattgttcatgatggaggctcaggtgggatttgaaaagttcattatgtgggacagttttatactttagcatactatccaagtgagtggcacagctggagtgccagatgtttgagtaaatgtaataatttcatgagttagagcatttgtatttgttcttaatttgtaagtgaataatttgaatcttagtccagcacttgcttatgatcacaaaataagtcagtgaaaaagatagaaattgaggtttctagactttttctggatcctcagttatagcttgcaaagacgagtattagcaaattaagctgttataaaaatattctgctcttgattttgtactaaaacagaaggagtagtgtttggtaaatcaaaataccagataaccacagtaccatttccacttgatttttaaaaggaattttattctttttccctgtcgagtgccttcctatctttgttttggtttggctaatagtaaagtaagtttacctgccttgagtgtatagaggctcacttaagagaggaatgacccatgtgagactaaagattttccatattattaccattcagatatttgagaatttactgtattgctttaaagagaaaacaagtgtgtgttttttccccttaggtacttgatttttagattaaaaagttaacaatgcatttaaaagtcaatttttatcagattaagacatttgggtaaaataatagaccctgaactagaggcatatataaaaattgtatatgttggagcccttttatggtttgaatgtttcagtacaagtcttagaaactagtcattgtgtactatgtatggtacacagatataccatactgttcagtcagaaaaggctcattccaagtattgattgaactaaatagaatatactatctgaatttcactctgactgggaagctaatggacctttcttgggtctaggagattatcacctcttttacctctcatctctcaggcctgaaatgctcatcctgcttttctcttccgtttcagctcccatcacatgctttgtctcttgtggttccattcctttctgtatcccagtcccctccctaaagattttcctattcccactacactgcctattttctttttgcatttgaagaaaagctcacagaagacttttcatattgaagtgtttcattgctcatctggacagaatggagggatgatctcaaatacagatgctgggttcaggagcagtggttttcagcccatttggtttcagcatctttgggtgcctgaacctcaccctcagaaattctgctcagtgttccatttgaagaccattgattttatttcataaatgtattcttgagaacttttaagtaacttgcattattccaatttggaatgacccttatttagtgttcatgtggttcagaagtacttagcctagtgcatgagttacctttaactatccttcatcccccagcataagtcattcctgtccccttcctaaaccaatccccttgagaggatttctgtctcgagctcaggtattcctgttaactttttaaaatccaggaaatgcttgttaggtaatactttcggcaaaggaaactgtttgctcttactatatttaataaatccatatttctgcttatcaagtattagagtagaaataagaagacccaagtttacttaactaggccacttgagtgacagtggcatgtcccataacctcgtgtaaagtggggcagttgaattgaggtttcttcctgttaaacttaattttattccttgtcttggcatttgctttaaaacaagatgtgccagaagtacatcttgtttcaaatttgaatcatttgaatttttcctttttagtgagaagctgtaaagacttttttgtagggaagtagcttttaacttttgtagttacacagtcctttaagatcctctgtccaaaaaaaggcattacagacagttttgcatgtattatcagcagtattcacacataccctgaagcccattcatggatcttgctgcaggaccatttctaaatgtggttcagatgtaaaattcttgtcttaaactgaaaaacacattcattgaaaggataggactccacgattctagacattttcagaattctcacctcatagctgtcaatgaagagtgtttttaagttagtgtgttggatatcatttgcgattatttttagtgagccttcgaaacccaagagaaaaaaattaccactggaggcagtcagtgcagtgcaagtagcttgatctgcagctgtctgcaactgatttgctgttttgtttctcatagcacaggtgcagcagtgatcaatggctctcagcatccatcatcatcgtcgtctgtcaatgatgtgtcttcaatgtcaacagatccgactttggcctctgatacagacagcagtctagaagcagcagctgggcctctgggctgctgtagatgactacttgggccatcggggggtgggagggatggggagtcggttagtcattgatagaactactttgaaaacaattcagtggtcttatttttgggtgatttttcaaaaaatgtagaattcattttgtagtaaagtagtttattttttttaatttcaagtgatgtaatttaaaacctaagttgtgtttcaaaacagcaacaaaactgtattgtattttttttgctgtaattaactgtataatgtaaacctaattattttatcatggtttaaattttttgcatatttgctttatcttatgctgctgatttttttaactgaatttgtaagattttgtttatcaaagcaactattatgtggtgacttgcctatatcatgaattatttaagatttttatagttttttttaattagaatttatttcagatgttttgttcatgatactatccttcagggttatgtgcttatcaatgaaataaccccagaggagtgagggaaaataacttgtagccagttatattcaggaataactactgtaaatgatgaacgtgttaggagacctccaatatttgctacttgccaatcctaatttagttacaagaattggtaggcaatcctacttaattttggcaaaagccccgtcatctaaatggcagaataactcagagcatgtctttgaagatgctgggcgtctaccaccaccttatgtccccaccctacccaacaaaaataagtaaaaagaatatggtgtattctacaaatttgtggcatgctcaaagtttatgatcacataaaggcaagaggatacttcatgaataatacatttcaatgcaaataaacagatggttcacttctactagctatgagcctgtttttgtatacactgagttaatctactcaggctgtaggtcccagcaatgttctagagtctggtctttccctttcctgcagcttcgggtccttggacctttcctgtttcctattacttggagtgtctgtcagttgagcaccagttgttctggtgtttcatttgattctacttgtagcataatcatttatacgagctattgggaggttccaaaccctacctagatttgtgtaggtgatgtatcaaatgagcaatataccgttcatctgaaaatagtagcacacagccatatataggatatcattttctaaggactgtttcttcacattgagcagagcaggcataaatggtggttatttagtctaagtcttttatttttttatacctgattttcaacataacacgcaatgtggatgtcgagtagtgttaagaatggtgctgctcctgacaagtgtatgttaactgtttacattttctatctgtagaattatttctctattactgaacttttcctaagtaaaatgtctttgaagtctcgttatttctgaaatacgttgtctgtaatagacccaggcaccttttaaattatctctggaacaagagggatttcatgtaatgaactaggaaatgcatactcacataagcaacaaggttctaggcagaaagccccttggaatttgtgaccaacaggagcaagaacaggtgcggctcaacatgcaatgtctgaaaatttgcttggcattttattcatatatttagtgcaaaattatttttgagtgagatattttacatcactgttaatgtgcaatatttaagattaaaatacattagcttttttatatactttgaagtagcaagtttgttttcgatggcttagagtcatgatttccagcttcccagcctttttatcagtcccttttctaatacaacaaggtgcattaatttgattaggcaaattagagttctaagacacttcttgaattgtagacagaaaatattggattcacaatttcagcagaaatttgagaatgagtgtgtttatattaatttcacaattagctgtattttctgtagcatagattatgtcactgttgcactttcacagcagacatgctttcagaaggttctcatattttatgtttgattgctgataagccatctctattgatacagattttggttaagtaaggaaaaccaggtgtgtgtctgtatcatttattgtaaatgccagctgccacttgccaaccatcatgttcagttcaattcaaagaaaacaaactctcattacttagtgtaaactaaaatacttaacaaattatatcctaaaaacaaggtctctttgttaaatgttgcatgccctaggttttaaattactacatccaaatacagttttcgtcttaaatttgttaagctaaatatatgttggttctttttattttggaatcctttaagcatcttaaacattttttttttgaagagaagttacaaataacatttctatcaggtagtacttgtatgaaaccacctttcttattctataattttgatttttcaattttatatacttaatatactcactgtcttactatcagaaagttattttgaccaagatttttattatcttcatagattcagaaagagatgctaattctgtaccaatgtcttcctggttactattctcttccctctaatatatactggccatttgtaaaaccattgtgttgttgggatcacttagttatactatacgcagatagagcatctcaactctgtcatagtgtttgctgaacagttttcagtgtcatgcacctttggctgctaattgttcctgacgtgcactcttccgagttggtaaaggcacagtgtgttcatgccagacttctaagagaaacaccagcctcttaaatcagaagcctacacacaacccccttaacaatccaaagaagcttgatggtgtgcaaagaagcatcctgccagccttgtcattgttctgttctatgctaatcctgctgtgttgtctaaaagatggagggaagaggacatcagtgtctgatagtgaaatcatcagcaggaaagtgaagctctttccttggttacagataagacttggtttacactattggccagtatctgctaaacatatgaagacttaactattcagtgttgcctaggcattcgcctgcacaacattttgaggttagaacatagaatattttcagaaatactgttgtagtttgtgagtgttgttcattagttacacattagctatagagtggatgcatgaagccccatgacaccagtaaacttctcttaccagtaggtaaaccaaacaccattctgtcattagcagccctcttaaatgttgcctctccgtatcctgttgcatttttgtgtgcattgtgtttctactgatctctcttaggtttttacggaatcaaaggaaactaatttttccttaatagcaagaaagatgaagaggtaaagggcattgaagcagaaatgtatagtttggggtacgattagaaaactcgtaaggaaaacagaagtcctaatttcaaactgactgctcttcgttaagtgctcttaaggagagtctagtaacagtaacactttctggccatttctagtttagattctcttcgttactgaaacttttgagaaatattacctgtggattaattttgcacaatgttctattctcataatgacttacaaattaaactaggtttttattgaactacctcacactaattttctatgctttcccaagtaagctgttgccctgttagatctttactgagtgaattataaatgtgtgttaaatactttctagccaatgttgacacaataccagtaagtatgtaaagtatataccttacatcagtaagagacacgtgtaaaatctttgactgtatgtcttgcaaaattgtgctcgttgacattattactgtttttgtaagtagaaacctgctcgtgatatcggtccatttacattttacaaaaggagtaaatcttagtaaaaattttacgaagaaataaattacttttgtaggcccaatatttggtatatttttgagaagctgttaatcttttagctgaataatgaagttagactgaattacgtgtctccctggactgtgacatctattttctcattacagtttatcctggtcagcagggtgtcacacctggaaacctgagtatgatagctgacatttgcttttctccctctgcgatgtcattcctcctccattcctctccttccctgtgttccgttccctctcctttcctctagacaaaacaaaatggggcactttttagggaatgctgagatcattattgtggtttttcatcattcatgccctagtcattaaacatgcaccactggaatgtaaacaatgttatctagtatgtcaattggttataatattttaaataaaaaagaaaaaagtggtatgaaaattatgaaa

SEQ ID NO: 42 - DNA, 127222 bp, Pan troglodytes
  source 1..127222: mol_type = genomic DNA
gacgtgcgcgggcgtgcgcggtgacggcccgcgtccctgttactcagccgagcggccgaggccggacgacgcggcttggattgcggagccgcgagcagcgctgggtaacggccgcggcgacccccccggacggctcctgtccccgctggcgggcttccctgtcgccgttcgctgcgctgccgggtgagtgcggcggacgccgcagggccgggacggcaggcggccccgtcgtgtttatgttattgtgccgctgccgccgccgccgccttctcctcagccgtaaccccctcctgggagtgggggcgggagcgcgcggcgggcgggggcggcgcgggaacaatagcggcgcggaggcgggggccagccgagggggcgtggggctgcgggacctgggtgcgctccgctgcccgccagcccgcctgccgccgcgagccccgcccgcctgtcctctcgcgtcctcttcgcgtgggtcctgcctccgcggcgggagaagaaaatggagcgggggggtgggtggcaagttctgaaacacttcggcaagggtcggacggaggtgtctttgcggcccgccgcgccctggcttcctccggggcggcggggagccggggagagcgcttctgccggcaggtccccaagcctgccccgcgcccatagggaccgtattttgcttctcgatgctttctttgtgctaacgttctgggcgaacgcaggcagcagcgctgaaaagggccagagtggcctgcagctctgggctgcaaggcagtgcccaggcccgtggctcgggtgggaggtgtccatccagcttggcccgagcttcggtggtcagcgcgcatttctcttgagggtcatcggtggtgaccttttgactttttcaccccaccctcccatctctttgtctcgcatttgtgttcccgattcagagatggtagaaccaagtccattttaaagtaccctgatgaacactttccgtttttatttctgaaagttccctgcctggtctttactgcgaatttaataacatgttgactacatggcattgtccagtgattactatttttacctctgaaattcagcgatctttccagtagaattctggtccgtcagtccattgtgttttgagataagcatccagcaagtacctccttggcaattagaacatctgttttttcattcattcattcattcagcaactgtttagtaccgtactcagatgaagaggtttggtttgaaggtaaagaacagtatcctttcatggaagaagatgctttgactgaagtataatagatggacctttaaatgagacagttacataagtgatgtctgttaaggaaggtatggttatattctgggtcattttttaagcagtatatctggaagttcaagtgtaataggaagtagaattagatttggtctaaatatacaacagcttttatttatttctaaattttattttttccagtcttgcagccttacagtcatttgtaatggttacctcagattcccctgctgtggttaacgttaaacctaggaggtcagatgctctaagtgaacatgtttagtgctgtgcctgacaaaagcaagcaatcaaaatgggacttccttgagggcaggcctgtcttgcatctgtttctccaccacctagcctggaatatagtaagtgttcaataaaagtcggattgatgaaaagctctttgtaattgataatatttaaaatcaagccttaaaaaaaaaccgtaatgttctccataaagttttggaagcttcatgcaactgtcacatcagatggctaaatggtcagttcatgtacattatcttttatgatgacatgggcttttgaatcacgtgtaggtcattcactgtcctaaaataaaatcttgtctaaatatttttttaatatgataaataaagtaggttgtggagtgtgtgtttctgtgtatgtgctagtttatgtgtgtctgtgtgtgtgcatgtacgtaatccacacacaggcactcataaacaggtatttcagtaggggtctaaaatgattgcatttataattttgtgaatattatttgaaaggtttttggtgactcttattttgtggaaaattgaggacaaaaccacataaatgtcttattagaaatatttctaatattttagaaatgtttacttgaaatgtttggttttaagttctaacttgtattaacacaattggtacaaaatatgagcctaaaactcaaaataattgatttatcgaagttaaagctcttttccacttactaaatacagtttagcgtttgttttggatttgaaagaatatgaaatgagttaactaatgagtttcttattatttgctgtaaagtggaaatgaagaaataagaaaataatacttttttaagatgagggttgaaaatctttgagataccaaagttttattgctttacctagttaaggtatgtcagattctagtaggggttactgacaatcctttggcagtagctcacaggctgtgtaaagaaccagagtcgtgttactttgttttccaaattgttggtttttaaaaatagctttattgcaatttaattgatgtaaaatgcaccagttagagtgtatatatttcagtggtttttagtatactcacaatgttgtgcattaatcaccatcactaattccagaacattgtcatcaccccaagaagaaacaccgtatccattagcagtcactctgaatttcacttcaaattatcctttaaagtaagagatacagcatagattctgttagtaaatatattcctttagtaagtatgaaaagggctccttttaaatgtcctgtcctggcagaataggaaactatatccttcatactcctttagatcctgggggaaatgccatttggaaaggaaatcagtgcaagaataaattgtatacaaattaatgtggttataatcttaactatttgctccatgcctgatattatcaaagtgaccttgtgaggatgagatgttcagtgaaacaacttgaaggaatttgttgttaaatgactagtccccaactatcctagagctaagaggttgttgaataggagcctgcttcttgttggtctgctttgccagcgggttgaattttgacatatttcagtcatctacatggttgagatgctttgttgcacgagtggaaatacaaaataatgtctgacattaggattccagtgctctagaggtctctggtcaagtcaatggtatgggtagtagcttttctgattcatgtggtccaaggaagtcattataaccacatagctttatatatgaatcatttgcctatgtcagtgaactgtgatgctgattgtcttaatcatgagctctttacctgaacatttagaagccttgcattcttactcttaatgcaggttaagttgaactttgatttcagaagtgagttgactgaaaggtaacaggagtattgaaatgagttatcctgtcattcaggtcaataggtggagctagagcaatccaggaatcagacctaggttcatttctcagttctgccatctggactttgtcatcaagttctggagctttaggcaagtgccttaatgtttttggctttaaaactataaactgaggctgtcagaacttttttttatagaaggcttgttcctcagataggtggttcttgagaaaacatactaggacaaaaagagcccttcttgggtgataatcagaagcctaagttaagaacagtagtcaaagttaggattttgtaattttgtaattttcagaagccaaaaaaagtgttgagttgaattttttctttaatatccagacttagaaaacaaaaggaaggcttcaccataagctagagattcttggaaaggtaggttttcatttattccacagcatcatgccttctcatgagaccgtatgctcccagagactttgtggaagacataaaatgagttcattatcctcaggaagcttataatcaaggatgagactgaaggcatctctaaacagttaatttatgctcttttaaaaggtatatgaaagggttcccaccaaacaaaagcccacttcacatctctgtgcaggccaaatttcactgaaatccagtttttaaaattgtgtgtgtgtgtgtgtgtgtatgtgtgtatacgtatgtgtatggagagagacagagaggagacccctttttggaaaacttagtagcttccattctttttcttggaggtgggttatatcacaaatacaagagatacctgtgtttcctgttaccctttattatatttcagatttagttaaaatctgccattctttagaaagtcaaggaactcaaaccttacaatgattgctagcgtgggttttaaggtcagccctgagttctaatcgtgctccaatctaactaactgtggtataggctagttcaggttatataacatatttgggcctgttttattatctgtcaaatgagaataataatagcacataacctcatagggctgtgaggtttaaataaggtactgcatgtaaagtgcctggcactgttgtggcggctggaatgctagatacaagtattcaggtagtttttgctattgttatcacttatatttaactttgaacaaacataaaatgccaagtaaacgtcaaaccagtttaatgcacagtgtccattctatttttccagaatatgccatttgtttcactctgcatctctggggggtttatttaaaattcgatcatctcatgtaatctgaattgactgagatgatttatattaacatttggaccagtaatcctctctatcttaaaatttggaaatgttccaaaagcaaatattgaagggaacatatttgccactttcacgattttttgccttttcccacaggagaaaattgcctaagctttcctaggtttgttatagacatctaaaggaatgagaatttaggagctacgaatagctttatcatgtgacacatttgaagaaaatggaatgctgtcacatcttttaaatttagtgttattgggatcttcgattctgtgaagattgcagatttgtcagagacctggtaaccacaacaattcattgaggcctggaggtctcttaaaaaatgagggagattatttattagtaccacttagaaatattatcttttctgtattttctgtggttttctaagtcttctgtttagcgtttctatgattataatggtggattaaatttcttgttccttctcaagagcatctactatgagatgacactggtttttacttcggcagtatttactgagcattgcactatactaatccaggtatttggtgatgtaggaaccaaaggaaatagaagtcagtttctaccctcagtgagctgagtataatttgatagaagataaggattaacgtaagcacatttatgtcctaacacaaggaagcaaatattgttagtcatttcattaggaatttcttttgtcattggggcatttggggccttccaaaccttacatctcttgccatgcctttgtactcactcgataaacctgagaaagcaagatatcttcttttctgattcctggtttaagttgagagtgtggtgcacattagtcaaaatccaaatcataagaaaaggcaaaccttacgaattcattttggaatacaacagggtataaaaataagtatatgagaaatatgaaaagctgacagtagaaaagatgctactcaggtactaaccagagttctcaatctcctctgtattgaagctcttatgatgtaaggctggatctgtactagaaacactttttaaagtctctctccagtattgagaagtatagtcctccagtactgcctcttggtgctgagagactcaagcctgccacccaccatatttctggggaaactagaaacgaaaaatagccacacacaagcacttgctttgcttcgcaggaaacatcaaaaccataagatgttatttcctaaaagtcattaattgggtagaaaaatcaccattttctgacttgttccaggaaggatggctttctgattttcagatgccattgggtcaaccaaaggtaagataaagaaaagctactgctgtgtggatttttctgtgacttgagaaagggtcacttttcagttaaacaaaaaccaaagcatctagctttggctgttactattgagaatttaaaagtcttaatgttttaatttgtttacattttatattttgactaagtagtaatgaattcactttgactcaaaattccaaagatttaaaaagataaagaatctccttttctactctgtgtagccacctagttcttctgcctggaaactgttaaaattcctgtgaatacttccaaagatagtttatatatgtttaagtatataatcctttgttcaaaatccttggtccagatgtattttagaatgaaggctttttttgcaattgtggaaagataatgtagcacatctaccgtgttatccaaaatccctagtaagaggttgtagcctcatgattaaacacattaacatttctgtaaaaaatacagacataggccaggcgcggtggctcacgcctgtaatctgagcactttgggaggccgaggcgggcggatcacctgaggtcaggagtttgagaccagcttggccaacatagtgataccccgtctatactaaaaatacaaaaattagctgggcgtggtagcgtacgcctgtaatcccagctacttgggaggttgaggcaggagaatctcttgaatctaggaggcggaggttgcagtgagctgagatcgtgccactacactccagcctgggcggcagaggtgagactctgtctcaaacaacaacaacaacaccaccacccagaaataatcaaagacattaatatttttataaaagcataacaaatacaagtagggtgaataaagattataaaatcttatgctacgtctcgtcaggttttaccaccaaatacgtttgtactaaacttattttaaaaacgtatttttcacagctttatggattttggctttgccaatgaaggataggtgtcatacatatatacagtcctgtatagcctctgctctgctccctccctttttatttaatgtaaattgttgcatgcaatatgtatcaccttttgcttttttgttttttgcttgttggtttgttttttgagacggagtatcactcttgttgcccaggctggagtgcagtggcacaatctcagctcactgccacctctgcctccgaggttcaggtgattctcctgcctcagcctcctgagtagccgggattgcaggtgatccacctgccttggcctccaaagtgctgggattacgggtgtgagccaccgcacgtggcctgctgtttgttttaatatagctgagagattattttatatcagtcatatcagtatgtaaatggcatgcttttttaacatctttgtggtattccgtttgtcttactctgtttgggctgctatatcaaaataccataacttgagtggtttaaacaacagaaatttatttctcacagttctggaggtcgggaagttcaagattaggctacttagtcaatttggttccctggtgagggtccttttcctggctttataggtggccggcttctggatgtatcctcacatggcccctaagagctctagtctgttcctcatcctatcatgggggctgcaccctcatgacctaatatagtcatgagaggcttagttacctcctaaaggtctctcctccagatactatcaagttagagggtaggccttcaacatatgaatttggagggacacagacagtccataacatcattatactggtataccatttaactcctttctgatgcatatttaggtagttttcagacttttgctatcaaaagccatggtgcagtggattaccttgtgcatacgccatgttgcacttaaatgcataggataaatttccagaggtagagttcctaggccagcgtatgtgcatttgtaattttatgtattgctgaagtgtagcctgtagaggttgtccaacttccattccaccagcactgtgtaaggatgcctgcttcttattacccttagacgtctttcatcttttaagggctgtttgtgttttctttcttttgaactgtccttgtctttgcatatttttctattgctttgttgctcattttcctagatttgtaggattaattttacaaattggctccatactattttttggaaatgtttttccccaatttgctgttttccattctatggtaggcaattacgtatggttccaactttattttcttcaccagatatccatccatttgtccctacaccatttattaaataatccatctttgtcttaactgatttaaaatgccacctttaccatttacaaaatttccacgtgtatttggtaccattgtttccattgacccatctgcctgtttgggacctgagccatcctgtttttattattgtagtttatgctgtgttttctgctaggtctaattcccttttatttctcttccttttcagaagtttttttctggcttctatcttgtttattttatatgaacttctaaaaacaacccatctagtctagtctgtacccctcctctgccagtttttctgttggaatcactttttttattttattgtggtaaaattatgtacagctggatgcacaagcattgcagtccaataagtttgcctatgtatacacttgtgcaatcccagatcaaaatacagaacacttccatcacccagaacctttccttacatccttttcaagttactttgctccccaatgattggcttctattacatggattcagtgtactgttaggatttctttgtatttatagaataagtgacagctttatgatgtacctttatatccaagaataggaaaaacaaccttttcatttgttgaagtctcattttgagttcctgatagcatttttaaacattaaaatatttttttgctgttttatatatttaagtttttttttttttttgctggaaatggcatctttttttccacttttatcttctatctggttatatataagaaagctttttattttgtatattagttaatattttatgtatttaataagccccctgtagaatatttattatttctaatagttctgtagttgaattttttatttttcttatgtcatgccagcttttttgtttcctttgatttttacctcctccctcccccaactttttatactcttatattttttcttattgcatttatagtggtgattttagaagattatagttttcctccattatatgtaaaacgagccaaaatatctgtttatctgttgagtatttaaatgttatgaataataatgaaattagggagggattatgggaatacttaaagtagtgtgaagttttctctctaaagttaatgtaactttaaatgaattgtggttttcaaaatgttaaatggacaagttggggatcacttgatagtgaatgtaggattagcagttaactgccttgtgtcttatttgatgatacagtcatgcaccacatggtgaggttttggtccattacagaccacatatgtgacagtggtcccataaaattataccatatttttactctattttttctatgtttagatacacaaatacttcccgttgtgttacagttgcctgcagtattcagtacagtaacatgctgtacaggttcgtagcctagggtcagtaggctacaccatattatagcttaggtatgttgtactatctaggttggtgtaagtagattccatgatgtttgcacagtgacgaaattgcctaatgatgcatttctcagaaggtatccccgtccttaagcaaggtgtgactatatatatgtataggctgctttctatgtgcttagcacccagaggcagctcccggaaatataatttagtctggtgtcagagagcatgcagtcaaagtagaagtcaagatatgagaagtatgaagtgaatgaatatagacaggagggtcttaagcttggaaaaatgcaaaaatcaagtcaggaaagcacaggagtgagagggtgcaaagagtgagtttgatttggcgactggattggggcaggtcgctcatccttaggaaaatatatggtagttaggtacttagctgaacttcagtagagatcgcattgcttaatggggattaaatagtttattttctgtctcttcttcccttgccctgctcccaccaaaaagctaaggcagttttctgctgaaggacgcatacatcgttaagtaagctagaaacaaaaagttagaacctcgggaaaacaagtatccagactatcctaatggtataggagctagtgcatatttggtgcctatcatataccaggcactgttcttgtgctttatgtatgttaaattgtttaaacatcccacagcaaccctacaaggtgggcactgttactcccattttatacatgaggaaacaggcatagagagattatatgggaagttggtgatcttgttgggtggttttattaaagtgggaagaaagaagccaagttgaagatggttaaaaaacaatgaatgatttttctttttaaagacagggtctccctctgttgcccaggctggagtgcagtggtgtgatcatagctcactgcagccttaaactcctgggttcaagtgaatcttcctgtctcagcctccagcctcccgagtagtagctgggactcggctggcgaatttttaagttttttgtaaagatggggtctcactgtgttgcctaggctggtctgaaactcctggcctcatgtgatcttaccacctccacctcccaaagtgctgggattataggtgtgagccaccacacccagcccctgaatgaaacactttgaaaaagagtgagaaatgagcaagtgctgacacagtgggtgcagaccactcttttaagattagctctgaagtgaacaaagaaatgggttggtggataaaggaaattgtgaggctcagaaaatgagtgaaaatggcattgctgtatgtaggaaaggggatgcagagtacaggtagagagtttggccctcagtagaggagagatcttttccatctaacaggaggaaatgcagaaaagttgtgtgcccttgcgaggaagtttggaagttggaaggtgaaggcctattctcctggctttcatcttctcttgtggtttctgtttgctcaatgaagcatgagattcatacgggcagaaagggatgggagtttggggagtttgaagcagtttgccaagaagtattgattgttcatttaaggtttaaaatcttgactttaaagtgatattagtcagcctggttttgtgacccccctccccccagcattatttagctgattagttacaggcacagattaaggcaggtagttgaatttacccagggtgagattttgccaggtgtattagagttctccagagaaacagcaaatcggagttataggtagatagactgagattttaaggcatttgtttttgtgagggctggcaagtctgaaatctgtagggcaggcaggaaattcttggtcaggagttaatactgcagccttgaggcagaattttgtttttctcagggaaacttgtttttgctattaaagccttatcaagtgattggatgaggcctacccacggtatcaaggataagctcctgtacttaaacttgactgtttgtagatattaatcacatctacagaataccttcacagcaactacattagtgtttgaataactgggtactacagactagccaaattgacacttaaaactaaccatcacaccagatcagttcaaaagaaggaaagggggacaagggaaataaggaccttttaactagaatgcttattgtggggtggtggttgagtgtgtaactggccacagggtttgagtaagttaacttgaaagattgaatgccatggtcagagtggaatacctgaaagagagatttcacaagtatgataattattgacattaataatgctcaggttaactttgggtgtgggcttccgaggtggaattcagagacaagtcctgaacgtgaggaggccaatgagttaaagagtctgaggtattaaaaaagggtcagtctgcatgcatggtgaaatcagcaactagtgagaggagtaagggtacgtactgtaaaccagttgtaatatcctcaatgaataaggaagaattggagggaggatagacgataacaagaaaggttaaaggtagtgtaacaggctaagtttgcttgtcacaaattgggaatttcagaaggccaagtaaaggaattaggatgatgaagaattgagtcaaatggaggacgtacacagcagtgtggcagtgagaattcagggaataatagataaccagggagagctggattttttctggtgaccataagcagggatgtgaggtatgagaggattagtcctgatacaggagatggtggttatcacttttagtgttgtaggactctgtggcagtgctttcagattgttactcatgacccattagtaggttatagaattttgggagatcacaatttctgttatgttgttaaaagaaatgaaatagaaaataccatagtgtgtcatgtgtaataagggactaagcattttttaacggttttattgagatataattcacataccattatggttatctatttgaaatatacagctcaaagcttttttagtatattcctggaataatggagccatcatcacaacctaactttagaacatgtttgtcaccccagaaagtaacctcatactcactagcagtcactccccatttcttcacacacaccccctcctctccctggccctaaacagccacttacccactttcttctctatagttttgttcattctggctatctcttttttatttttttgagatgacgtcttgctctgttgcccaggctggagtgcagtggcgtgatcccggctctctacagcctccacctcctgggttcaagcaattctcctgcctcagcctgccacctgtagctgcgattacaggtgcctgccactaggcctggctaatttttttgtagttttagtagaaacagggtttcaccatgttgaccaggctggtcttgaactccttacctcaagtgatctgcccacttcagcctccaaaagtgctgggattacaggtgtgagccactgcacccagcgcattctggatatctcatataagtggaatcatacactgtgcgatcttttgtgactggcatatttcacttagcatgatgtttttaaggttcatgtatcatgtatcagtacttcgtttttgtttttttttcttttctttttttttttgagacagagtttcacccttgttgcccaggctggagtgcaatggcgtgatcttggctcactgcaacctctgccttcctggttcaagtgattctcctacctcagcctccctagtagttgggattacaggcgcatgccaccacagccagcttattttgtatttttggtagagatagggtttctccatgttggtcaggctggtgttgaactcctgacctcaggtgatcccccacctcggcctcccaagtgctgggatttcaggtgtgagccactgctcggccttttttttttttttttttttttttaattagatcaggtcttgctctgtcaccctgttacccaggctggagtgcagtaccatgatcgtggctcactacagcctcaaactcctgggctgaagcaatcctcctgcctcagcctcttgagtagctgggaccacaggcacatgccaccacacctggctaattttaaattttttgtagaggcaggctctccctatgtttcccaggctggtcttgaactcctgggctcaagttatcctcccaccttgagctcccaaagtgctgctgagattagaggcatgaaccacagtgcctgaccttcatttctttttatggtcaaatattatttggttgtacgatatgccacattttatttacctacacttcatttgatgggcatttggattgtttccactttttggctatagtaagtaatatagtacacaagttatgaatatgaacatttgtacacaagtttttttgtgttttttttttttcatttctcttgggtatgtatccaagagtggaattgctgggtcatatgggtaactctatgcttattattttgaagaactgccaaactgtttttcaaagtggctgcaccattctacatttccaccagcaaggtgtgaagattccaaattctccacatcctattcaagcttgttattgtctgtcttgaaaatagccatcctgatgagtgtgaagtgatatcccattgtgattttaaattgcacttccctgatagctaatgatattgaacatcgtttcatgtgcttcttggccacttttatatcttctggagaaatatttcagattctttgcctattttaaaaattgagttatttatctttttattacgttgtaagagttttttttttttttttaagagatggggttcttgctctgtcacccatcctggagtgcagtgatgcaacctgggctcactgcaacctcaaactcttgtacacaaatgatcctccctccccagcctcacaagtagctaggaccacaggtgtgccctgctaatttttaaaattttttgtagagatggggtctcactatgccgcctaggtgctgtaactcctgggctcaagtgatcctcccaccttggcctccaaaagtgctgggattacaaacatgagcttcctcgcctggccaaagagttctttatatattatagatacaagttgcttaacagatgtgtggtttataaatattttctcctgtttcggaggtagtctttttactttcttgatggcatcatttgtagcacaaaaagttttaatttcagtgaagaaatccaatgtatttgtttttcccttgtgcttttggaatcttttataagaagccaatgcttaactcaaggtcgtgaagacaacttctgcattttcttctgagttttatagttttagctcttacatttaggtctgtgatccattttgagttaattttatggtgtatggtataaggaaggcatgtgaggtaattcttttgcatatagacatgcagttgtcctagctccatttgttgaaaatactgttctttctaccaaattgtcttgggcattcttgaaaaaaaggcagatttatttctggactctgaattctattccattgatctatgtgtctattcttaggttcccacagtgtgttgattactgtagttcagaattttttgaaagttgtgtttcacatagatgtgtgagtatatttatatatagatacacacagaggtgtgtgtgtaatgggttatgttggaaaatgttggaaaacctatggtgtctccccattagagttcacttgcttgtggcaacttagtggagtatgttccctctcaggtaatatacagagaagacaggttagagggtctgtctgtgagtgtatgaattccttttagattggatgactgatttttcttactttagtaaagttttcaagtgcatgtggactgaagggcagtaaggagggcatagaacagctatgggaattcctaaagaattcatcagagatgaatgtaacgattatggagtgaagtatttgaaattttgaagttagcagggttttgtactgtgccagtctttcatgattaaaaaaaaaaaacttttttgaatatattaagcatgtctgtgtcggataacttaagacattatataaggaaaattatatagataatttaaggtttgggaatgatgctatctccttctagagaggatttttgttgactttggcaggaggcaagctagtggcactagcaatcccgaatcatcttaatccagtcagagactatgatgtttcaaaactgggttccggagtctacgaaggctggtctattttatgttttatttacttctaggtatgaccccttggagttttagcataaagccaggggtgttatcagccccacatgcccccacccccacactttcttgggcccttaactccaatatttaatcctctctagtcatgtaaatctattgcaagttcaagctcagcttctcagccacctctttggaattggcagatcccttcagggggagaaatggccccggatgccagactcccttatgagcttttccttactctcccagatcttggtcttcatgctttttcactaccttggcactctgatgccctcaaacaggttttttggttttgatttttaaaacattttttctggggacttgggcaggtgtccagtttttctagttgctcccagtacgataattggtttgaattatctagttcaccattttaaggaaagtgatttgttaggttgatcaaggtttatgtcataagattctctgtttgaaattgtagtatatgtggtttcagtttttcctgagggtaagattttgggtaccagtttctacagattatagaaattattagaaaagggggaaatagccttaggaatagaaatgggaggggaaatggcagagaaaactagatatttttgcaaagtttgggaaaggtaaaggtatagggtaacattttcatgtctattaggagtgtaaaagggcagtcatgtatcaaaggcgctgacatatttgttgtaatgatattgtcataattaaaaggctgtagaatctaggtattgtgggagtggctttgagaagtatctacttagtcgtgttgaataaaatttttaaatttcgcagagaaaccctaggatactgagtcattaattgaaggagtcaactttggggctggacttatggttgtgtcttatagcagtataaatctgcgcagccagtagtatgtaagggattgcagaaagaatttaatttcatagaacccattattaatatgagagatacaaaatgatactgattttgatttagcatgccatcttcatttatgtatgaaaataaatgtaaggtcttaaagggtttttgtttttgattctctaagctattcccatacttcttaaatttcaaaattacaaagttttccatgcatcttaatcattataattgaggaaaaatggtatatctttaatagccccttcttctcttgagaaaatgatagatactgggtgtatttcagaaggttttatcagcagagttttggttgatattttaaactttttgaggataggaattgtgtagtaaaatgatgccctctcttttttggctccatcttccagtatatgtgtcataggaacctggtttaagttcagtgtgtttctttgttacacctgtcagtagaatcggctattactgttttttggttccttacaactgaacattttggtcaccgtccttacccactttttaaagtgacttcattctcccacatcactcccaactgaagaatgttcagacatacacattgaaagaatattatggtaaacacctgtatacttcatttggatattgtggttgttagcttttttgtcatattcgtttatgtctctcctaaaagtaaacacattctcttacatatgtcatacttaagcccttaatatctagttcatattcaagttttgctaattattcccccaaaaggtcagtttgtgcggcaaccaggtactgtgatttctcacctagtttccatagctcttgtgaaggtgttttcgtgcatggatagtgttcaaattgatgtttctgttaggggacaatcactggagagtcctattcttccatcttattctgcccctctcctccaaaaaggtcaacttgtaactggttttttcaaaccagtattcaatcagtttatgaactacatttgatcgttgttgctttagtcacttttaacatacaacagttgtcctgttttctattttttttttttacactcatgatattggcttcttgaagagaccaggccatttgtcatatagaatgtttcccatattttggatttgtctgattttcttgtagcaattaacttttatctgaattcccactgtatttcctaaagtagaagattgagcctaaagactggattatatttagttttttttggcttagttactcctgtgtacgttatattgactcataacacaggcatcaggtggtttgcctaaagtgtgatcatttggtgttaagatggtattcaccagatctatccattataacaatgggtttccccttgacaatcagcagatcagtgagatgacattttggttccctttgaatatcctgttttccagcagccttttacctgtgtgttgagtgtctcttggtgagctttgaatcagttatttcatttgggcttgcaaatggtgtttttttgtttttgttttttgtttttctaaccctatcatccttttttttttttttttgatatggagtcttgctctgtcacccaggctggagtgcagtggcacaatctctggtcactgcaacctccacctcctgggttcaagcgattctctcacctctgcctctcgagtagctgggactacaggcacgtgccaccatgcctggctaattttcatatttttagtagagatggggtttcaccatattggccaggctggtctcgaactcctgacctaaagtgatctgcccaccttggcctcccgcctatcatccttcttgatcaattaatattaaccagctttcctctgttaagaagacctttccctcttgtcaactgggattgaactacagttcttcctaacaagatgagataaatgtttatttctcttcaatataccaactctttttaacataccaattttgaaaatttaaccaatttggagtagtcatcttcaaaaagtggcacataactttcagtctctcggtatcacagggatttttgttttttttcagaagttttatgatcatttcagtcattctttttaaaatagtcttcatttgtagaagttttagttttacagaaaaattgagtatatactacagtttccatataccccagacccaatttctcctataattaacatcgtatgtttgcatggcacatttattacaattagtgaaaagtattggtacattattaactaaaatccatagcttattcagcttttcttagtttttagctagtgtttttgtttttgcaagatcccatctggaataccacattacattttgttgtcatatctccttaggatttcttagctgtgagtttctcagatattcctttttgtgattaccttgactgctcaaatattttgtaggataccgttttattggaatttgatgtttttctcatttttagactggccttatgggtttctagaaggaaaatcacagaggtaaagcatcatttcatcacatcctgtcaagggtatgtactgttaacataatttatgacttgattttgactttgatcacctggctgaggtaacgtttgtctgatttttccattgtaaagttactcttttttcctccttttcatactgtagtattggggaaaggtgaccatgcacagcccacactttagggagttatgtcctgcttcttgacggcagagtatctacataaattattaatatttggaatccttctgtgcaggagatttttattttctcccatttagtaatttattcagtcatttatatcagtatggactcatggttgcttattttatactttgggttatagtccaatactattaatacttaattttgctacacacattgtttcagatttggccattgggaacccctttagttagctcctgtgcctgtgacatacttccatcggtgtgggtgttttttgagcacttactttctggcactgcaggatactcccagctcatcttgtatgttttctaccctagtcctgggatcagccatttctctaaggagcactgtttcctttaattagaaaatggtattagaaacaaagatctaggtgcacttgttgctactgggatgttgtgttttaggtactctcagcagatagagcaagtaaatatattcgtatattagaaatatctgtatatcttataagtatttaatattatatatcagtatttatatgtgcataaatatttgtaaccatctgtatctatataagctaaacatgaattcttaatgtcttcaactctaatctattaccatacggatcattcctggtcctccccttactgaccagtaaatttcctccaatagcgggaaacctgcctcccagcacacaccatttatttacttagttgttcaattccaacataggtcttatagcagtatgagaattgttaactcacacccaatggaaacagctgtatcaactaggagggttttttgtttgtttgttttttgttgttcaattcttcagaaatttctaagtggacaatcatgtcatctgcaaacaaaaacagttttatttcttctcccccctccatctgtatgccttttcttcccttttattgtcttattgcagtatttaggactttaggtatgatgttgaataggagtaatgggcggagacatttttgccttattcttgttcttggggggaaagtatctagtttttcaccattaagtactatgttcactgtagagggttttttgaggggagtagagtagatttttttaaaaaatcgaattgaggaaattcttctccattcttggttttctgaccattttcatcatgagtggtgttagattttgtcagatgctttgtctgcatccattgatatgaccatttgatttatcttcattagcctgttgatgtggtggattagggttatattagtagattttagaaccagccttgcatacctgggataaatctctcctggttatggtgaataattccttttctacattattggattcaatttactaatattttgttgaggatttttgttacctgtgttcatgaaagatactggtctgtagctttcttttcttacaatctctttgttttattattattagagtaatgctgctcttttagaataagtcaggaaatgttccttctgtttttattttctgcaagatattgtagagaattggtatcacttttttccttaaatgtttggaataattcaccagtagaactgttcaggcctggtgttttctgttttaaaaggttaataactgttgattcaattttgtaatagatacagatctattcagattattgatatagtttctttaatagttaacaggtttgttcaggttatctgtttctctttgtgagaactttggtagattgtgtctttcacagaatattggcttatttcatcttactaaatttttggtgtacagagttgttcatagtattcctttgttgtacttttaatgtacttgggataagtaatgatgacccctcttccatttgttacattagtaatttgtgccttctctctttttcttcttttgttttttttgagacagagtctcactgtcacccaggctggaatgcagtggtgcgatcttggctcactgcaacctcagcctcctgggttcgagcgattttcctgcctcagccttccaagtagctgggattacaggtacatgccgccatgcccagctaatttttgtattttttagtagaaatggggatttcaccatgttggccagggtggtcttgaacttcttgattagtctggctagaggtttaacagttttatttatattttcaatgagccagctttttttcttttctttctattttcctgtttttaatttcactgattttgactgtaattcttttttttcttctgctcactttaggtgttactctttttgatgatcagttgtctcacatttggccagtgagagtctcttgaggtggctgctgtgtccattttgatctgacctggttgatcgttgaatgcttccttgctttctggcaggataaaatgtttttcaacctgtacttatcttgccttaacctgggacactccatttctttaggaagttggcttcagtcttaattttatgtgattgctcacttctttcatctaaactttaaacagatttgacacattgagatcagcacttttgcctttttttggtagtcaacaagagcaactgaggtgtcctgttgatgctagtatttaatgtgtcttaaaacttgtcttaaaaacagaacattttcctgttcaatttatataagcaaaaagacactttaactgtatccagccaaactcttctatggcatctctgaaagtaatttatactttgccagtttgtacttttgctaagagatagttgaaaaccacacctttttaagaagttcagaaattgaggatgcggtattctgaattatctaatttgatttttctgcatctctacaattgtttcattacttagtaaagcgtttccaactttagcttcagggtttttcttttacttttaacaaatattatgtgccaacacttacaaatagtaactcatttaattattttaaccttgctggtagatatggttattctcctctctccctcatagatggggaaactcaggcaagatgaagttaagtaacttgcgcaggctcatacacgagtggcagggccagagtctgactccagacagtcggctccagacgccaaactcctagccactgctttgtgctgcccctctttcctctgctagttaagtcgaaaaagttgtttgtgattctgcatcttgctttcctcttctcttattaattatagtataatgggtgtcactcttattaccataagccttagtatggcattgcgagcaccagttaattaagcaataatgttttgagatccctaattggaagaattcagagcggtatattgctttgagctagttggccctttgctgcaactctggccatgagacgttatcttgaatagtgataatgtgtaaaaagatgaggcctccttttttaaaaaaaaaaaattaaattcatttagagtatgaattttaaagtagtgtagtcagtgatgatacaagatcaaagaataagtgaaaacacttcataaggcacagagagctaaatgtgtgtaactgttttattggtgtacatagttactgctggaactacagaggaagaatcattattttatgggaagaacatatgttactggaaatcctagattcttagatcacaattctaaattccagttctttgatgtgttaacatagggtccattgcatcctatttactggtttatttttatccttgctctgcttcttcataattgtaattaagtaaaactttggttccccaaggtcagggcatactctttttgaaaataatattaactactgctgatgagaggaagagagcaacaggaagcatttaaaaaaattttttttaaactaacggcaaatatagaatatttaggaaaaaggtaaagattaaaagtacctatagctagtaatattttggtgtacttctttttatgtattttgtgcacatgtgagagagatttatatacatgggtacacacatgtataatttgtaaggatacaaaaatcatattagcttacgttaattgaggactagagtactgataactgcttttatttaagtctaggaaatagattttttttaaaagaaatgtattcttaatagagaaataatttttataaaataagagatttgcagcattgctttttttgtataagtatgctaagactaccatctctttatttaacaggaaggagttttaaactttaacttaataggaagatgtttcaggggttctctgaagtcaagaatgttttcatataatactagaagtgttatttgcctttttcatgtctgttctcaagagtttttctgaggccatgtgacttgccctgtgatgtggcaacagactgtatagaagcaaatgagagaacccagctgtctgaaattaagccagaccataaagggatttgcagaaatgtaaaacaatgtgtgagaaacgcattcacccgtccaaacccaatgaatggactcagagacataaagaacagcggaagtgagactttcaatggcagtcttgcaagatcaggtgtctggtaggcaggcacacccggggcaggtacagcaggtaatttatctcctagcacgcaggtcccttccccagttcctcactggtcgagtactatggggttacagtcttcccggacgttgcctaagtttcattatcccccttaaaaggttatactccagtccccttccccacttaactttcaatttcccaatagcaaaactttcttcccttttatgggctgacccctcctctacattctgatcacttatcatgactttataggtgcatgagccatgcgatttgtcacatccgcaggctgactgccagtacttagatttctttctcggtctagaatggatggattgtcaatggtaatgagtataggattgcattctaaattgtggcagttatttggcagggagcccttggacagatgtagtttattcttcaagggtctccagcttagagttacccaccccgtttactgtccaaccctgaaaatgggtagtccaccatacatcatcccagctgggtggggcagggtgatgctctactgtaacctgtatctggttcagggcaaagatacttatctgcctgcaagagctatccctgattttccaaattcccacaaggtaagacctggcaggcatcaaatcttacagtctgggatgctactgtcttggttacactaattaccaacctcattggatagggaggagtcccctgccagtttccattttgactttctgctttttgtatagtagcccatcccagccatattaacttcgagaaatggggccaacccatgttttctttttagatttttctcagagttaactttaagggttcctcagtgcactttccgctagtcttttcccctcccttccagggtctcttttaccaatcccttgactcaaggatagtgagtccacccctgttcagctgtttgcacagctgtcttagtggggaccttcccagcttgggtggagcttgtcttctttccaaatcttaatcagcaccaagttgccaggctggaagtggtgaaccgtgaactcaagaggtggcatttgagtcagaagtcctcttaacctaagggatgacagggtggaggatatggccagtatataatttcttaagcattgatccatggtttccatagtagggaggatctgtagctctgcccaaatatgggagcccctataataactcatagggggataatcccaagtattttcttggggctgtcataatcctaaggagtactattgggagacatttggtccagggtattttagtttctagattagtttggtgattatgctttttgagagtttgattcattctttctacctttccagaggaagggggatgccaaggggtatgataatctcatctaatttgtaaaccttccataattccccttaacacccttgagataaagtggctcccattgtttgaatcaatattttctaccaggtcaaatctaggtacagtctgttctaatgttattttgaccacattactggcagtggctgttggaaggggaaaggcttccacccagctggaaaggtgacctacaatcaccagtaaatacatcagtcttcctcctttgggcatttctgtgaaatctacttgaatgctttgaaatggtcttagtctgggaggtcttcctcctgtggcctgttttctgatcacctttttgtttatcctttgacaagttacacaacttccacatacttgtttagcaggggtataaatccctgtacacccataccctgttgcatcatgcagagtcggggatccccaatgactccttttgtgtaatatagacgttagctctctcatcaggggtttacttatttttcttccatcgggaagtatccatctcatcttcagtttgagtgacccctatcctgtctaattcttccttctcctctctgataaactggggccttaatactaccttagggatgtctgggatcaggctaaatagtctaatttcttcctccagggaggcttgcttagcagcttcagctgcaaacctgtttcctacagcttctatagtgttccctttctgaaaaccatttacatgaactatggctgcctctgctggaagcaagaggctttctaaaacctatttggccagttccaaatgtaccaattattttctcctgctatttattaggccccactctgtccagatttttccaaaagtgtgtaccaccccataggcatacttaaaatcagtgtatatagtgcctttttggccttcagggagccttagggcctggttaagagcatataattcacaggtttgggctaaccagcaattaggtaatcttcctttctcatataaggagtgtttatttccatcaatgacaccatcaccgttatgtcccttgccatctatcactggaaacagcccatccacaaacagccttatctcatcatgtagtagagcttccctaaggtctggtctaactttggtttggtattctgtgatatctaagcagttatgatctgatgtctctttgttctcctctcctttccctagaaaactgtctggattcaggcaagtatttgttgttacgaccaagtcatctttttctagtaatacagcctcatattttagaatccgagaatcagttaaccatcttccagctttttgatttaatatattcctgactaggtgtggggtgcttactattagggccccaccaaaggttagctttctagtctcctctaccagcaggtctgtggcagctattgtttgcacacatttgggctacccttgagagacaggattgagaagcttggagacaaaagcagcaggttgccttttcccaccccatatttgagtgagcaccccaagggccatgccctggtctactgttagaaacaggtggaatgggttctctaaagatgggagggccagggctgtaatgagggcctggtttagctctttcactgcctgaatttcttctgaggaccactgcaagtgatcaggttcctcttctaataacttgaccggccggatgcaacagggaaagaagaaggagtggggacacggggcagagccagtcctcctgtttggggcctgggcctaggaaagctaactaggggcaggaaaggggagccccaggctgtggatgcctcttcgggggaacgttgggtcagcaacggccagaggaaatcctaaggccaaacagtatctgtggcctccctacctttgggcatcttctggtcgccaatttgctgcaagtcacagctcccaaatctggttgtgcaggctccaaagcagtggagcctggcgcttctgccatctccacctcctggatctcagagctgctggatggctccacccaccacccgctgagctggccccacttggggctggcattggtggacagcatgttccgggcgcctctgctcctctttgctggggcctgcacctttcccggctgctgactcatagatgtcagagctgcaggacggctccacagaagccctgtgtttaggacacctcattagtgaaggagagcggagagtaaacccaaggggctatccagaggaatgtcagatggagtctctttggctccctctttcctttgtcccctaagcctagaatttctgtttctcattttcagtcagtctctgtgtctgagcttttccctgtgtactcaactccccaactggagatttcttgcacaccccgagaatcgctttgtctgtctctggccgtttccctcgcagaacggaactgcagattgggactctgcacttgccttgtatctgggatatgtctcagtcacacacactcgacctccaaaaatgcccaaccaccaaggcagtacttagagtccaattttcctaccttggcttgtgcatgaggtttcctggttgctgcagtgcctgcttttctccgtatgtcacctccactgcctcctgaataacagtctcaggtttgtctatggcctttgcaaggagctgggacactcagacagagcgggccacctaaatcgggtgagatgcatctcccttttcggccggagtctgactctacgcaggcataaagatcccagacgggcccccaagtttgtaagggaaacattcacccgtccaaacccaaataatggactcggagacgtgaagaacagcggaagtaagacttttagtggcagtcttgcaagatctaggtgtctggtaggcacacacacccacagcagttacagcaggtaatttatctcctagcacgcaagtctctcccccatttcctcactggtcgagtactatggggttacaatcttcccagacgttgcctaagtttcattatcccccttataaggttataccccagtccccttcctcacttaagtttcgattttccgatagcaaaactttcttccctttcatgggctgacccctcctctacattctgatcacttgtagtgactttctaggtgcatgagctgtgtggtttgtcacatctgcaggttgactgccagtacttagatttagcatgccttgaaaatggatcatttaaaatgttttctcacacaatggcactcttttcaccaggttttccttttttttaaattgtcgttttccatcaaaattctagttaatcatgcagtggaggtttattatgtttaaataaattttaaaaagtttaagtgctcacttctgtctaatatattaaatattgatatatcaacataaataaaagcttctgttaacaaagttctttgtttaaaaagtataaaggaatagtgataaccaaaaagtttgacagctgccatattatataatatcaaaaaattatttattacttactactcatctcaccagcaaaatcattggatcctgcacagggatagatacaaattttgcaaaattttaattttcacttgatagtttgaattttttcattggcaataaatactgtcatttatttttcttgaagtgataggcacactttgttcattttcaagaaaatgtcttccacataccctagcccaaataacatagtttgtgtgtcattctttcaagtaaaaattgtattatttaaaaacatgtctcacaagtgcttttcctgcaatggcccctgtacttcagtatatagcaacagtgcttatgtatacttcccatttcatcataacagataatgtggatattcctcttttatatgtgctacaccagaatttaacaaggtaactgcagggagaatctgaaactatattaataaatttttcatattctattatattaaaatccatttgtctatcttgcgttttaaatgagtgttttgcccatgtataagtttgaaacatcatgtattagtcattcggaaaatactgatttagtgaggcctgcagatctttcagatgtgtttctttataccaccattgtcatagtgtggtttgaggactgacaaggctggcagaaaactccatctgtatcaggtatttgacggtcaagatttatgtaattaagaatttttggaaatagtaaaattgttaaatttctaccctgactgatgagtattaaaaaaaagaaccacagattatccgtatgtggagtgaaagatggacatcacaacatatatggcagatattaaaagaataaaggaatattataaacactcaaaagctaagaaacaatgtagatgaaatggaacactcttttaaaaaatattcattgcccagatttacacaagaaaacagctacgtatttattaaggaaattaaatttgcagtaaaaaagttcctcacaggccctgtgatatcatgagggaataatttgatgtggctcctacttctaaaagcagcaattctcaaactttttaagagttttggaatgtctgtgttgttaaaaattattgaatatctcaaggtgctttatataggctatagctattgaaatttactttattagaaattaaaactaagaactctaaaaaatatttattcatcagttcatttacaaagtaataacccagttaaagttaacataaataacattttatgaaaaataactttttcaaagaaaaaataatataacctattgtgataaccctgtgggttgcttagcccctggaaaactgctgtacacatgtaagagaatgccagtgaaaaaggcaaaagataggcatttctggaatggaacttttatttctcagcactttataggttttttaaagagaaggtgttgctattgttgtatcagataacacagatattaaaccaacaacagtaacaaaagacaaagaagggcattatataatgacaaaggatttaattcaacaagatttgtatctcctaggtatatatgccatacccagtgttgtagcacccacatttataaaacaaatactactagacttaggaaaacgagacaaccacacaatagtagtggaggactgcaacagcccactgacagcgctggacagatcaccgcagaaaactaacaaattctcgacttaaattgaagttttgaccaaatggacgtaatacacatgtacagaataccctacccaacaaccacagaatacacattttactcatctgtgcatgctctaaaaatgaccacatgctcagtcataaagcaagtctcaataaattcaaaaaagcagaaatcataccaagcatctgtttggaccacagttgaataaaattagaaatcaataccaagaataactctgaaagccacgtaagtacatggaaatgaaacagtttgctcctgaatgacgtttggctaaacaaaattaaggcagaaatacaattttttttttggaacaaatgaaaatagaaaaaatatatgaaaacctctaggatatagcaaaagtagagttaagaggaaaattttagtgctaaattcctacatcaaaagaaagatctcaaattaacaacctaacattgcccctaaaggaactagcaaaataagaacaaaccaacctgaaagctagcagaacaaaagaaataacaaagattcgtgcagaactaaacagaattgagaccaaaaaattacacacagaatcaacaaaacggaaagttctgtttgtccttctaaagggtaaacaaaattgatagactgccagctagatgaaccaagaaaagagagaagattcaaataagcacagaaatggcaaagatgtcattacagtggataccatagaaatacaaagatccttagagactactgtggacatttttatgtgcacaaactagaaaatttagaggaaatagataaacatctggaagcacacagccttccaagagtgaaccaggaagaaatcaaaatcctaaacagaccaataacgagttataacgttgaatacataataaaatctaccaaccacaaaaagccctgaaccaaaaggattcatagccagattttactagatgttggtagaagagctgataccaatcttactgaaactattccaaaaaaatcaaggtggagagatatcctccctaactcattctgtgaaaccagtatcatcccaatatcaaaatctagcaaggacacaacaacaaaaaagaaaaacagaaatgcaggccggcatccctgatgaagatagaggcaaaaatcctcaacaaaatactagcagactgaatccagcagcacataaaaaagataattcaccatgatcaggtaggttttttcctagattcaaggatggttcagaatatacaaatcaataaatgtaattcaccacataaacagaattaaaaaacaaaaaccatattcttatgcagtaaaatccagcatctctccatgataaaacctcaacaacctaggcatcagaggaacatacctcaaaatagtaagagtcatttatgacatacccacagccaacatcatcctgaatgagcagaagttgaaagcatttcccctaagaaccagaacaagacaaggatgtccactctcaccattccttttcaacatagtactagaagttctagccaaagcaatcagacaaaagaaataaaagatgtccaaataggcaaagaggaagtcaaattatatgcttgttgatgacatgatcctgtacctaaaaaaaccctgaaagattcccccaaagactcctggacctgagaaacaactccagtaaagtttgaggatagaaaataaatgtacaaaaatcactggcatttctatacaccaataacattcaagctgagagccaaattaagaactaatttacaatagacacacacaaacacacacaccacacacacacaatatctagaattacatttaaccaaggaagggaaagatctctacaaagaactgtaaaacactgatgaaagaattcatagatgacacaaacaaatggaagaaacatcccatgcttgtagattgaaagaatcaacattgttaaatgaccatactgcccaaagcaatctacaacttcaatataattcctatcaaattaccaatgtgattttttttcacagaattagagaagacaattctaatattcatgtggaactacaaaagagcctaaataggccgggcgcggtggctcacgcctgtaatcccagcactttgggaggccgaggcgggcggatcacgaggtcaggagatcgagaccatcctggctaacacggtgaaaccccgtctctactaaaaatacaaaaaattagccgggcgtggtagcgggcacctgtagtcccagctactcgggaggctgaggcaggagaatggcgtgaacccgggaggcagagcttgcagtgagccgagatcgcgccactgcactccagcctgggcgacagagcgagactccgtctcaaaaaaaaaaaaaaaaaaaaaaagagcctaaataggtagagcgatctaagcaaaaggaacaaagccagaggcatcatattacccaacttcagactatactgcaaggctattgtaaccaaaatagcacggaattggtacaaagatagacacatacatcaatggaacaaaatagagaacccagaaataaagctacacacctgctatgaactgatcttcaactgagtcaacaaaaataagcaatagagaaaggataccctattcaataaatggtgctgggaaaactggctagccatatgtagaagaatgaaaatagactcctacctctcactatatacaaaaattaactcaagatggattaaagacttatttaagacctccagctataaaaattctagaagaaaacctaggaaaatatcttttgaacatttaaagaatttatgactaagatcccaaaagcaaatgcaacaaaaacaaaactagacaagtgggatttcattacagagcttctgcacagcaaaagaaacaaacggtaaacaacgtacagaatggaagaaagtatttgcaaactatatatccagtaaaggactgatatccattataaataaggaatttgaatcaatgagaaaaaataactcgattaaaaagtggcaaaggacatgaacagaccttctcaaaagaagacatacgagtggcgaaaaaaggtgaaataacgtgcaacatcactaatcatcagagaaatgaaattgaaaccacagcaagataccatctcatagcagttagatggctgttattaaaaagtaataaaataagacatgttggtgaggatgcagagaaaagggaacgcttatacgctgttggtgggaatgtaaattagtacaatccctatggaaaacattctggagatttctcaaagaactaaaaatagaactaccattcaaaccagcagtctcattactgggtatctgcccaaaggaagagaaatggttttatcataaagacagctgtgcttgcatgtttgttgcatgcagcactattcacaatagcagaggcacagaatcaagtgttcatcaacagtggattagataaaagaaaatgtggtacatatgcaccatggatactacagagccataatcaggaatgaaataatgtcctttacagcaacgtggatgcagctggaggccattatcaagtgaattaatgcagaaacagaaaaataccatatgttctttcttataagtgggagctaaacagtgggtacacatggacgtaaagatggaaacagtagacactagtgactccaaaaggaggctgagggggtagggttgaaaacctacctcctgggtactatgtgcactatttgtgtgatgagttcaacagaagctcagaccccagaattatgcaatgtacccatgtaacaaacctgcgtatgtgccccctgaatctatacttaaaataaatatactcataattctctattaaatataattttcactataaaacaaagttttagttttcttatctctgacttgtgtagtttcagatgagaagtctgttgtaattcttagtgtttctgaataagttctaggaattgttcatcttatagtttcctggcatttgccctttgcctaagacttgtgaggttttgctttacgcatgtgcaaattagtattcaaacaaaaacataagaggatccctatgccaatttctggtgctctctattctctgaatctctcttttctctctatactgccctacaaattctagtcaccttcacctccttgatctgtcgcctcaacttggcaaagtttccatactgtgtttggtgtgaccctttctgcacagtgttctggaaagagcctcctgccagaatggcaggacagttataggacttacctaatttgttttccttctgtctgttgccagtgtctgacaacagtttcttatattttgtccaatttctagttgttactgtaagaggataaatctgatcccaattactctaccatgttagaagcagaagttatattaatttttatttttagagttgcctcaagaactgctgttctaaaataaactgaaccctatttaatatataatggataatactggacagtgaaatgttttttccttaggaaaatctaaacagctgtgggtctgggttaaaacatattaacagccttgctaatgaaatataaaaagtaaaagaagaaacgttaggtgcttccaggacactcatacttgaagtacaggttgaacatcccaaatccaaacatctgaaatctgaaatgctccaaaatatgaaactttttgaatgccagcatgacgctcaaaggaaatgcttattcaagcatttgggatttgggatgctcaactggcacatacataatgcagatattccaaaatctgaaaaaattagaaatgaaacactttttggttacaagcattttggataaaatatactcaagctatagtagatttcatttttcaattggtgaatactgtttggtgcttattatgcgccaggcagtatgcttagacttcaagatgagtaaatacaacaagcattacctaccttcttggagtttatagtctagtgaagaagaggattaattgtaaaaataaacaattagaactctgatgagtacaatgaaagagaagaacttggtgccatgaaagtatataaagatacctgatttaggatggacagacagggaaagcttccctgagaagctggtagctgagctgaaatttgatacttgaaggatgagcaggagctcaatagtaaggagaaggaagtaagttgagtagaacatttgcacagcaatctaggctgagggaaagcacatgcagaagcgatcaggagagagcctggcatatgccaaggaactgagggaaggctaatgcagttggactgcagagagcagtgttttggagggagtggtggaagatgtggcaggagaagtatgcagggcctatatcacacaagactgagtacaagttattcagaatttatttattcattcattcatttattgagacggggtctctgttgcttaggctgcagtgcagtggcgctatcacggctgatcacagcctcaacttcccaggctcaagtgattctcccacctcagcctcccaagtatctgggactacaggcacacaccacctcgcccatccatttttaaaatattttgtagagacaagttctcaccatgttgcccaggctggtcttgaacttcctggtctcaagcagtcctcccacctcagcctccaaaaatgttggaattacagccatgagccaccacacctggccataattttattttttataaaaaaaaaattttacaataaaattcagatttgttcttattgggagaacagtagaagtcattgagtgaggaatcaatgagcagattttaaataagaaaacataattttgttattgtgaagaatggatagaatatggcaaacctgttagggaactattgcagttatccaggaagacatgatggtagcttgaaatgtagtcgtgtgaatggattcaagagagatttagagggaaacagtataatcaacctgttgttgataggaagagtaactcctcagagtagttgtgggtaatggaatacatgtttctaccgtttgctgagacaacaccggaagaggaccagattggtttttggatatgttgaatttgaggtgccttttgaatgtccagatggaaatgtcatgtaggcatttgagtttgaaatcagaagagagatcagaattggaactcacacttgggttttattatattgaggtagtaattgctgtgggtgtgaatgagattagccagagcaaaggaatatagaaagagaagagcagtcctgtgttttgaggaattccccctattgaatatccaggtagaatagtgaatcattaaagaagcctgcaaagaactgatttcagcaaacctaggacagtgaattattaaagaagttactgtgtattgctttcctatggctgctttaacaaattaccagttctactggcttgaaacaacagaagtttattctcacagttctagaggccagaagtctgaactcagtattagtaggctggattcaaggtgtctgtcacgagggccatgctctctccagagtctccaggggagaatctgttcctttcctcttccagcttctgttggctgctggcattccttggcttatctccacatcactccagttactgcctacacggtcagattgcctcctccttttctgtgtgtctaatctccctctgcttcttagacagctgtagtgacatttagggcccacaagataatccaggacaatctcatctcagaatctttaatgacatctgccaaaatttcccataaaagataacattcgcagcttccaaaggttaggacccagtatcttcagggtagcatttttgaacctgccactcaagggaagagaatgcttcaaggattcaattgatcagcaatgtcaggtgtttctgaaagattaaatgtgaatttaaaaagtccaatcagtagcctcagagagtggaagccagattgagaggtgttaagagttaataaggtgttttgtagctagacgttgcaagatttcttgattgctttttctctgtgagatggaattattgaagattgaaattttgaaaagaatggagaaaattttgtgttggagagaatggaaagtaattttaacaaagagggcattattgtatactcattgtatactgttgataccatgcatgaaatgatagctgaatcgtctgtcctcttgtgttactttgtccatttgcacttggatatagctacggagaaagcagcttgctgggttcatctggggttggtattttgcaagacaggaatctaaggagtttgatatgttggtttgcagtagtttgaatcctctactgcttaccccgtgaacatttttggtgtacctccactctgtcccatttagccaggatttacttaaggaatgcaaatgaaatagttggtaaaatagaacaatatcagagtaaacaaagatcacatattttcactcttaattatgggtcccctctgtgaccacaagaagcaactatagttggtcacttctgaaaattgttataatacagtccagatgtgacttagaaagtctagggtaacagatttgctttttctatatgcatttgtaaacctgcacagattttgtcagctacttttgtttttagtgctatttataactccctgttgcctttattcctaaagagctactgctgtataagatggttgccagattggccatctgctgtttcccactagtcatcgatttttcatcaggtacataaccaaagcatttcttcttttcagtccttttggggagtttcacatcagtccactgtatagaagctgatagaatattttggtggtggcattctcagcatacatttctgaactggcagactgttttcttaccaggatctcattgttgatatactgcctagcttcctaatgctgcaagattaatcttcttgagtaatttaaattcaaaatgtattttttaaatatcttctataagcaaggctacaggctgaatacttttagaaatttaaaaaaattaattaaaaattttctaccttccaaatgcatatagttcttggggagacagtgtgtttgtcaatatgcccaaaccatataattagaattacaaagagacaaggaaaggtaaaatgctgtataagaattcaggaattctagataagattgtgatgtgattgtgcatatctcgcattctgtcttcctctttgtccaccgaaatccaggtagagtcagtaaacaaaatctaagtagatgctttctaaaagaaaatcatctaaaacaaagtgatacagaagggttaaaagtttttttaaaaaatccatgaatgcttgaaaaagattgtgcaatttcaaaagaaaccaagaattgtaataatataagatgcggccaaattcaaggcagaaaacattaaacagaaaggatcattttttaatagatcatagtgggagattttaaccattgtctctgagagtaaagtattcggagaataagcaagaccataggagatactaagagatctagataaacttggcaggaacttccagtttcattgcttgacccaatacttctgtgaattacccactttatttctttattgttaaccctctctctcaactattgggtaccttctcaatttggttaatgagtcacttggtgtacagttcttgggttgtttgacattttctggtagaaagtgaatcctaagtattttgtgaaataaatttcaaggttcttgtagagtcataaagaggcaaatgaatgaaatgaattaggcacatttcttttgagtccaagatctaattctgttcacacacacgcacctttgcctatcaagcctaaccatgaagaaaatgatacgtaaacttctaagtgatatggtacacatttctgcttccaaaatgggatagatatacttttcgatagttttacctattattcttgctaagtagagctaaaatccctggacattacatttaaaaacaaacataagaaaacagaaaagtggagagaactgggtggatccgctcaggacccagataatatcacagtaaaagtcctgagttttcttattaccttatgtatttcagaatggtgcagaaaagctggcaatccagaaatgttgggcacagacaaaagccccaggaaaaaaatgatgctctttagctagggaccaggaaaagggtagcctagcaagacagaaaataaccacttcagccaaagaacatagaagagtcaccctgattagcaaagaccaagtgaggacctagactttcacagtgtttaggctgtaacaagacaactcctcactccatagtggcagcagagccaatatgggaagcagtaaccataggcagggagcctgaactcccacgtatgcttaatatgagtcccttcttcccttcagccccaagttctttggtatacaaaagcctgtgggcggcaagccacccaggcaccgaggcaagagacagaggacacgagctgttccagtacaataaaatataaaacaagaatagttataccagatatagatcttagatatgattatatatgaatgtcattaatcattagtttgtagcaattactttttattccaatattatgataatcctcactctgtaatcatagcctaggaaaaaccaggccatacagagataggagctgaggggacatagtgaggtgtgaccagaagacaagagtgcgagccttctgttatgcccggacagggccaccagagggctccttggtctagcagtgacgccagcgtctgggaagatgcccgttaccaggcggatcgtggtccagcagtagcaaaaggtgtcaaggaacaacacccgctacttagcagaccgggaatcgggggggagggtctccctttccccgggggagtttagagaagactttgctcctccacctcttgtggagggcctgacatcagtcaggctcgcctgcagttatccggaggcctaaccgtctccctgtgatgctgtgcttcagtggtcccactcctagtctgccttcatgttccatcctgtacacctggctctgccttccagatagcagtagtaaattagtgaaaatactaatagtccctgatatgcagaaataatggcgtaagctgtctttctctgtctcctctccctctctgcctcggctgccaggcagggaagggccccctgtccagtggacatgtgacccacgtgaccttacctatcattggaggtgactcacattctttaccctgccccttctgcctagtatccaacaaataacagtgcagccagacattcggggccactaccggtctccgcgcattggtggtagtggtcccccgggcccagctgctttttctcttgtctctttgtcttgtgtctttatttctatactctctcgttgccgcacacagggagggacccaccaaccctgtggggctggtccctacaaaagcctagtgagaaacctgcacttccaccccccactaggcattttttccaccagagcaatgtcaaaggaagcttactataatggaatattaaaagtagatccagtcacctaatgtaataacccaaatatccaggtttcaatgaaaaaaacctctcatgccaagaagcaggaaagtgtcagctcaaattagaaaagacagttaatacatgctgacactgaaataacacagatattagaattatttgacaagaatttttttattgtactttaagttttgggatacatgtgcagaatgtgcaggtttgttacataggtatacatgtggcatggtggtttgctgcacccatcatcccgtcatctacattaggtatttctcctaatgctatctctgccctagctccccaccccgcaacaggccccagtgtgtgatgttcccctctctgtgtccatgtgttctcattgttcacctcccacataagaatgagaacatgtggtgtttggttttctattcctatgttagtttgctgagaatgatggtttccagattcatccatgtccctgcaaaggacatgaactcatcctttttgatggctgcgtagtattctatggtatatatgtgccactttttatttatccagtctatcattgatggacatttgggttggttcccagtctttgctgttgtgaacagtgctgcagtaaacatacatgtgcatgtggctttatagtagaatgatttataagcctttgggtatatacccagtaatgggattgctgggtcaaatggtgtttctggttctacatccttgaggaatcaccaactgtcttccacaatagttgaactaatttacactcccactaacagtgtaaaagtgttcctatttctccacatcctctcccgcatctgttgtttcctgactttttaatgtttgccattctaactggcgtgaaatggtatcttgtggttttgatttgcatttctctaatgaccagtgatgatgagcttttcttcatgtgtttgttggctgcataaatgtcttcttttgagaagtgtctgttcatatgtttcacccactttttgatggggttgttttttcttgtaaatttgtttaagttctttgtagattctggatattagccctttgtcagatggatagattgcaaaaattttctcccattctgtaggttgtctattcactctgatgatagtttcttttgctttgcagaagctctttagtttaattagatcccatttgtcaattttggtttttgttgccattgcttttggtgttttagtcatgaaatctttgcccttgcctatgtcctcaatggtattgcctaggttttcttctaggatttttatgtgttatgtcttacatttaagtctttaatccatcctgagttaatttttgtataaggtataaggaaggggtccagtttcagttttctgcatatgactagccagttttcccaacaccatttgttaagtagggaatcctttccccattgcttgcttttgtcaggtttgtcaaagatcagatggttgtagatgtgtggtgttatttctgaggcctctgttctgttccattggtctatatatctgttttggtaccagtaccatgctgttttggttactgtagctttgtagtatagtttgaagtcaggtagtgtgatgcctcgagctttgttctttctgcttaggattgtcttggctatatgggctcttttttgggcatatgcaaagacacacataggctcaaaataaagggatggaggaatatttaccaagcaaatggaaagcaaaaaaaaaaaaaaaaaaaaaaaagcaggggttgcgattctagtctctgataaaacagactttaaaccaacaaagataaaaagacaaagaaggacattatataatggtaaagggatcaatgcaacaagaagagctaactcccctaaatatatatgcacccaatacagaagcacccagattcataaagcaagttcttagagacctacaaagagacttagactcccgtacaataatagtgggcgacttaatacccaactgtcaatatcagacagatcgagacagaaaattaacaaggatatccagtagttaaactcagctctggaccaagtggacctaatagacatcgatagaactctccaccccaaatcaacagaatatacactcttctcagcaccacatcacacttattctaaaattgaccacataattggaagtaaaacactcctcagcaaatgcaaaagagcagaaatcataacagtgtctcagaccacagtgcaaacaaattagaactcaggattaagaaactcgctcaaaaccacacaaatacatggaaaccgaacaacttgctcctgaatgactactgggtaaataatgaaattaaggcagaagtaaataagttctttgaaaccaatgagaacaaagacacaatgtatcagaatctctgggacacagctaaagcagtgtttagaaggaaatttatagcactaaatgcccacaggagaaagcaggaaagatctaaaatcgacaccctaacatcacaattaaaagaactagagaagcaagacgaaacaagttcaaaagctagcagaagacaagaaataactaagatcagagcagaactgaaggagatacagacacggaaaacccctcaaaaaattagtgaatccaggagctggttgtttgaaaagattaacaaaatagactgctagtcagactaataaagaagaaaagataaaagaatcaaatagacaaaataaaaaatgataaaggtgatatcaccactgatcccacagaaatacaaactaccgtcagagaatactataaacacctctatgcaaataaactagaaaatctagaagaaatggggaaattcctggacacatatagcctcccaagactaaaccaggaaaaagttgaatccctgaatagaccaataacaagttctgaaattgaggcagtacttaatagcctgctaaccaaaaaaaagcccaggaccagacggattcacagccgaattctaccagaggtacaaagaggagctggtaccattccttctgaaactactccaaacaatagaaaaagagagacttctccgtaactcattttatgaggccagcattatcctgataccaaaacctggcagagacacaacaaaaaaagaaaatttcaggccagtatccctgatgaacattgatgcgaaaatcctcagtaaaatcctggcaaaccaaatccagcagcacatcaaaaagcttatccaccatgatcaagtctgcttcatccctgggatgcaaggctgtttcaacatatgcaaatcaataaacataatccatcatataaatagaaccaatgacaaaaaccacatgattatctcaatagatgcagaaaaggcctttgacaaaattcaatagcccctcgtgctaaaaactcaacaaactaagtattgatggaacttatctcaaaatagtaaaagctgtttatgacaaacccacagccaatatcatactgaatgggcaaaagctagaagcattccctttgaaaaccagcacaaggcaaggatgtcctctctcactactcctattcagtatagtattggaagttctggccagggcaatcaggcaagagaaataaataagggttattcaaataggaaaataggaagtcaaattgtctctgtttgcagatgacatggttgtatatttagaaaaccccatcgtctcagcccaaaacctccttaagctgattagcaacatcagcaaagtcttagcatacaaaatcaatgtgcaaaaatcacaagcattcccatacaccagtaatagacaaacagagagccaaatcatgagtgaactcccattcacaattggtacaaagagaataaaatacctaggaatacatcttacaagggatgtgaaggacctcttcaaggagaactgccagccactgctcaaggaagtaagaggggacacagacaaatggaaaaacattccatgcttatggatagaagaatcaatatcatgaaaatgaccatactgctctaagtaatttatagattcaatgctatccccatcaagccaccattgactttcttcacagaattagaaaaaacagctttgaattttttttttttttttgagacagagtctcactctgtcacccaggctggagtgcagtggcatgtgatcatagctcacagcaatctcaaactcctgggcttgaatgattgtcccgcctcagcctcctgaggtctcactatggtgcccagtctggtctcaaactgctgggctaagtgatcctcctgccttagcctcccaaagtgttgggattgtacccatgagtcatggcacctcgccctgacacgaattttaaaggagtcatcaagacagtgcttcaacaagcagttatgaacatgcttgaaataaatgaaaaaaaaaaggaaattttcaacatagcaaataaatatgtaaagaaaaaccaattggaaactttataactgaaaaatacagtaaccaaaataaaatcttaatgggtaaaactgtagcgaaactgacacaaaaaaaaagaagacacaaatcatcaggagtaaaataagagatacaggttgagtatccctcatctgagatgcttgggtccaaaaatgtttcggatttcagattttttcagattttggaatatttgctttgtttgagcatcccaaattcaaaaacccaaaatctaaaaatgctccagtgggcatttgctttgagtgtcttgtttgtactcttaaagtttcagattttggagcattttggatttcagattatcagatttgggatgctccaccactctggagcttgtggacatgaaaaggatactatttttaaaaatctacagaaataaatttgacaactttgatgaaataaactaagttttcagaaagtacaacatactgcaagtcactcagtatggcatagataatttgaatagtgctacaacttaatagaactttataattttaaaatgaaaataggcccgaatgatttcattggagaattctagcaaaggcttaaagaagaatttacactatttctgtgtagtctctgccagaaaataagggaatacttcctaattcatttatgaaatcagtattattttgctaccaaaagcaaggacaataccaaaaaaaaaaacctaccaataaagaccaactcctttttaagtatagatgtagataatccttaacaaaatgttaatcagtataatccaacagtatataaatagaattaaacacaatgaccaagtggactttattttgggaatgcaagattgattcaacatttgaaaatctgtcaatgtaatctatcaatgtaaccatattaacaggatcatgaagaaaatatatcaaatgctatagaagcatttgacaaaattcaataccatttatgattaaaactctaagaaaactaggaatagaagaaaacttcctcaactggataaagaatatttatagaaaataaacagcatcatacctgatgaaagactgaatgctttccccttatgattggaaacaaggtgacaaggatgcacacactcacaactcttattcaacaaaatattgggagttccacccagcacagtaaaacaagcggggggaaagccctgacaattggaaaaggagaaatgaaacaccttccttttcgcctgtgacgtgatcatctgtttagaaaatcctaagtaatctacaaaaaatctgtggaactaataatgtagcaggatcacaagatacatttaaaaaacaattgaatttctctacgctagcaatgaacgtgtgaaaaccataattaaaagtgaaatactatttggaattgctaaaaaaaaaagtgaaatacctagatatcagtctaacaagacatgcataggacttgttggatgaaaactattaaatgttgatgaaagaaatcaaagacccaaatgaatggaaagacatactgtgctcatagattggaagactcagcatgttataaatgactattttcctaaaatagatgtaatacaagtttaacaaaatttcagcaggttctttttgtaaatatagacaaaattttcctacgatttatatgaaaagacagaagaaccagagtagctagtttttcatacagttttgaaaaagataaggtgggaggaaacactctatactcaatttcaagacttataaagatagcataatcaagacagtgtagtattggcagacagatagacacataggtcagtggaacagactagaaacccagaaatagctccacacaagtaaagccagttgattttgacagacgtacaaaagagactcagtggaggaaagtggcctgttcaaatggtactggcacagttggatagccataggcaacaaaataaaccttgacctaaaccttttgcaaaaattaactgcaagtggatcatagattctaaatgtaaaccctacaaccataaaacttaaaacatggaaaaaaaaatctctgggacatttgtgattcatttgtatcatggaatcctactcagcaataagaagggaatgtgatgtatatgcaactaatcagagaactcttaaagacattatgctgagtgaagaaaagtcagctcgaaaagtcacatatgtatgactgcatttatagaacattcttgaaacgacaaaattatagacatggaggacaaataacagattagttgttgccagggattagggatggggttatgggaacagagagggaagtgaatgtgactataaagcaggtagtctttgtggtgatggaacagttttgtatcttgattgtgattggtggtagtgacacaaatctgcacctgtgataaagcgatacatagctatacacacacactgtactaatgtcagtttcctagttttgattttatattatagtaagatgtaaccatgggagaaactgggtgcagggtacaggggacctcttttgctatctttggaacttcctttgaatctaaaattatttcaaaattaaaaaaaattttttttaaattatcctagctaaagcatcaagtgaaagttcttaagagaaaaaaagaaaacaagggaagggaaggtacaggatgtctgggaaattgtctgtgacatttaaactggtttttacccagggggcatttgccaaatctggtttcctttcctcagcatcagagagcattgaggaacctgaggaaataataaggtctttctttctgggatgatgaatctgatacgttcttcctcttcaccttaaagctgagactcagctaaactggaaaccaccaccaatcccaccatccttcaggattgcagggaaagttgattttctgcatgcttcttagtttttaatgtgcatcagaatcacatggaggacttgttaaaacaaagattgctgggcaacatccccagagtgtaagattcagtagatctggggtgagacttttaaaatttgtacctctaataagtttccagatgatagtgattttgctggtcgggaaccacactgcaaaaattatttgtatagctaaaaccttgtcggagtgaatatgggggcaagatcactgctgagaattttaagcaaccagctgacccttgtataatttgcagtgcgaatttaacgctgtgtaggtgatctaaaaaaaaaaaaaaattccctaagataatttatccccataatggcagtattcatagactggcagtgagtatccccagactcttgtagaagctaacagaaattctctttggagaaactcatctccatcccagagttgaaagttttcctagaaataaaattctaagtaagtagaacaactgtgatagtcaaaaagaaaaacataaagaaactaagcactgtgagcaggagtcaacagcagacctgctggaaaataggaataggcagctacagaatatgaagtaagtgtttcatatgtttcaacaaaagttgaaaatatgttccaagattcagaaactataaagactattcaaagagattttttaaaaatagctagaatttatacaatggaaaattatagtagttgaaactttattaaaaatcctcaatagggccgggcgtggtggctcacgcctgtaatcccagcactttgggaggccgaggtgggcagatcacgaggtcaggagatcaagaccatcctggctaacacggcgaaaccccatctctactaaaaatacaaaaaattagccgggtgtagtggcgggtgcctgtagtcccagcagctcgggaggctgaggcaggagaatggcgtgaacccaggaggcggagcttgcagtgagccgagattgtgccactgcactccagcctgggtgacagagccagattctgtctcaaaaaaaaaaaaaaaaaaaacctcaatagatgaatttaactgcagattatataaactcaaaaaaggaaataatgaactgaataattactcaacaagcattcaagagaaacagttgaaaagtacgaaagagaacttatatatatttaaaaataaatatttatctgaatggttttctgtaagagagaatggtaaacaacagttaaaagaataatggctaagaattttctgcaacttgtgaacaacactaaactatacattgaagaagcacaggaacctaaggtggttaaataaataaatccttacttagccttgttacaataaaacagcagaacatcaaagacaaagaaaagatctttgacatatctggggaggaagacagatttaccgtgaataaggtcacacccagaagacaggggaacattttcttaaattaaaataaaaatctagaattttatactaagagaataaatccagggaaattcatacgtttcttgcagacaaaaactgagcatttgcaattaggaagtcttcacttgaaatttagaagtgtgtactctaggcatgaagaaagtgactctcagacaggaggccagagatacaagaaagatcaaaaagcataagagtttttgatctttcaaccgtttttgattatattagtagtcatcatagtggatatgaagtggtgccttatggttttgatttgtatttgcctcatggggtaatgatgttgaacatcttgtaacatacttattggctgttttgggtttgtcttttttgttgttgaattgtaagagttctttcctgttttggatacaaggcctttgtcagatacatgagttgcaaatattttctcctcttctgtgggttgtctttccactttcttaataatgtcctctgatgtacaaaagtttttaatattggcaaagtctaattcatctggttttcttttgttgcttgtgcctttgatgtcatatctacaaaactgttgccaaatccagggtctaaaagatttaccctcctatcttttcttctaagtgttttatagttttagttttatattaggtctttgatccattttgagttaatttttgaacatggtataggcaacaggctaatgtattctttgtacatgttggcaatctagttgtctggcaccatttgttgaagatactgttctttccctcttgtcttgacacccttgtcagaaatcgatgaccattgacatatgggtttacttcgggactttctgttctattccattgatctgcatgtctgtccttatgccagtaccatactgtttttattactgttactgtgtagtacgttttgaaatcaaagtatgagtcctccggctttatcttataaaaaacccgacttttggttttgctgattcttcttctgttttgcttcattaatttgtgttctcatctcatcttcattattttcttccttttactatattctttgggttgatattactgctcttttcctaattcaaattattatttattagcttattttatctcttttaaaaatacgcattttaagtgtgtacattttcttcagtatactgcaccagcggatccacaggttttcattttttaagttaatttatctcagttttcatttttagtagttttctgtttataatttgctgttgtaattcagatacatttagttttgtcattttttaaaagcttgttacacatagttttgtaagctgtgatcattttagtgtttaagttctttgcaggtctttttctcttgtctgtgtcaagagtttcttgacaatttggggggctagccctatcagatatcgatatattataaaatgaaaataattaaacattgtgatattggtacaaaggtagaaaatagacagtggaaagaatagagtacccagaaccacccattccctgcctatttgaatactttctatgtgacagaacaccattgcagatcactaaggaaagggcttcaatgacttgtgctaggataatcggacagacacatgaaaaaaaataaattggataccttcctcacatcgtataaaaatcagttccaggttgaataaatacctctatgtaaaagccaacaactgtataaagcttttaataacataaagagcatattatccatgattttaaggctggaaagattcttaatcaagacacagaaagcatgaaaaggattgatcagttcagctacattgttttggaactcatctttgccagaaatctttataaggggagtgagacagcaagcctccaactagagaagatatttgcaacacataattgagaaaggactgttacaaattaaccgggtttggcagcatgcacctgtaatcccactttcttgggaggctgaggcaccagaatcacttgaacctgggagatgtaggttgcagtgagccgagatcgtgtcactgcactccagcctgggctacaaagtgagactctgtctaaaagaaaaaaaaagaagaaggtgtaaagaactcgaacagttgaactagaaagagacttcaaaaagaggaaaactgaaaggaaagtatacagaaaagatgcccagtctccttagtatttaagagaagtgcagactaaaaccaagtgagatattagttacatttaaaagtctgtcaattccatgttggtgttacccctttggaaaattggttttttttatcacctaaaatagttgaacaggtgcttatcctatggcccagcagattaactcgtagataccctagaagttagggtaaataaccctagaaaagcataagcaaatgtgtgggggaggcatctacaagaatgttcatagcaacattttttatcatagcctaaaattggaaacaacctaaataaatatccctcagtagtagattagataaactgtggtatattcatgtagtggaatatcattccataggcccaatttgtgaactacagccacacacactctcacacgcatgtatcacagttataaaatcaggtgaaagaagcaaacgcaaaaggatatgtatgccatgatttcttttatatgaagtttggtaagagccaaaaccgaaaaatatgactgggataaatacttagattgtgaagttacaaagaaaagcaaggcaatgatttccacaaactttaggataaatggtacctcttgggtgtgagaggaggagatgattatggggggaattttaagggattggtaatgggtgatggttacactggtgttcattctttttttaagtgtgtgtatatacagaatacgctttgttatgtaatagtttttgtaagatgcattttttgtacatttctatgccagttatctgtaatcatgatgaagtggttgacttttttttaaaggaaaatataaataaccaaaatcaataaaaaggaaaagacctgattgattaatattatgcaaacagcatcagaccagctacttttatacatgaattctatcgaggaacgtgacccactttttagagttccacttttgtatttccgtacgtctgttgcatattaccccgatcacattaatagggtctccaaattaacacgtctaaaatcagtgtttttatctttttgcttttccagtgtgtcacttgatagtctgtttgttcttggttgactgcccttagttgacttatgactgcctctgtaattatcttataatgatttcattttccttatgttctcagctgttttccacttccctcctcccccaatctcttattgctccacaggacctcatgtccttttctagggtgaaaacagccactgaacatgaattatttcagtttacctttcctaggcttgaatgcttccctgttgctttcagaataatacttatacttttaaaaaaggaaatgtattatagctatcatcactttcacactttaaagcaaataaagtttttaccacttcatactactaacattgctctctcgtactattatacttctctaagttttcctttctaccctgatgaccgttgtgcatttcttcttccatccatgcctttcttctttctttcccctggggcgtagaggggagcttacttataggtcttccctaaggtgctgtccttagtctgcatctttcttcttactaatttgtatgtaaaatgagaatttatgtgacacagtaagtatgttttctacttgggttaataatatcactacgcttcctggcatgcagactgaaatttcttgagttctagcttcttcctcattgcctctatagccagttgactagcaaatttcattgattctttccaaaacttcagaaaattttcctcattttcattgacatgaccacctttatttgccttgcttaatgtcctcagatgtggtttgccagtggtctgtgatgcaaaagtaaattcatcgtacctttttccagctttatttcctgcagtggatcctttatgaaacctgtatgcccagcaaaatggaatatttttctttgacagttgctggttttgcctctgttctttcctctcactattcattcccttcaccatatcccccatcccttctacctcttttctccttacacaatgagtcttagaaagaaagatacggaagtgaaaattacctttcttcaggacagattcttagcctcaaagatatctgtagcatttcatttgtatcttttctgacccttgtttctgccttgctttaaaatgaactttgagtgttttatttctactaactagtttctctatttcttgggatcagggagtcatctttgtgtcccagactcagaagaggaaatcatatactgttcatgtgaattaatggggaacaaatacaaaaaaaccacattttctttttattagcctctattttgggggtggggggtgggaagtgggtaggggtttctaaaatcattaaattttagttaagagcgatcttaccactaatttattccaagaccatagttttatgaacaagaaaaatgtgcctccaaaatttaagtggattccactgtatcacactgctcacataatttgtgatttccaaaattttattagtttttttttttttttttttttttttgagatggagtttcactcttgttgcccaggctggagtgcaataatggcgtgatcttggctcactgcaacctccacctcccgggttcaaacaattctcctgcctcagcctcctgagtagctgggattacaggcgcctgccaccacgcccagctgatttttgtagttttagtatggacggggtttcaccatgttggccaggctggtctcgaactcctgacttcatgatccgcccacttcggcctcccaaagttttgggattacaggcatgaaccaccacacctagcgtggtatttattttttagaaatggggcctcgctgtgttgcccagactggagtgcagtagctattcactggcctgaacataatgcactgcagccttgaactcttggcgtctagccatcctcacgcctcagcctcctgagtactgaaaattttaaggtcattttgccttcagtcccacatgggagcaggagtcctaggtgagctggggttgccataaccataattgaatgtgagtcccctggcagaaaggtaaccttcttttctttatatgagctcatagaaattcatttatctattcctatttctcttttctccccacctttggctttggtagctggagctggtaagaaatctttcttattttctgtaatgtgttttataaattatgtgtggtctaatgattatatggttgtaagaaaaataccataaaggaagagtgtttgtccttagttttcatctttagttatccataaaatctgaactctaccctgaaaaatttgtcgtcattgtatttttcatctttcctcgatatctacttgttagttcaatactatcgtttatcaattttaatgtactgttccaaagaacatatttgttactgttttcatagagaattgagcagtaggacgtttttcttacagaattaaacttacatttttctccatccactagatggctcaagtgcaccactttggcagctcagattgatccttgcttgctttgcttgtagtttctactttgagtactgtttgctttttaaaaactggatgagcccttacctgaacctagctttacatatatgtgatggcagatttcctcgcattttctgattatttacagacttctgaaaagctggtgaagtgttcttcatatccatagtgaaaagtgcattacagtgcttagaagattttgttttttgcttttaagttattttagactttaattcaattgccaataatctatttagatttcttcaaactaggcatgcagttaataattcatccatttcttcctgattcatagtcatttggagtcattttccagcacatggtggtacctcaggagtttttgaggcacacagggctatttgcttcagttctgtagtaatatttatttagtgtttttgtgcttggcattgtatggggcagtggagggaaataccaggatgactaaagaggatattttcatcagcagggagctcactgcgttaattcgtttccttaagtttccttttttattattttttttattttccctgaaagcacacattggtatcttgagtttttgaagccaaataatgagtataatgaaatggctcattagagcttatgtttgtaaccaaccctgaggagaattttgtttttgacattgaccctgttgatattgcctgaaaaaacttaaaaaaaaaaaactgaattctttagaaatattttatgcttatggctttctgttttgagttaagtaaaaaggaaaaggaattaagatttgttgaatgcttatcatgtgccagtttcttacttaatttgatgctctcaataatttggaagacaaatacaaatatctctatttacagatgaagaaactaaggaatcagaagttgcctaggatcaaagaaacagtaagttagagaggcaaactctttgtgatatcaagggttgttttttatttttttgcccaagagaaaataattattttctgaaatggcagaaacatttgtaatatcaactagttggatactttcatatcctaaagacagaaaactccaaacaaaggattgattgcctctcacagttgatctttgagattataaacaaatattcttgccaagctagagcaatcagtcatactggtatctcttttacagatacctttagaatgacagcaaacactataaaattgatttttccagagaaagtgtttgcacctaataatcttatttttcaggaataataactgaattatttcatcagtttgaaaatatagtgtacgacttaaaggagaatggcaagttattgatgtaaatacacattatttacaatattataactagattacattacaaatattgtaacaacaatttgtctttataaaatccccttgatttctctttattgtttaagagtccttgcggctaagctgtgtaaaacaggaaatatggctgtttgccagtgttcttaaggaagcaggagtgaagtaaagcaaacaatacaaaaggggtttgtttaaaggatgtacttaatttctgtggctgtggtatcatttttctggctctgttgtctttgtcctttttcactgcatcagaatacagccattaggtacatatccttcaaagttttaaaagttgaaattgtactttcacaactattaaaacaaaaataaccagtaatgcgaactgaacccaaagatatctaagataaatatcctcccatgactgtaaatttgtatcctccatatccccttagaaattttcgtatgcattgactagatttattgatatttttgttcttttttaatgtattatcagatattgccatcagtactattaccgcatttacacaatgttgccttgtgtggaaattctaaacctttgctaactcttggtaaccaaaataacaataaactagagagattattatcccatcttttgagagaaatgtaaaattattcatttgtctataaagaatctttgacaaaagtattttttaaagcatattgaatcctagccattttattattattagctgtgtacctaaatgatattttagatatgagtataaggaagacaaactttaggttgtcaaagaatgagcatgtctcatgtgttacagtcatggcatgacagttggattacaattatctcttgatgaatcaacttcatctaaaccttaattgcatattaaattatttagtcatttcctgattcagtaatgagaagtcagaatatatagtaatttactgggtagcatgttacatgccatagcttgcggaatgtacttgatcagtaaagtccacaataaatcaaagacaaatgagaaaattcttttagaattcagtgttttttttttccttaatttgaagtcactttaaatgctcttatgtagtaagaaaagaaccctaggtatatttaaatacttaacctgctataactttttgttggaaaggaggtacatttttttttatgagtatttttttcccatgggaaaaaaaataactttggtgatgcagtatgcctttatctgtgtattgttaaaaaataaactaaacaaaaaaaacccctaagaacctttaaacttaacaaagtttatttgagcaggaaaaaggttctagaagcagacagcactctaagatggttcagaatactaccacttacaactggtgagctgttctaataacagggaaaaataggaaatgtcatacagaaattacctgattggtgcagcttggtgtttgccttatttgggcataatctagcagcttttaacctgggattggctgagactcagatgtgtggttataagggtatactcctaagttaggttataacttgtttacacatcaagctagagtacagttaacagtgtatggaggcagctttgggccaaatctgattgaacggtataaaaataagttttgcaaatatttatccttaccacatgagttacatcctaatattctttattctcttctatttcactaaaaaaaattcaaatccaccaaattcatttcatgacccatcggtgtgttggagctcgttagtttggaaaacactgccatatagggttgaaaatttttttttctttttttaccctgttaacaactgactagtctgaaggagctcaaatatttggaaagctttattagtgcagtttagtagctggcttttaaaaaaaaaagttgctttctagaatcctccctgctacataatcaccaaatgttatttcaatattgttttcctaacttgaaaatttaactgaatgactagaaggtgttggaccaagaaatatctgaaataccaagcccacaaaggaaaatttaatattgattgaggtatcatggttatttgtgcacccttaaaattaagccaattttagttgatagaagtttcagctgggtgtagtagcacagcactttgggaggccaaggcaggaggatcacttgaggccaagagtttgagaccagcttgggcaacagaatgagaccccatctatacaattttaaaattaagcaagcttggtggtacacgcctgtagtcctagctattcaggaggctgagatgggaggattgcttaagcccaggagtttggggctgcaagtgagccatgcttgtgccattgcattccagcctgggtggcagagtgagatcttgtttaaaaattaaaaataaataaataaataaatacatatataggtttatatatatatataaatttcaagttaattgtttaaaggatgtcattaaccaaaactaagcatcagtctttggtaatgaaagcattctaaaagtctttcttttagatagattgaaaagtctttatcttgcagacaaagataattttattaatcataagtaacattattatgaaaagtatttgtgaatattaataactcagtttcttcacttatgttgagttgctttacatgttttatctttgcataatctgtaaacttgatgtttcttagttgacagaataagtttacagttagatatataggtaacttttagttcaatattttaaaaattgtgtcatgagaagtataaataaaattcaacgaaagataccatttcttggccttatataatggcatatatttgaacacttggagatagtggaaaagggcatttcacataaggggacagaggcatcaaggcagaagagcttaatatggtccaggaataaaacattcaactggatgggctttgttctaaaggcagtttttgagagaagagagaattaaattaacttatattacaatacctacttgctacaggagataatgggtggatttgaaggcagtgaaattaggcagagagagtagttaaaaaatcattgaaatattttagagaagaaatgagattgaagtaggacagtgtctaaggaaataaaaagtaatttatcaagacagtaaaattaacacaatttggcagctgattagattaattcaaaaatatttgagtgtgtgctgtgcaattctgggaatccagctgtgaacaaaatgcatgctctttacccttacatgtgttttagtccaatgggaagcacagacatttcaattcagggtaatacatgtgctgccatggagaaagacccagtgttgtcttgggagtgagtatactgactgaacttgaagcctcagggatgagtaggtaaagttggggttagagtgtgttacagattcctccctgtcctctccccgcatgttggcttggaggtgaaaagattgtggtacttttaaagcagttaattgtggctggatcctgggattggagagggaggaggatctggtaagagagggccagggccaaatcatccagagtcctgaagttcctggaatcccctagttcttggtccacagccctaatgaagccttggattttatcttaggaacagaaattaaccgtggtacgattttaagcaagggagattcagggtcaaaattgcatgttagaagaattattttagctaagaatgtcttagttataagtcagaaacttaagcaaaagacaaagaaagtgacccagaggattcagcatatgcagaggtaggaagtgcggctggacttcacaaagacttggaaccagacatggttcagtatcagatgcttcctcttctgttgtatcgcatagtgtcttgtctctcatgtctgcttcattgctctgtgtatactgtcttctcttaactatacagctctaacttaacagcctctgaatttctctcccactttcaagtcctctggagagagtctgactggttccttgtcagttgtctacccttggtttaatcagctgtgctaagagggcagggtcatgtagcataaacatggtgcttcaaagccaacccctctcacagttaaggggtatggtgagttgtgggctaggcagaattcttagaaagaaccaacttcagaagatcattttggctgcagaatgaagaattgaggggaagggaactaaaggaaggggacctctttaagagaatacagtaatccaggcagtaggtaatactggcctgaatcaggggtaagtaagaagagaactgatctgtggtagattaaaggttgaatctccagaagtgtatgtagattggatattggagtataaagagtcaaggatagtgtttgtgtttctggcttgaatacctgaatggatgatgatagcaatccctgagctgaagtagcatcgcagcaaatttagtggggattgaagacgaagaatttatttttgtgcacatgcagagtttgagatagcctcgagacatctaagtggtaatgattagtagacccttgaatgtatgcatctatagcagagggaaaagctcaatagtagatacatatttgaaattctttagtgttaagtgataactagagccatgagggtggatgaaattgccatgggagagtgtaacaagacaagagggccaagacagccatgaagagaatctgagggctagcagaggggggaaaatgagcctacagggcagactgggaaggaacagaaaggtgtgagaaaaatccagagtatgcagtgtttttagaaacccaagaaaagtgcttcaggcaggagaatgtggtgaaagtgtcaggtgctgatgagcagcataggaaaaagtcaagttctgtttaggagcaagaagtttgttgatgaccttggtgaatgagcttaatgggattggtgaatatgggaaacaggattgaggactctggcaagtgaagaaatcaaaataacaaatataaacagtgcttgagctataaggagaaagagtgggtagagatgattatgacagcgaagtaaggtttttatgtatttttaaaaatatcagggtcttgatcatatttcagtgctaggagaaagagtgataatcagttgagcaagatcaggagattcttcagagcactattacattgtaatggtgaagagtgaagcaaaagtatgtggaaactagtttagtgaatggaagaagaggtattccctgactttcattttctctaggaagaggttgggattatttacaaataaggtaaagtcgaagacttagggaacaggaggacagtttgtaatagatactgtagaaattagactagtgcaacttgggattttttttttcactagcttaattagaggtcttaaattgaaagcagcaccagtatacatcattgtattggttttgttcagcagtctgattacatgcttatgttgtgctacttcaggttggtacattgagagtaagatattgacatgatggtggtctgactaatggaacatggaatataagctgtggaaggaaagaagtaaaagtgaggactaatagaaaagtgagttgttaaaggcctagaggtcttatgtgcaaagaataagtgagagtaactcagcttgagaggcaggtcctaaaatgagggtaacactaaaggggaatggaccaatagcgtcttaggagattttcctgcatttgcctgcattgctggaagaatggtattgctgataaaagaagtaaacatggaaggaagagcaagttagttttagagggaagaaaagttagatttttactgtttcccctttgagtacctatggatcattcatactgagatgaccaagaggcagttgaaaatataagggagaagccagggctggaaacaaaattgggagattataattgaacccataaatttacaaagaatataaagtggtaaggtctacttagacgctatgtacatttaaggagtaagaaatagagaaaaggtgcttacaagctttgagaatttgtgaagaaactcaaaagaggttgaaagggttgaccaagcagatcaccggatttgtgagtggctttccagagggtttagtggagcatgaaaggagattggaaaggtttgaagagtaactgactttctgaaagtatgtatattgccaatgaatgatgtattattatatgtgatttttaaaatctccccaatatactgatattttaaaaataactttaatttgcttttttattaaaaaaaattattagctatagtctggctttctgaaatagagtatactggtcatttaatttgttaatgcctcaggagtatcatagttatcgattattactcagagctataatatggttgggccctttcaagtgctgttaagaccatttgtttttgtactgaatgccttcagtgtgttgtgtttttcaaggccttctttcccttgtcatttgttgcattaagtcatttgacagtattattcaaggattttttccccccctcgaagcactttactgtgttatagtttataattattggaagcctctgtagatatatctgaggatatgggggttggtggggagtagtgtctcctactataatcatacaagacagaatacttctgtggcctctggtcaccaaaatgtatgaagatttctctccaacagacaccaactgggtgtcttctgattcagttctattctgacattgtcttcctgaaaacagcatcagatcccacaggttgaggtctcagtcccacaacactgcccccctacttcagatgccagtcacaggcataagttgtagccttgtgtctgactgaatagctataaattggggttcccatgatccactccttgggttcgattaattttctagagtggcttacagaactcacagaaatacttacatttacccacttattataaaggatattacagagaatacagatgaacagctagatgaacagacaagatgcataacacaaggagtggagaaggggcatggagttttcatgccttctccagctatgccacgctctgggaacctgcatgtgttaatgttatccagaagcccacaaaacagtcctttagaatttttatggaaacttgtttacttaggcatgattgattaaatcattggccattggtttatcgactcaaccttcagctcctctccccttcctagaggttggagtaggactgaaagtttcaaccctctaattatgattacaaacagaaaggaatagtaccaacatcaaagaccaaaggtagataaatctatgaagatggggagaaaccagcgcaaaaagtctgaaaattccaaaaaccagaacacctcttctcctccaaaggatcacaactcctcaccagcaaggcaacaaaactggatggagaatgagtttgacggattgacagaagtaggcttcagaaggtgggtactaacaaactcctccaagctaaaggagcatattctaacccaatgtaaggaagctaagaacctggaaaaaaggttagacaaattgctaactagaataaccagcttagagaagaatttaaatgacctgatggaactgaaaaacacagcacgagaacttcgtgaagcatacacaagtatcagtagctgaattgatcaagtggaagaaaggatatcagagattgaagattaactcaacgaaataaactaagaagaccagattagagagaaaaaaaaaaagagtgaaaagaaacaaataaagcctccaagaaatatggaactatgtgaaaagacccaatctacgtttgattggtgtacctgaaagtgaccgggagaatggaaccaagttggaaaacactcttcaggatattatccaggagaagttccccaacctagcaaggcagaccaacaacattcaaattcgggaaaatacagagaacaccacaaagacattcctcgagaagagcagccccaagacacataattgccaattcatcaaggttgaaatgaaggaaaaaatcttaagggcagccagagagaaaggtcgggttacccacaaagggaagcccatcagactaacagtgaatctctttggcagaaaccctacaagccagaatagagtgggggctaatattcaacattcttaaagaaaagaattttcaatcgagaatttcatatccagccaaactaagcttaataaactaaggataaataaaatcctttacagacaagcaactgctgagagattttgtcaccaccaggcctgccttacaggagctcctgaaggaagcactaaacatggaaaggaacaactggtactagccactgcaaaaacataccaaattgtaaagaccatcaatgctatgaagaaactgcatcaactaatgggcaaaataaccagctagcatcataatgacaggatcaaattcacacataacaatattaaccttaagggtaaacagactaaatgcctccattaaaagacacagactggcaaattcgttaaagagtcaagacctatcagtgtgctatattcaggagacccatttcacgtgcaaagacacacataagctcaaaataaaggggtggaggaagatttaccaagtaaattgaaagcaaaaaaaaaaaaaaaaaaaaaagccagggttgcaatcctagtctctgataaaagagactttagatcaaaagagacaaaaaagggcattacataatgggaaagagatgaatgaaacatgaagagctaactatcctaaatatatatgcacctaatacagtagcacccagattcataaagcaagttcttaaagacctagagacagactcccacacaataatagtgggagactttaacaccccactgtcaatattagatagatcaacgagacagaaaattaacaatgatatccaggagttgaactcagctctggaccaagcagacctaatagacgcctacagaactctccaccccaaatcaacagaatatatgttctcctcagcaccacatcacacttatactaaaattgaccacataagtggaggtaaaacacttctcagtaaatgcaagagaacagaaatcataacaagtctctcagaccacagtgcagtcaaattagagctcaggattaagaaactcactcaaaaacgcacaactacatggaaactgagcaacctgctcctgaatgactactggataaataacgaaatgaaagcagaaataaagatgttctttgaaaccagtgagaacaaagacacaatgtaggagaatctctgggacacattttaagcagtgcctagaggaagatttatagcactaaatgcccacaagagaaagcaggaaagatccaaaatccgacaccctaacatcacaattaaaagaactagagaagcaagagcaaacaaattcaaaagctagcagaagacaaaaaataactaagatcagagcagaactgaaggagatagagacatgaaaaaccctaaaaaatcaatgaattcaggagctggttttttgaaaagatcaacaaaatagaccgctagccagactaataaagaagaaaagagagaagactcaaatagatacaatagaaaatgataaaggggatatcaccactgatcccacagaaatacaaactaccgtcagagaatactataaacacctctatgcaaataaactagaaaatctagaagaaatggagaaattcctgaacatatacaccctcccaagactaaaccaggaaaaagttgaatccctgaatagaccaataacaagttctgaaattgaggcagtacttaatagcctgctaaccaaaaaaagcccaggaccagatggattcacagttgaattctaccagaggtacaaagaggagctggtaccattccttctgaaactactccaaacaatagaaaaagagggactcctctgtaactcattttatgaggccagaatcatcctgataccaaaacctggcagagacacaataaaaaaacaaaatttcaggccaatatccctgatgaacattgatgtgaaaatcctcaataaactactggcaaaccaaatccagcagcacatcaaaaagcttatccaccatgatcaagtctgcttcatccctgggatgcaaggctggttcaacatatgcaaatcaataaacataatccatcatataaacagaaccaatgacaaaaaccacatgattatctgaatagatgcagaaaagtcctttgacaaaattcaacagcccctcatgctaaatactctcaataaactaggtattgatggaacatatctcaaaataataagagctatttatgacaaacccacagccaatattgtactgattgggcaaaaacgggaagcattccgtttgaaaaccggcacaagacaaggatgcactctctcaccactcctattcaacatagtattggaagttctggccagggcaatcaggcaagagaaagaaataaagggtattcagttaggaaaagtggaattcaaattgtctttgtttgcagatgacatgattgtatatttaaaaaaccccattgtctcagcccaaaatcttaagctgataagcaacatcaacaaagtctcaggatacaaaatcaatgtgcaaaaatcacaaacattcctatacatcaataacagacaaacaaccaaatcatgagtgaactcccattcacagttgctacaaagagagtaaaataaaatacctaggtatgcaacttacaagggatgtgaaggaactcttcaaggagaactacaaagcattgctcaaggaaataagaggggacacaaacaaatggaaaaacattccatgcccatggataggaagaatcagtatcatgaaaatggccatactgcccaaaataatttatagattcattggtatccccatcaaactaccattgactttcttcacagaattagaagaaactactttaaatttcatgtagaaccaaaatagagcccacatagccaagacaatcctaagcaaaaagaacaaaattagaggcatcatgctacctgacttcaaactatactacaaggctacagtaactaaaacagtatggtactgataccaaaacagatatatagaccaatggaacagaacagcagcctcagaaataacaccacacatctacaaccatatgatctttgacaaacctacaaaaacaagcagtggggaaaggattccctgtttaatagatggtgttgggaaaactggctagccatatgcagaaagctgaaaccggattccttccttacaccttatacaaaaattaactcaagatggattaaagacttaaatgtaagacctaaaaccgtaaaaatcctagaggaaaacctaggcgtaccattcaggacataggcatgggcaaagacttcatgactaaatcaccaaaagcaattgcaacaaaagccaaaattgataaatggtatctaattaaagagtttctgcacagcaaaagaaactatcatcagagtgaacaagcagcctacagaatgggagaaaatttttgcagtctatccatctgacaaagcgctaatatccagaatctacaaagaacttaaacaaatttacaagaaaaaaacaaccccatcaaaaagcgggcgaagcatatggagagacacttctcaaaagaagacatttatgcagccaacaaacatgtgaaaaaatgctcatcatcactggtcattagagaaatgcaaatcagaaaccacaatgagataccatctcactccagttagaatggcaatcattaaaaaatcaggaaacagatgctggagaaataggaacacttttgcactgttggtgggagtgtaaattagttcaaccattgtggaagacagtgtggcgattcctcaaggatctagagctagaaatactatttgacccagcaatcccattactggttacatagccaaaggattataaatcattctactataaagacacatgcacatgtatgtttattgtgtcactgtccacaatagcaatgactgggaaccaacccaaatgcccaacagtgatagactggataaagagaatgtggcacatatacaccatggaatactctacagccgtaaaaaggatgagttcatgtcctttgcagggacatggatgaagctggaaaccatgattctcagcaaactaacaaaagaacagaaaaccaaacaccgcatgttgccacttctaagtgggagttgaacaatgagaacacatggacacagggaggggaacatcacacaccagggcctgtcaggggtttgggggagggatagcattaggagaaatacctaatgtagatgacgtgttgatgggtgcagcaaaccaccatggcacatgtatacctatgtaacagacctgcacattctgcacatgtaccccagaacttaaagtataatttaaaaaaaaagaaaaaaatacatttcttggacccatggtagaaagactgatcactatatccagatatccactctgtcactgctcttggtcaattgaacccttcaacttttagttgggtacatggctactttgcggtaagatgtgactgtggtgtgtgagccaagctaatttgcgcagaaggaattgtgtagcttgcaagtcatatcctcagaagagaagatgctcacccttgtcttcttcccacccctcccctggattggagaagagatacgttattgcccaccacatgggcagtaactccctaagaggtgacagagcgataggataaaaggaacctgggtccttggataacttcatgaaatagacttaccttttctctgtggctctcccacttaactctggactattatatgagaaagaaataaactaaattgtttgaaaaataaataaaagatgaatcgggagggagtgactacaaaagttccttatcaggaattctaattggtttacagaaataacattggttaatgattttgtatacattgttaaattataaggtgtgtggcattttatgtcttcttgaggtcagttagtctagagcttgaatagcaagtggcttcaaggggtaattatttacctcaagggagaatgagacatgactgctgttagattttaaatacctttttgggactgataacttaggcccatattccttagataaaaagctttccttcccccctccctccgcaacctttactccttgtggtcaaaaatctttcttctcgaaagcattgttaatcaaaatctaagtgtcatgatgtcccttgtcaccaggaaagctcactcccaggtagtgctgtcccatgttgatgagagaggaggaaatgtctcagtgaggaattttaagagttcccaaaagctgacttaggatggcatcacagagtggcagaaatgagacctcagttaagtcattgatgtatataagtcattgcttgttgaatcatccctagtctttggaatcccatgattttagtttcctccaaagtaaaacaatgagagatacataacattaagaatttgtattgcagaaatataatgcacacattgactacaatcaaaaagtgaatttacatgtcagaatgaaaaaagaacctattcattagggagccaacaacaaaatcttgaaaaaaattaaaacctggttcttctttacagactggttgtagccaggaaataattcaggatttagtccaagtggtagacaaataagaaaactcaaaaacaatggtcaggctagaatctaataacaggtgtgttatagttttcttatgaaacgtgatttttctgtctctagtctcccttttattttttttaaaatatgtaattatatatatataaaatgtatatatttatacttagaaattttttctttcttttagtaacagtctcactctgtcactcaggctgttgtgcagtggcatgattatagctcattgcagccttgaattcctgggctcaagtgatcctccacctcagccatgaatagctgggcttacaggcacaagccactacacccatccagtgcctcttttctaccgaagagaaatagaccaatttatttgcaaaaaaagttttagagttattatacttggcctgatttatttgcataaagtgcagcaagagtagtgattggtcatatagactagttggctttgcctgaaactttttcgtaagaaattttggattagacttttggaaacttctcaagtctaagaagtcaagccagggattaaccatcagcctgtgcctgtaatactttcacagtttggtgaattcttctcttcttgaagtcgcaaaatattttgatattcctgaaactctcagaaagtgacattctttacataccgcaagtcaggattcttgtaagggaacagtatagacaacttattaggtcaggtctttccaaggggctttttattggctctataaagtcaaccttaattcctcaaagtagtttgatcatatgctgttccagttaaaccttggtacaataaccagtgtctccaatgcgtcctcttacaaaacaaagaaaatattgcacttatacaaacaactatattgtcataaatgtcataaaataagaatattcacaaatagttcccaaattctggagaaaatcaggtaaagaggaaggtaaatgtttcacttttccccacaaaagtatactttacctaattgctatgagctataaatcgctcaaaaaaaatgtggactctggcaaaacaaatatgagaagaatcaacaatgtttcaaacaaaaagtgattaaaaaatcatttcagtcctctgtcagttcagtcccatgtaattaattcctgttctgtttcatgttggcttagcaatcttcattaacatcagttttttattcgaattttggaaatttttacctagtccaatggtatcatctccatagttatctgaaacctgtattcaagaatacttgaatatggtacaaactcgtattcaaagtcctttccacgaatttctttgaagacacacactttaggatttggagggaaagaaagctctttaaaaaaacaacaacaacaaaaaaaaaaaacagactagatgcagtggctcacgcctgtaatcctagccctttgggaggctgaggtgagcggatcatgaggtcagtagttcgagaccagcctgaccaacatgatgaaacaccatctttaataaaaatacaaaaattagccaggcatggtggtgcgcacctgtaatcccagctacttgggaggctgaggcaggagaatcacttgaacctgggaggtggatgttgcagtgagccgagatcatgccattgtactccaccctgggcaacagagcgagactccgtctcaaaaaaaagacatgggaataaaacagtttactgcatataccaaggcatatcagatgtttaggaattgcatacaattttggaacacataccaatacaactgtaactcaaagaaagctgaacactgtttcttctctgacagtgctttccatgtttgaaatttgatttgggggaactgtatcagatatcaaaggtttaaaacactagatatggctgggcgtggtggctgacacctgtaatcccagcactttgggaggctgaggcaggcagatcacctgaggtcaggggttcgagaccagcctagctaacatggtgaaaccccatatctactaaaagtacaaaaaaattagccaggcgtggtggcatgcacctgaatgtgagctacttgggaggctgaggcaagagaatcacttgaacccaggaggaggtggttgcagtgagccaagatcacgccagtgcgctccagcatgggcgacagagcaggactcccatctaaaataaataaataaataaatgtaaattaaacagatatcaagataagaaaggtttgaaatgctcagtgttaaaataggatcacaggtcattgtaaaacagtcatttaaacaaagtgataagtcagtgatttttaaaaagtcaaaacctgtgctctttgattagcaggagactccatcaaagagtaagtttgaggagactgtatcaaagagtaagactccatcaaagactcacttttccaaataagacctaataaaggcagcatgagctcaagaaaatctctctctccctccttttcttttgtagtttactcaaaagtaaacaaaaccttttactatctcctgttaacactacctgaaaatcttgttcaaaagagaaaaccgaatcttacctttgtatcagtatattattaatattaaacctaattttaataaaatcttacaataaacagatccatctgatcccagtcagctttgaccagataagattttcatgaatcttttataaactcttacaattttattttttctttctccaagtttttagttttagctatatcatgtaaattttgaaacaatctttaaataacctctaaactaggcaaaattacttttcctttagcaaaactcacaccctcctctcttttttataactttcttcaccaaaaacacatcctactttcattgtatactttgcatacaagagtgtttcccatgtatctagtacttttaattacatatattaactacgattttaactcttagtagttctaatttcaagtgaaaaacctagaaagtaagtagtagttaactggtttatgtctgtatttgtagacaaatcatttcatggtttcatagaaagatatttctataaaatataaatgatgcctacttttttgtttattaacagatctaaagattattaacagatctaaatatatttagcttttttataccatgtaaaaacaaaataccaaattatgtaaactaaactaaaacatatctaataattaatgtttttgtatcttaatgtatgtagaaatgactcaaacattttatgattatctattactttattaaacctaacatgacttcaaaactttaaactactgaaaagaattttgaaactgcaacacagatacccttcctaatgtcttcctcagtcatactgagtcccaactacccacgtggcacccaagtatgattatgaaggggcagggcctatctgagtcctgattttacacacccataatggagcccaggacagaggacagaactgtgaagataatgtctgactcttcccaccatagccaggagacaacagccaggccagaggaagtaccacatatgtctgcagtcctcacttgttagagcccagaatctaatgagtctaatacataagctcacagacaagtcaaataagcatcaaacttatcacagaagcaatagttttatgagcttcagacatccagtagagaaagcctaaacctttctgaccagcagacccaggcaaaaatgtctgattatgtttaaaactgacaagtctgaagacattctaattttattttaccaacaattaaaaattttattttttaattttattttttattttttatttattaattttatttctcaaagattactaaagtcacattaacttgaaaaatatttgggattaagctgtgagcattaatttgtcagtttgataccatgtaaacaatatacaaacagatctgtacacatatatacataaaaatacaaacataagtgaagatttcatagctttgatataaaaattctagccatgagagaggtaaaactcgctattttaaaaggacattggattcaaagttcataaatagaacaagttcaagtttattgtatatgcctgaagcccttaccaagttttaaataacaagtagcaaatttatatttcaagcacagagaatttaagctttccaaaaggccaattcaattttatgttatctttggcaaaaatcatgttaacagaatccaaaagagtaaaacataaaggcctttcttctacaaaaaagaaaatattttatatatttttttatatattatatatctttatatatacttatatataatatatattatacatatgactcaggctagctatatatatatacagctgtgtgtatatatacatatatacacattcaggctggctatgtgtatatatatagctatgtgtatatatatatgtgtatatatatagctatgtgtatatatatatgtatatatatatagctagcctgaatgtcagcttttaattaagctaatttctggctatagacctctttcaaagaaaaaaaatattttcaagtttcttaacagattttagctggaataaacagccaatattcctggcttttgactttttttttctttttaaccaagggtacctttccaagtgactcgccaaaaccaataagccttaagaaaaatttttatgacttgaccaaggatgcacaagccatctccaaagaggtgcaaagcaagccctcacaagatccagaaccaccccaaagacagtttaaataatgaaagtcttggtagccacaaataaggtgcaaatccacatttttgcttgactgtactctctagggtttcagctgaccgcagacagaagaagacaggaaatcaaaagctgttcatggaagggaaaaggatcagtaacaaatgggtaccctaaagggtcaagagtcatattaatattgtaataattgaaaatattcaaattcttgtaaatgtttctctcctaagctaaagatattaaccaaagaaaggaattttttgttgttctaaagaattttaactctgttttagatcttatctcagcggaatgctgcttggctaattccctgcatgttaacatttcaaacacatgataagatttatctctccaagggactgtgaactccagctgggcattaaaggatatcatcagtgccattcattagtcctggttttgaaaaaaaaattgttagatatgtatttttataatctcagtagtttcattctcattttgtagttgcactgtttgctccttttgttccaaatttaaatacatttctctcttttagactattaattttccagttacccattttattgccctaagtagttgttaggttcttctaaagggatgacacttaacatgaaatatgtagaaaaaatatataactcaaaagtccagagctgaaatccaaggaaggaggatgtaggtaaaagccagttaagacaagatggcctggcccggtgccgtgtctcatgcctgcaatcccagcactttgggaggccaaggcaggtggatcacttgaggtcagtgagactagcctggccaacatgatgagatcccgtctctactaaaaatacaaaaattaaccgggtgtggtagcgggcacctgtaatcccagctgcgtgggaggctgaggcagaagaatcgcttgagcccgagaatcagaggttgcagtgagccgagatcacgctactgcactccagcctgggcgacagagcgagacagtgtcaaaaaataaaaagacaagatggcctgaaaagcaccttcaccaaagacttacgtaaatgtaagccaatggtaagtttctagtgactcagcactccctctccaggtacagtgaggtaaagacccttacaaatgaagatttcttttgtagatgtaaatttcttttataaatagccaactaaatgacagaaagctgtattttggacactgattttgttgaatgggtggtctttttatgttcacttttgttagcttaaaaattactgagttcagctgggaaagcccattaaggaaaagggcaaaaaaagcataatctatgtgtggactcagcatggatagctctgataaagaagcaagcctgaagggttacccctaggttaaagacctcttctaaaaaagaagggtttgaaagaacagcccaaataaaatgtacaccttcaaccaaagagtggtataggtccagattattagtaggacttttgtccaataatttatcttggaattggaagaacatgagaggttcatagttggccaggtgccaagtccaggaatggctaagggtggcttactgtgaatcctgctcacagtgccagaaatgtcaacctaaagggaagaaactgaggcatagttaatacagataatttatttgggccaaggttgaggactgcagcctaggacacacttccaagtggtcttggggagtgctccagagaacagaagagtgactcatatttttagagaaaaaaaggatgaatcaggaaagggattgattgcaaaaaggtattcctcaggaattcttgttggtttacagaaataacattggttatttattgtctatacattgttgaactatagtgtatatggcattttatgactacttggggtcagttagtctagagcttccatagcatgtggcttcaagaggtaattatttagctcaaggggtagtgagacatgactactgtacatttaaaatgcctctctgggcctgataatttaaaggggctcgaattccatagagcaaaagttttttttgttttgtttttcataaccctcatgtttagttaacattgctgacattgatgaatcaaaaaacccaaaccacaaaaaaacaagccatttttattatcacttctgctacctagcatgtcaggcagtcatgttatgtttaaattgccttcaaatggtttcagtaacttttcccatatgtatgttattgaaccactccagaaaatcttaaatcccttttgtagaggaagagatgattagacgagaaatacttagtgtctgccacagatttatacagaaaaaaatttttgtttttagtttctggtctttgttgttactttgttggtagtaaaaaatgagtttttttttacaggctttaggccttatccagtgaaggacaacttgaagatgagatagagcataaaattcaagctatttctggagattgatacaggttcattagctggacaattaaactttttacttgtcttgcaagtcttcaacttagatttgtcatatttggttatcataatcaaatggaaatagtagtttttgccccatcttgctgagcttttagattttgagatcatttgtaacatactctgaaattcagtgaattttatttttttctgctgggggcaggcacatttaattacagaaagccatttgccatggaatctttttttctaaaaactacctagcgttaaaaaaaatctgatcataattacgttgctagcaagataaactagcaatacgtatatgtggtatcaactaatatgaaaaaaattatctgtaaaatgcatctgggacacttctcatttgctattcttaatttgcagttttaggaattgtctcgtggtggttgaatgtgatcagcattttcttttatgagcctgggagtcttattagtgaaagatttggcaaaagttagaagaaaatgtcaggcatttgggtcttctcaaggaatgagatttttcagtatgtaaccaatttttttggataggcaaagatttaacccaagtagtacactgtacaaaggtgcctttaaagctcagcattctttcttgtgtaaaacctcataaaaattttatggaaatttatgggtatcaatttttcttagatttaaacttaaaatagcttttgagtaccttgggaaatagtatattcttacaaaatagatgacctatttattcagttgaatgtccttgtgaaaattgacgttgctttactgacactaataatctacatgcagttgagcaagcccagaagccaactttggaatattttgaaatgtttaccattttgagtacaaagtaattttagaatcttggataccagctcactgaagtgttatggcaatatcatacccatatcatttccgttacttatatttgttattgtttaaacagtacccaaaaatggccaggcacggtggctcacatctgtaatcccattactttcggaggccaaggcaggaggattgcttgagaccaaggagttcaaggccagtgggccatatagcaagacctcatctccattgaaatatatatattttaaagtagccagaaacatgtacttactttactgccaaggatatggctgtaaagtctcgagatctttaataaataacttgaatgtctgaatgacttggaaacaagttctgaattagcttactgatttcatgtgtctggcgctatttagctaaatccaccctcctcaaaatgtagaaattgttaagggacagtttcttgttgagacagtttctgtcttagcatcattttgtggttagaatgtagtaaacctactcaaataagctcaattaagaattaaatctattttatgaataggtctttaaaaacccaattgcagaactgcaaaccaggcctctttctcccctttgtgggtgggggtcagattctcctagaagagagggcaaactagatatgattagtatacctgctagaaagaacaattaagtggccagggcaaacaaagttgtctcttggctgtaataatttttttctggactcatgggcaactaaagaaacatgctaattatactgatgcttaaaggatttgccctctattacggagggtctgtgggagtagaactgtaacctcttctttataagcgagtagtacagaaaagggagaaggagaaagaaaaatcttaaatatggaggggaatcatctggaaagagctcagattaatttttataaaattgtgtaagattttataagattatatatttttataagattataacctcttcctggaagcctcatttttaaactgcttatggtagtgacattttattatacatgaatttaacttttgaatatccagctgtacctgtcttgacagataaaatgacagtttcagtagtacagacaattctgcccatcataggaagcttatgcccttgcagatgagaatctgctgttctctcttagtttgtacatgtctcccgtcgggtgagcatgtcatatgtagtgtaaatactttaaataaaatcatggccctgaatgttattgtactaaatgttacattatgatttaaggagattttcggggtaattttgactatgtcagttttgtggattatttggaagagtggaattttgtgcactctgggcttgagtctaaagttagtgtgtaaagccaaagtcagaatcacccttgaaagttccttaactcataaaagccaatatgaaatcttttgtgtacatatacactcttgagcattaattcttacacacatttaaattggagagtgactaagctagactgaaaggcaaaaggaaagtatacaggtgttgtatattcattcagctttaaacatggtataggtagggaattctaaaatgttccttcttgcctgccagctttacttcattttgttttaataataaattctagaatcttaattcttactaattgtgtatttgttgtgagaatttcaggagctcgttagcctcacctttctgtgagatagcttctgaaatcagttggctaaattctaaggttagccattaagtaggtttatgataaaactttgttttattgtagttttcattatttcccttttcttttgctttggtattttagtaacatcacttttaagatgttactcatctcaaaggaggcaaaggaagagatttggtatcaagtccttcattcaactaaagtagaaagagagggaagtagtatgcccctctaggctggtggttgctgtgggaatcaatggaaaaacccctttaagaggataaaaatgggacagttaactggaaacttaccaatgagacattctctttctagagctttttcttttctagcatgttccccccagttttaagaagataacccacactcttatctgtttcttcagtatataatctcaattgtgagattacaaaataatttctctttaataatatgcccaggtgagaatgggagtaaaattctggttttctttatttggtgctagtgtcagcagtgactgaaacataggctgtctcagtctgggccctgtagtacatgctcagacctaggctggcttactcttcatatggctctactaccttagtatagaggaggaaccataaagtccaagattgggcacttcattcacaccacttagtaggcagtctcctaaggaaagaagaaaagcgtatgtccggagagacataaatggctagtcagccatagtttcttggggggaaaggaggaaggggagagtaccctaggatgcaccctatatttcacatattgtttctactacttttggttaaattgtagacaagtctgttgttggaataggccttcttagtgcaggacatagtggtatttctatattaattacttaaaatgtagttgaaaaatgaactttgagaatacctagaactgaaatagatgcatttgtatggtggcagctgagatctgatctaaaggccagttgagggctaataaggagtgaggttaaatttaagcttattactcttttaggaaaatgatgtgagttagggttgaggccaagaaattcttactatattctgaaagtagtgagacttcattcgttagagctaacctcatagtgctcactatgagcactcaccttaaaggttattatctgcctcttgaagaagcagttactcagcggatcctgtaacatgtggttctgccactttgtccataactgattagaccagggcaagcctctggctcaaggctaatggcttatgaagtggcctggtatgaaaactgcataaacagcaataataagattaatcatctttctctttctctttctctcctgtatactactccttgagaggagaaagacaggcaattcataatgggaatttaaaataacagtttgttcacttgttcattggttcattcaacacttttttgaatgtctgttgttagccaggtactactcaaggcactggtgatttattcatgaacagaacaaaattcatgctttcatggaacttgggtttgagtgggacagataataaccatgtactagaatgttagcaatggtaagtgatatgaagaaaaatgaagtgggttgaggggagagagtgtgcttaaaggggaatttaggtaggctagtcaagtaaggcatctctgaggagctgtattaagagatttattatacggaattagttcatgtgggtatggaggttcataggtcccaagatctgcagcttgcaagctgaagaccctggataactgatggtgtagcaccagtttgagtccaaaggcctgagaaccagaacaccaaatgtagtttcagtccaaaggccagtaggctcaagatctaggaagagctgatgtttcagtttgagtctaaaggcaggaaaacaccaatgtccaagctcaaggcaggcaggaagagttcccacttattcagcatttttgttttattcaggccttctactgattggatgaggcccacccacatcacagagtgcagtcagctttactcagtctgtttatttatataaatgttaaagttatccaaaacaccttcacagaaacacccagaataatgtttaaccaaatatatgggcaccctgtgtcctaggcaagttgatgcataaaattaactgtcatagataggtctattggtagccaaagaaccaggttaagtaaaaatagataggctctaagttacctcagtgacttattgccaggattgcctgatgattacagctgtcttaaattctgaaccttgttgtattacctgaattattttccagggtctctaaagtctggctatatggttgcattgaacttactcttttctccttaagtatgttttatgtaactagtttaacctgtgtgtttctacattcaggcttgacagcctagccattttatggacggggcggagcgggggtggtcagcctgatatataaagatatcacagaaataaaccttgagtcataaaaacctaatatagcccccccctttactaatgaagagaaacattggtaaagacacatgaaacaatttattaagtaatttgttactttaaaaagatttacattttggttaacttttttagcagttgtttgttctaactctgtgaagagcctgttttggaaatctgaaaatgtaggagatgcagctattgtcctcagaaagaccatagtctgataataaaatctgcataagtaaatatacagcaaagtagtttagatgagaatttaggttagagctggtttgaatggaaaaggcttatgaagatcacatttaagctagtcttagacaaaatttggatagatacaaaagagtgttaaaaatatttcatgaaagggaaagggaaatgaacaaatgagatatatcagagtttgggggatggtagtttagctgtgttgacatggttgtagtcttcttgctgtaggagtagtaacaggtgagatttgaaagttaaagccgaacctcagtatttccatacttttggttgcacattaattcttttgagcctcagattattccatctgttaactgggataataatgccaatatttgttcatatgttttaatcagttacatctaaattctataacaagagttcctttgtttttaatctccgaagccttctaagggaaatgagtcatcagaaaccatgccatttccttctcacacatactcttgctgttcaagcttcatgatggagagatcagtatatcaaatgcatcctccataaatctcaccagtatccttaatgcccttatcttggtgaatgtggaaaaactcaaagtgctttttttctgttctctcaacacaacaatcacagaagacttatgtgatcaaatgttgcatagggggagttccccacacaccaagcaagtgatcagttttgcagcagatgcctgctaagtgtcttccaattccattctgacactagttacctggagatagcatgagatcccacaggtcgagggcccagtcccttcccaccgccaccagataccagtctcaagtctggaacttctgactggctccaagttgaggttcccatgcccctctctttgggttagattaatttgctagagcagctttacaaaactgagggaaacacctttaccagtttattataaaggatattacaaaggatgcagataatgagatgcatagggtaaggtatgggggaaggaacacagagcttccagaccttcccagggcacgccatcttccagaatcctccacgtgttcagctatccgaaagttccctgaaccctgtcctcttgagcctttcatggagatttattggataggcatgattgacaaccatgtggaaatgggattggacaaaaagggtataatctaatactaacaggccgagtggagaaacccacaagcctgtctgtccaaattcttcttagcctttctgtgcagcattcctttctcaagggtgtgggacaggaccacttctgaaatgagagtcttatgacctgcagtcagaaaggcaggggaagattagactcttggcttgagctggtgaaaggaggatgggaaaatcagagagagagattctgttttctgaggcctggagcaccccaacatcataaccaaagtctgtaacaaggtatatgggagttaagagccgggagctgtggatgaaaacctatatatatgttccctatatatacaatacatagaattatatatatgttattatctaatatgtaatagatatataatatcacacttggaaattgcactttgtctcagtcttttgatgatacttttttatgatagtgacacactaatatctccatccgtatggccacacatgtgctctggatcccattcttttcttcctttttggaaataatatgctatctgagaaacctattttctttctcattcacccattctcactcttcctctctttattggatcctttttgttagcatataaacatgttcaggttgtctctatgttatatgtgttatactatgctatgtcatatataatatataatctaattatcctcccttgaccatttactcctctttatctatttcatctttggtcttctttgttaaacttctctaaagaagtagctatatccagtttccttataaatttcccagttacatggcagctcattttaatctagcttctactgcgttcgctctactcaaatggcttatttgacacctctgttacaatcaatgctattagccattttgttctttaaaacactctcttcctttggcttctccagtatgttcttgttttctgtctaggtctctggctgcatcttctgtggcttccttgtcagctcatctttctccagttgctcattaaatgtggttgttataaagctgaatcttaggtgtctttttacttaacgactactcttgaataacttgtctctcattgctccagtaacaatgacaactcctgcatttatctttcaccgagactactcatctgggatccagttctgtatctagataccaaattgatatttccatttgaatgtcttaaagttatctcagactcaacaggtttaagacttacaacttctcttcctccatattctctttatcttcaagattatttttttggactcattgtagtccaaaatttgaaggactcaaattctctaccgcttacattgtaaccatagtcaattaatcattctaagattcagtttcataatctgtaagatggaaaaaatgtagtacctttcctaacataaggaaacatcagacaaaatgtgaatatgggatgtaataccacggactagatttaccctctagctgtaaacaaatagaaaaccctcctagggttgttttcagtattaaaatagtatttacaaagcacttggaacaggaccccatgtaaagtaagatttttttaaagtgtctgctttattgttgaatatggatatgaagttgtcagatgaagcttgcaatgatgcttaaatgcttatattataaaaagcagttctcaaatcagtacttttaagattgcattttaagaaaccaaaagaaagaatagctccaaaacaagcaatgagaagaaaataaagataaaataggaagcattgaaatataaaagtgtaaaacattagagaaaagtaagagaaattaaaatcttgtttttttgaaaagatcactaatagtgataaaattctagccagactgattagaaaaaagaagacacaaatgagattaataggaatgaaagaggagagatgagtatagattctgtagacattaaattggacaacttagattattaaatgagcaatttccttgaaaaacacaaactaacaaagcctgtttaagaagaaatagttgccaaacagccctatgtttataagagaatgtagatttataattaaaacattccctcaaaaagaaaacaactcatcatagaagacttcactgagatagtctatgaaacatttaaagatgagtatcatttccatacactctttctgaaaataagagggaacactttgcaactcattttatgtccgcattactctaatatgaaagaaaactacagtccagtattccttataaaatagatggaaaaatcttcaatgaaattttagctagctgaatcaatacataaaaaggataatattttatgaccaagcgggatttattccatgaatgcaagggtggtttaacatttgaaaatcagtgtaattcggcatatgaaccaactaagaaagaaaactatatgattatttcagtatattcagaaaagtcatttaacagaattagtaccattaatgataaaaactctcaaactaggatttaaagggaactttctcaacctgtctgtcaaaggacaactagtaaaatcctataatatatatatcatgcttagtgatgaaagactgaatgctttctctcttaagatcataaacaggcaccacttctattcggcattgtatggaaattatagttagggcagtggagcaagaaaaagaattcaaaggcattcaaattggaaatgaagaaataaattgcttttgtatacagaaaatcccaatacacaaaaaaagcctactaagacgaataagtgagcctattacaaaatcattatacaaaaattcattgcatttctacatactagtaatgggtaattggaaatctaaatacaaacaaattaaaataaaaatattagcattcaaaatcttaatgcttatggagaagttaaacaaaattatgtaaagcctgtatattagaaattatacaggcctatgggaacaagtgtcatgtccgtgaatcaaaaaactcaaaattactataataccatttctccccaaattgatgtataccatcaatgcaattctagtcaatatctttacaggccttttttgtaaaaattgacaagcttagttctgatatttatataaaaatacaaaggacctagaatagctgacaattttaaaaaagaacaaagtttaatgacttaaattgcctgattttcacacttactagaaagctacattactcaagacagtgtggtattggccgaaggataaacatattattaatggtatagaaaatagttcagaaataggcccagaaacatatattttatcttattttcagcaaaactgctaaggcaattcagtggaggaaactggtaatctttttaacaaatgatttttggacaattggacatctgaatgcaaaacaatgaatcttaacctttaagtgggcaatgatttcttagacatacagaaccaaactatgaaagaaaaaataaaccagctgtacatcatccaaattaaaaacttttgatcttcaaaaatcactgttaacacaattcctatcaaaatcttagcattattttttgtagacatggacaaatttattctaaaatgtatatagaattatgaagtaactggaaacaattttgagtaagaatagagctgaaaaaaatcacaccacttgattctaactaagacttaacatacagcattatactcaggacactgtggtattgatcaaaagacagatcagtgaaacagaattaaaagtccagaagtagacccgtacaagtagagccaactgaagtttgacaaagatgcaaaagtaattcagtggggagaaatgatgctttttgcaacaaatggtattagaataattagataataaccaaagaaataaactttgacttaaaactcttatacaacagttatcatagatctaaatgtaaagtgtgaactataaaacttttataaggaaacaaaagagaagatctttttgatctagggccaggtaaacatttcttgtaccaaatccataaaggagaaaaaaataatgacttgggcttcatcaaaattaaaaacttttactctgtgaaagacactgttaagagcataaaaaggcaagccacagactggaagaaaatacttggaaatcgcatgtctgataaagaatgtgtatccagaatatattttaaaagtctctaaactcaacagtaggaaataagacaatgcaattagaaaatgagtaaaacactgaacagacacttcaccaaagagtatatagatgacaaagaagcacatgaaaagatgctcaacatgattagctactaggaaaatgcaaatttaaagccatgatgagatatgacacaggtactagaatggctaaaataaaaagtactggcaaaacgaagagttggtaagaatgtagaggaactagatctttcacacattgctggtggaagtgcaaaatgatacagcactctggaaaacagtttgccggtttcttataaaattgaacatggagttaccatatcttactcctggatatttaccctaaagaattgaaaacttatattcacacaaaaacatgtacacaaagccttagaacagctttgtcatagccagcaagagatgagtagataacaaattgtcatacattcatacaatgaataatattcagtaagaaaaagagcaagctattgatataccaacaccttggagaatcttaagggcattatactgagtgaaatagctattcagttcttttccctgttataaaaatacggctgtcttcttatgagttttaagcctatatacattccagatacacatcctttgtcagatgttttgcaactattttttcccagtctgtggcttgcccttccattttcttaacagtgtctttttattttgaaataattttaggctcacatagaagttacaaaatattacagtttctgggtacctttcacccagcaacagcatttgacaaaccatagtacaactatcaaaatgaggaaactaacactggcataaaactattaaccaaactagaaactttcctcagatttcaaaagatttaaaagattacttatggtaattttaatttgtataacttttttttttttgagacagtctcactctgttgcccaggatagcatgcagtagtgctatcatagctcactgtagcctctgactcctgggctgaagtgatccttctgcctcagcctcccaaatagctaggactataggtgtgcactactactgtggcagattttttttttctttcattttttatagagatgggggtctctctatgttgcctaggctggtctcgaactcctgggctcaaggagtccttctgtcttggccttccaaagtgccaggattatagatatgagccactactactaacctataactttttaaatgaaaaaaatgatagtgacaaagaacagattagtagttgccgcagatagacttgggaggagtatgtgattataaagggatggcatgaagatgtttctttgaggtgatggaatagttcagtattctttttttctttttttgagacagagtctcattctgtcacccaggctggagtgcagtggtacgatcttggctcactgcaaccttcgtctccagggttcaagcaattctcctgcctcagcctcccaagtagctgggactacaggcatatgccaccacgcccagctaatttttgtgtttttagtacagacagggtttcaccatgttagccaggctggtattgaactcctgacctcaagtgatctgccctcctcagcctcccaaagtgctaggattgcaggagtgagccactgtaccaggccggaatagttcagtattctgattgtagtggaggttatactaatataaagtatgtgataaatttgtatagaactatacacacacagggcatgtaaaaactggtaaaaactggtaaaatctgaggaaagtttctagtttgattaatagttttataccagtgttagtttcctcatttggatagttgtactatggtttgtcagatgttgttgctgggtgaaaggtacccagaaactgtaatatttttgtaacttctatgtgagtctgaaattatttcaaaataaaaagacactgttaagaaaatggaaaggcaagccacagactgggaaaaaatagttgcaaaacatctgacaaaggatgtgtatctagaatgtatagtcttaaaactcttaagaagacagccgtatttttacaatagggaaaagaactgaatagctctttcaccaaaaataattacataaatggcatataagcccatgaaaaggtgctcaccttcattagttattaggaaatgtaaatgtaaaccaccatgaaataccactgtacacccactagtatagataaaattaaatggcaatccgaagaatgtggaacaactggacctctcacatgttgctggtgcaaatgaaaaatgatatggcctctttgcaagacagtttgacaatttcttaaaaatgtagggctcagcaattccactcctagataattaacccaagattaatgaagaaaaagtgaaattcataccagcatcatttataataaccctaaaactgtaaacagttgaaatgtccaagtggtacatccacacaatgaaatttattccctagtaaaaggactccagcatggatgaatctcaaaatcattagagcaaatgaaagacgccaaacaaaaattacatgctgtgtgatttcatttatatgcagatctagaaaaggcacaataaccaattcagtggttgctaggagttggggggcaaggggtagagagtggagattgaccatatagggaatgtattgaagtaatgggaatgttttatatcatgattttcctgatgatggttacgtaattgtatacattaatcgaaactcatcaaattgtacagttggtacaatttttaggtcctttgcattcgctttgtttttttctgcctagaaagctctctcctctccctgtctggttgactcatattcagtgttcagatcttgcttaaacgtcatgttgtcaggagtatctgttcctgagcccagactggcataggcttctttgacatcctgccgctttccttcattgtccttaccacagctgtagtttcagtcaggcaggtagccatcagcttaaggtctctttttctgtcctagctgcaacactgtgaggagccagatgctgattaccatcttgttaacagtacgtagcatggtgcttaaatcaggtttgaatattgcatgactgagtataagtgagtagagaattgtgtgtcttctgttcttgtaagtggcagctgtggcttctgccaagggtactactagctggggctgcctgcttaaccttggagcctgtctgcctgcctctgccctgctcctggggagttgtgactatccatgctcatctgcctgccatagcctttgttcagacttcttgtcaccgtgaatcccactcctgtggccgggccaccctgttgtgagaacagaaaggagcttttccttgctgttattcttttagcagaaaaggaaacctgccctactgcatgcatgttcctggatctactcaagctttttctttttttccagcaagtggagaaactctgaaacacagtgttttgttacctgctttggtaacaatatgttacctcctgtgaagcaccagagtacccctttgtctcctgattatcttaatctttttgagagagacatatgactcctccaagtaaggttaggaatcctaatctgcaggtagtttgaatgcttgggtggaaggtttaaccttcccaaaggtgaaaacaccatcaactttgtgctcagcctctgctcatatttgcagattatcagagatcactattactgtctccatgtcccccgctgacccagtttccaggataaatgtgtagaataattaataaagggcgtgacagccaacactcctcttccactcttcccacttctcttcttccttatttcactactgtagtaggtaagagggaattcaggttatggtaggaaaatgattaggatgaacaatccctgtatgtgagcattgtgtgaacatagctcagtgtttaaatcattaccaaagctcctttctttattatgggctgtccacttaagaagaatttatgagtcttgtcatttcagacagtcttccctggagcactacatgactagtccagttagtgattttagaaatgtttctctggaccttttaaaatgtatccaagtctaattcctcatttgtttctagtttatttgtcctcggttttacagcttacatagtttggagtttcctgtttagttttgtttatttttaactcctttaggcctaagactcttcattgtttctctttcatctgagtcattataatagtctctcaaaagttcatattccactcttgctccccctttctcctgcagtacaatctacatgtcgcagccaaggatcaggtcaaggcattctcatgctctctccagtggctcaccttcttacctagtttgtgatctggccccaggacatgcagactgcctagtaggcaattaatatctgctgaattaattctttgtattgtaagtcatatcagggtttcttgggggttagcattatcttaaaaccacaaaaaacagtaactttagacctaattggtttcatgacttattgaggaggcgaggaataggttaaagctgctttgcatacattttggaatagtctcttttgtctagtaaggatggataataagtttgttaataaccagtattcacatgggtagaaaaagactgtcttgatttttaatcctacaagtagtaaaggaatggtagtcagaagttgaatcgtacttttaatgcctcaggcaggatagaatagtactgttttgttttgtatcccaatatgctaactacttctctctctctcctttctgttttgcttctcatccttacacccattacaatctcagtatgtgtgttacaccaggagtttgccttggcaggtcagaggatctgtcacagtgaaggcactgtggtgccacttatttacatttgttgttccctccacttggcactaaatgagacttaaccatttttgaatcaaagtttataaatttcttacaaaaaattaaggtttttattctctataataagcacatgagaaagactggttttaaattttaaactgtggagtgacgtaaaaacatgtttaattttaattatttgctttcttttgttcatcttctagtaagttattcatgtattaatactggtaacttctagattggaggaatgatttatccttatgtttcttttaaaaaaaaaactatcagtcattcatatggcatatgctaatcaaggctctgtggtatttttttttcttatgttttttaatgaagcagctcttttcatgatctagcagtctgtgtcactatcagtaagtaaacagtaaggactcaaattttaagattaaaacaagttcattttgttaacatcatgttttgttgcatcttgcagcttcttggtgaatttttggatgaagccattaaattaattgcttgccatcatgagcagaagcaagcgtgacaacaatttttatagtgtagagattggagattctacattcacagtcctgaaacgatatcagaatttaaaacctataggctcaggagctcaaggaatagtatggtaagtgtttacttccaaaaattaggcaaagaatcattaactgctaccttttctcctctcgtaatttagataccttggcaaatatttaacttgctttgaaaaattaaaactaaaaattaaatgaaaactattccacagtaaattgtttgcttcaggatcaatggtcttttctttattattattattaaaggttgagtatcccttatctgaaatgcttaggaccagaagtgtcagattttggaatgtttgcattggttgagcattccaaattcaaatcagaaatacttcagtgaacatttcctttgagcatcatgtcagtgcccccaaaatttagattctccagcattttagatttcatattttcagatttgggataataacctgtattattcataagatacaactctataaactagcactgccatctttaagtataaactatgattaaatacttgggcatagccattgaagacaaatatctctatcagcaaagaataagtggcatgcttgttaatttcatgtatacatgtattcccatagataattgtttaataagaagcttcacttagtcatcactttcacactataatgaagccctggaatttcagaagtcttattctatactggggaatgaagtcagctaatatctcactgtgtgtgtttcaaaattcatccatatgtttaaaattgatttattagctaatttctacaaaaacctcaggctatatcagcataattctttataaactgaaatgcagatcactctttgggatagttctgatactgattgcagatcactaaattagcataataataaactagtgttttggggaattataagcctcactcaagaataattatatttttattacctcttcttgaaacaaatttcagaatctattctaaacaaaatgtaaactgttaagtatttataatccagtatttctcctaggttctaaaaaaactgttttacatgtgcacagggagtcatgcataggattggtgtttgcagcaccatttataacagcaaaaattggaaatagcatcaaatctatcaacagaagaataaaaaattgtgatacagtcatgctgtgaaatactatataacattttaaacgaactggagccatatgtgtcaacaaggataacctcagaaatgtagtgctgggcttcaaagcaagatgtagaatatatatatacatcattataccatttacatgtagcttaaaatatgcaaagcagtaccatatatttatggattatatatatgtacaaaagattaaaacatgcataaataccaaacttaggatgttgtttatctctgagaaaatagagaaaagaaaggaggtttgacctataatattatatttctttctaaaaaattcagagcaagccgggcgcggtggctcacgcctataatccccgcactttgggaggccgaggtgggtggatcatgaggtcaggagttcaagaccagcctggccaacatggtgaaaccctgtctgtactcaaaatacaaaaattagctgggcatggtggcacatgcctgtaatcccagctacttgggaggcggaggcaggagaatagcttgaacccgggaggtggaggttgtggtgagctgagatggtgtcactgcactccagcctgggtgatagagtgagactccgtctaaaaaaaaaaaaaaaaaatcagagcaattatggtaacgtattaagatttaataaatttgcatgatagaatggcatttattatctttcctgcattcttgaagtaatttacaatatcaaaaattatagaagttggagtcattttgtaagccgttttgactggcctgttctcattgtaaccaaccacatttaaccaaccataaattaaatttaaagaaaatcatattatatagtcagtattaggattctgaaagccagctctctgttcaggttttgttttttgttttttgtttttttgtttctttgttttttttttgagacagagtctcactctgtcacccaggctagagtgcagtggcgtgatctcagctcactgcaagctccgcctcccgggttcacgccattctcccgcctcagcctccggagtagctggggctacaggtgcctgccaccacgcccggctaatttgtgtgtgtgtgtgtgtatttttagtagagacaggatttcaccatgttagccgggatggtctcgatctcctgatctcgtgatctacccgcctcggcctcccaaagtgctgggattacaggcgtgagccactgcgcctggcccttctgtatttattttattgtgtccaaaaggatagaagtaatgtgtttacatagaattattcagcaaatcttttgagtagaatttatatgctttttttttttttttttttttgagggagtctaccaggctggagtgcggtggtgcgatcttggctcactgcaacttccgcctcccaggttcaagtgattcccttgccttagcctctcaagtagctgggactacaggtgtgcaccatcacacccagctaatttttttgtattttagtagaggcggagtttcactgtgttggccaggatggtctcgatctcctgacctcgtgatccacccaccttgacctcccaaagtgctgggattacaggcgtgagccactgcacccagcctcgtatgcattctttatcctaccttttcttgatggaagtacaaggttaaggatttatttaggctttaggctatctagtggagctaaataattattatgcatttgtacattgagtgcccacgatgtactaggtggatctttgaggcaacacaacgaacatgcagggtctctgttggcatagtccactatctatttggatccattagcattttaggaaatagttgcaaaaaaatatatgttgtaatagatatagaagacacatgttgagcgtcatagacttggaagggatccagttacttgtctttggagaaagtgagaaatgtatatgactgtttcatgaattcagtttacagatttttgctttaagtttttttttgtgtttttgaatttcttattacagtgcagcttatgatgccattcttgaaagaaatgttgcaatcaagaagctaagccgaccatttcagaatcagactcatgccaagcgggcctacagagagctagttcttatgaaatgtgttaatcacaaaaatgtaagtgaacatttttggtttcctaagtatagatgaaatcaagatttattcatgaatatatgaatatcaaagactaaatattaggggctttaaattgttctgtattaaaacattgtttaaaagggatatatatatatatatatatatatatatatctacagggtgattttcctcaactttattaaattgtatcaaaagaatggcttctaaaatttagattatatgatttcctgtcatttaatttacaaaaggagttttaaaaagataagcgtttgagaagaattttattcagcttgatctcatcttctgctttttgttctccgtcaggctgacatttagaaaactgtagcattagcacagagaggaaattgttcccattatgctttgacactctgactttaatcatattgaatataaaatttatatcacttctccctaccccactcccacctctttaagtgatggcagtattcactgatcactttatgatgaggatagtgggtttagcagaaagtttttgaaactatctagagggtattaacatgtttctaattctattttctaatgattgcaaagataagtctttataaagatatataacttgcactcattttgagaataaacagttatacttttttaaacttacattaagcttattcatacttttgtgattgttctaatggaatgatttcttcagttgaggaaataaactaggagtgaattgtgtaagggacacttttaggcagtcctaaacggaaggcatctgactaaagacatttcatagtgtttgtccaaaagagtttatataatataatgagcacagtactttctgactacagataatacaatttaccacattttgagatctaaatatgtgcaagtctctgtgcattggagttactgggttcattatcaagggaaaaaaaatcatggaagttcaggattaggccctttatttggggagcttacaatggtgttttgaatacaaaacagacatacagagagttaaatatcaaacatcacaaagcagtggccgtttgtcaaatgatgatggtggcccatatattgaaatctaaaaagagggacaatttctgtgagctttaattaactgggaaggctttggggaggagtagacctaggctgactcttaaagatggggtaaaaattggattgttgaaggaaaggagccttcagagaggaagaatgacgtaaaaaaggtccagagacaaagattaaacttagataataatagggaggaagttgtggtagccattcttgttccaagtgggaacttgatgtgttgctcatcacagttttgctggtggcatcctgtccatggatagagctgctcgtgccccttgtggcctgtgagcacagttccatggcagtggtggtgttgccttagtttttccttggggaggagttcagttaatcctacctctcaagcctgggtgactgcaaagaaaggtggttcgttcaactgcatggaatatgactaagcatgtctcacatgattaggcctctagcaggggtggcagaggtttatccaggcagaactctcagcacctagaagagtgtggacaagagtaggtactcagaatatatctgttcagtgagtgagtataaagctaaatatgggaaaactggaaatggtaactgaattattccactcacccatggatggatgtttttgtagtgttttgccttttaaacaatttcatcctctgtacagattgtctcttcactggtctaagcatctctggtttttctcattcttttcatagatggtcttgagtttcttttttaatcttggctgtttatctctgaacacactttgaaagtgacctagcacacactactacataagccacctagcacacagtactgcacatctgatcaaatcctctgagaggagctgaggcatgtcatctcttaactgtagacattaaaaccctgttcagaaattacgtccccatctgactcccgttgtctttctttgttacaggcctgccttacagttcccatctcacccagtctttatattttttcttttgattatggagaattaagtatagtacttcatgtttctccctattaaatttcaaaggtgaaatgtggttgctcttcctggtctactagtgattgctgtgattgcttttttcttccttgttctgacttttcacttgtgggcttcacttcccagttttgctcaggatatctttgtaatagctggattaattcattagcaacttttgagcatattgcagaaattacgtgtctgactatcacagttatccagctgtttccaattcatcatcttattcacaaggatgttattattagaaacattttctaaaatgccattttgaaatcttcatatactgtgtctggttgcatttttctgatttattgctattgttctttgttgtttttattcatggaaggaaatagtatttctcaatgaacttttacctgctcttggtaattgttacttcttttgaagtagttatataccactactaatcaatcattgacttttgcttggctgtccagtctataactgatataatttcctttatttccctttttgaaaaatgggacaactatctgtttgaatcttttttataacagctttattgaaatataatttctatgtcatgcaattcacccatttgaagtataccattcaatggtttttagtatattcagtgatatgtgggaccatcactacagtcagttctagaatagttttatcacctcaggataaaagaaagaaatcttttatcctttagctgtcattcccctacctcccatccttctcagttctaaacaaccactaatcttctttctgtctctatatgcctttaatatttaatacctctcttctactctagggcttcccagatattaatgagaatagatttactatttgtccaagtctcctattgtgcattgcatgcggttggtagacttgaacttatttagagcagccagatgctttcttattatcatttccctctcttaaatttgtttggccctttctggtgtattatttttccgaatttattcactgaccaaatatttaaataccttatgtaaagctgaatgcttaaaagaaaaacatcaattctgcccttataaagtttatgcctaaaaaacaaattcccatccctaagtatcatcgtcagcaaacatttttatatgtgtgtcatgtaacttgccatatactaggcaataaaagtgattaaggcacagttctttctaataaggattctctgtggtagggatgaggctgatgtgaaaatgagactagattacagtgtgctgaataccataacaacattagaagataactggggacaaagtagagagaatagtcaactctgtcaagaactaggagttgtcagaatctacaaaagaggttcacctggaagataattaagttgagtagataaatgacaagcatagggaatagtatgtttaaaagcatcaaaacattttaaaaatgacattcttaaaactagcatagctaaagtatgaagtgtaatataggacttagcaggagatgaagtgagttgatggcatatcatggaggcttttgaatatactgcaagggagtttcagaatatatttgttggctttaaatttttgaggaggtaagtaatatgatcaggtctttcttttaccatattataggcagtaaatggtagctggatttgtagaaaaccatcgttagtgacccttaatcagctcaggccaccataacaaaatactgtacactgggtgtcttaaacaacagagatttatttctcacaattctgtaggctgggaagttcaagatcaagttgctggccaatttgattcttgatgagggcctgctttctgacttggaggtggccaacttttcaccttgtcctcatttgcctttcttcagtgtgtgctcaaggagagggagagaaaaattgctcttttcgtcttcccttgttttaggccactaattccattatgagcgccccactctcatgacctaatctaacccttattaccttccaaaggccccatttccaaatactgtcacattgggtgctaggagttaaacatatgaattgtgtggggtgtgtgtgtgagggacaatcaatctgtaacactagtgttagaaggaattacagcatgaacagtctagatgttagtcttcaagctgtttatagcacagggaatggaaaaaagagattgaaggtcagattgacagtagaatggacagcattctatgagtatttattatggtgcatatactgaaaaaggagtcaaaaatcaccctgagccttcttttgtaaaagagagggcacactggaaaagtaaggggtttgggtaggaatgaaaatgaattcagtgttaccttattttgtgagatgtccgtgcaaaaagtgaaaagaaatggattaaacacaatagtgtgagaagggatatgcttatggatgaaccagtgaaatagactgggaatgaagaaaactgggcaagtgcagtattatgaaaaaccaagggaggaaagggctgagattatatagagatactgaattggaaaagagctggtagaagggatttaacatttgctgataaattatgtagaggtttgtataatgtaagtgcttgataattgactgttcataaatggaattacagataaatgggttacagatcctctgtgcctccacttatccatcccctccttcaactcctgcccataaagttgcaatatataaaatgaaagcaattaacttgagcttagaatgtaaagaaagattttaaactgatggtagtttttttaactcatgtatttgtagttcccaaattaaaatattatgaagtaatttctaatttttctgtctctcgacttttattatagataattggccttttgaatgttttcacaccacagaaatccctagaagaatttcaagatgtgtaagtgtaataattaaaattttgttaagttagtacatttttcttagattgctgctggacactttagctgttctcttttttcactcataaagttacatagtcatggagctcatggatgcaaatctttgccaagtgattcagatggagctagatcatgaaagaatgtcctaccttctctatcagatgctgtgtggaatcaagcaccttcattctgctggaattattcatcgggttagtagaaaaaactatcatcatactctttgttttctcattgaggtgaaattcatgtaacaaaattaaccattctaaagtggcatttttagtactttcacagtgctgtacaactaccacccatattaaattctaaaatattttcattacccccaaaaaagtctccatgtttcttaagcagttgtgcatctttgccctggcatgataccagtctgctttctgtgtctagatttgcctttatgtttccatttatatgaaatacggcgtgatgttttcaagatttctccatgtttaccatgtatcaatagttcattcctttttatgactgaataatattctatataccatatttcgtttatccattcatccatcgatggacatttgggttatttctacctttcagctattatggatcgtgctatgaaaattcaagcacaaatatttgttggaatatatattttcagtcctttgggatatacctgtgactggaagtgctgagtcatatggtgattctatagttaactttctgaggaaccatcaaactgcacagtgactgcactattttacattcccactagcagtgtatgcgggttccagtttcttcacatccttgtcagtacttgttatctgactttttaaattctagccatcctaatgggtacgaagtggtgtttcttgtgattttactttgcatctccctaacgactaataatgttgggcatttttcatgtgcttgtggccatttgtgtatcttctttggagaaatgtgtattcaagccctttgctcatttttaaattgggttgtttgtctttttgttgtagttttagcatttctttatatatttcatatatgaaacctttatcaggtatataatttgtaaatattttctcccattctgtaggttgtctgttcactttgctgatgatttcctttaatgcacaaaaactataattttaatgaaatacaattgtttatttcatcacttgtgtttttggtatcatgtataagaatccattgtcaaacccatggtcatgaagatttagtcttatgggctcttctaagagttttatagtttaagtctcacatgtaggtctttgatctattttgagttaattttttgtctggcatgaggtaaggttccaacttcattcttttgtatgtggcaatttagttgtgccagcaccatttgttacagactactcttaacccattgaatggtcttggcacccctgtcaaaaaacagttggtcatagacacatggtttcatttttggactctcagttctgtttcacatagttcctatgtgcctgaccatgtattatactagtaccacattattttgatcacttttagcttcgtagtaacttgaaatggagaagtatcaattctccagctttattcttttacaatattgttttagcttttcagagccctttgtgatgccatatgaatttgagtatcattctatttctgcagaaagggcaattagaattctaattagtatttcattgcatctgtagattgcttaggtagttttgccatcgtaacaatatttagtcttccaattcacaaacataggatgtcttaccatttccttccttcttttcttttttcttttctttcttttttctccttccctcccttcctccctcccttccccttccttcctttctccaccctctcctctcttcccctcccctcccatcccctcccatttgtcttgtcttgtcttctccattctcagctcactgcaacctctacctcctgggttcaagcaattctcctgccgcagcctcccaagtagctgggattacaggggcctgcccccacgcctggttaatattttgtatttttagtagagacagagtttcaccatgttggtcaggctggtctcgaactcctgacctcaagtgatctgcccgccttggcctcccaaagtgctgggattacaggcgtgagccaccctacctggcctctttcagcactttagatgtatcatccattgctatttgttttgccatggcttccagtgataaatcagctgttaagctcgttgaggatcttttgtaagtgacaaatgcacctctcttgctgctctcaagatgcctttttgtctttcgctttcaacagtttgattatgtgtcttagtgcagatctctttatgtttatccatcttagaattcattcagcagcttggatatgtagattcatgtcttttttgatcaggatggaaggaagctaaaaagaaaaaatagattcatatcttttatcaaatttagcaaattttcagtcattattttcttaaatattttttctgctcatttttctctttcttctccttttggaactcccattatgcaaagttgatatgcttaatggtatgccatgtcttgttttctcctccactttaatgttttgtcccaggcagcattgggctatttacttgccttaaccatgttttcaaggaatgcctctgtctagccttggaccagggtcccacactgaaaatgtggctgctttcttcaaaatccttgcctagttagggaggcaggtagagccaaagactagttaaaatgctggaaatatttcccaatgttttttccccacctttttattgtagtaaatacatataaaatgtgccattttaaccattaaatctacagttctgtggcattaaatacattcataatgtgcaaccatcaccaccatccatctccagaattcttttcatcttgtgaagctgcaactctccacccaccagacagtaattccctattctcctctccccgcaacccccgacagacgtcattctattttatgtctatatgattttggctactataaatacctcatataagcggaatcatgcagtatttgcctccttgcaactggcttatttcacttagcataatgtgctcaaggtttatccatgttgcagcatatgtcagaattttcttccttttcaaggctgaataatattccatttatgtatataccatacttgcttatccattcatcaatcagtggcaattgggttggttccgcatttagctcctttgaaaaatgctgctatgaacatggttgtccaaatatctctttgagaccctacttttcagttcatttgggctacagccagaagtggaattgccggatcacatggtcattctttttaacattttgagaaactgccacactgttttccatagcagctgtaccattttacattcccaccagtagtgcagaagggtttcagttattcctcattcttaccaacactttatttttttcatagtaaccatcctaaagggtgtgaggtggtttcctgtttttaagttgccattttcttggttctgagttcacttgatagccataaacctttgaataatttccagaattctgaaaaagtttattctgacactttgatgttttatggtgcttctgtggagctattttggctgacatcactgcctctcatcaaattcttagtatcactgtatttcactgatttatatggagcaatgtaaagtttgtttttgctctgaagtgaagcagtatacaaaataaactgctattattaccagtcattccaaattgggaattgaatattaccaagttaccaaaattgagtgtatatatatatatatatatatatatatatatatatatatatatatatacacatacatacatatacatacacacacacacacatatatattcagaaatattttatatttttgttctctgggatttttacctgcttttttgcaatataatttacatgccatacaatttattcatttaacgtgtaccactcagtgtttattatatttgaagattgtatgctcgttaccacaatcttaactttagaaaattccattgccctaagagaaactccacatccactcatctttatttcccattcttctgtgttcctttcacctctagccctaagcaaacactaatctactttctgtctttgtatatttgtctattctggacatttcatgtacatagaattatataatatgtgatattttgtgcttggcttattttacctagcataatcttttcaaggttcattcatgtatttattgtgtgtcagttcttcttgtcattttattgacaaatatttcactgtatagatatattgtttatccatttatcacttgattataatttgggttgtcaccactgactattacaggtaatgctgacatgaacatttatgtaaaatttttttgtgtgttggtatgttttgtattttagttaaatctagcttattctttgaaaagtattgagaggatttttttttttttttttcctgagagacagaatcttcctctgtcactcaggccaggatgcagtggcgtaatcatagttcacttgcagccttgaactcctgggttcaataggttgaaaagaattttttttttttttttttttttttgagacagggtctctctctgtcacccaggcatgagtgcagtagcatgaacatggcttactgcagcctttacctcctgggctcagtgatcatcccacttcagcctcccaagtagctaagactatggacatgtaccaccatgcctggcaaatttttattttttatttttttgtagagacggggtcttgccatattgcccaggctggtcttgtattcctggcttcaagcaatccagctgccttgacctcccaaagtgctgggatcacaggcatgagccatcatgcccagcctgaattttttaaaaattatttagttcagtggaattacatcttcctttggattcatctggttcaattacctttactcagtaattaaaataaatacagagatagttttcccattataagacaattatgtcttagggctattgggctttttttttttaagtgaacaatcctgctacaggcttatccttaattatcattgtaagtgaattccttgtatattacatatacagctgctctaatcatttgtctaatgcaatctttaaataacataattaaaatctctttaaatgggagagtattttatcttcctgagcccctactcatacactatgtgaagtagagcagacgagtgaaacttctaggtttgggttgtttgtttcctgagtccttagaccggggcagtaatccaacattgtggaagttcatttgattttagtaaagcacacccctccaaatagaaaggttccagattaatgaggatagcaggtggctggaccagaaaaacagaccaaatggtagaagatagaaaacaatggaaacaacaagaaccacaaaaaacaaacacaaaattacaaaagagcaatatttatggtaatatgttaatcggattagttccttagtttaaaaaggtcagattttggcagcacacaaggctcaacaacaactgcgtatttccataacacaaacattcgtagctaacttcaaaaggctgaaggcagagaggttggcagacatataccaggaaaatgcaaacatcaaaacaagggtaactctatttaatgagataaagttgaatatggcggggtcagagaggaagtgttcctctctgagaataaagagtctcgcgttttcaaagtgaaagacactatccaattaggatacacaattatacatgaagtagggttgctatacaaaaagcttaaactgtagaaaatagaagaatggcacaagcacagttgtattgggatattctaacttactcccttagtatcagtacataaagtggtaaaaatgaagtacatctgtagaaaatttcttaatgtgataaagtggagctaatgagacctactggggtctgttatctattatgaagaatctccctttatcttggcttgggctctttgggaaactctagagtggagatacgcatttaagttttttgcaggtggtcttgaggccacgattggtactcatctctctgctctactacttattctagattcacctccacccttggctagtacttctgctagtctgaggttacttacttggtaaaataacctgacctttcatcccttgggggttcagggcaagtcaggattgctactctgagaccaaagcttacgaggtcccaccatctagatagttgcgggtcactttgtcggaaagagaaagccaagtgatgtgcatggatggctcttctttgcttggaagtgacacacatgacttctgcttagagtgcattgacaaagctagccatagacttgcttaatttgtaaggaaactcagaaatgtggggagggcagacttcagaatagtggtgagccccagcctctgccacagtctgtccttctggctggcaaacattcctttgctccctttattccacaccttcttaagggaaataacccaaagttctattccatcaagacatttatcaaatccaggcattgttcctcttggtccagaaacataggaactggaatgaccaaattatatggccacccctataaccactgctcccctgccaaataccgtagatggagtggtcagacagggccagtgttatcacagtgaacaatcccatttagaaaactgaaaaatgcagtcattggttagttgtaattaaattcttctgtacagacattgtgagtgtcccttgccgtgggtggggaatattcctaatcagccctcctgactgatctctgtggttctctatagtacctggctctaccctgtgggagagtcatcttttttgctatcctcatgaatatatctaaagtggatattgaagaatgtattttccttgagggctgctcacctttctcagcctgcttcttacctataaaagattggggcccaagggtcattttaaggccatccttctcagccttgccactattgacattttggagcaaacagttctttcttttgatgatggaatgtttagtagcattcctggcctctacccactagatgccagtagcactccccagttgtgacaatcaaaaatgttttctgacattgccaaatattattttggggcaaaattactgtgaattgagaactcctgtttgaagtgtagaaggatcatagacctttggtgttaggtctgacagttaactaactctttcagaaatttaagatatttcttatctttctgattgtagttcttttcatagtatcttttttagctcatgggtcctgtattcttggacttaattgaggctgtcttcagtcttctgtaagctttcaagcttctgttggcagactgaggcaaatttatcaattgaaaattttacaggactttttccctgaaagggtttcagaattattatgtgaaaatgatgcatagaaaccaacccaagatatcagtggcttaaggcaatatttattgtttacttgggtctgcagggttggctgtgtgagactgctccaaactatgggtcaagttcaggcttgtcccatattcaggtttcagcatttaaactgaagcatacaccagagacatccttttctcatggtgaaaggtagaagagcaagagctatgctgagtcaaacacattcccccatattccattggacaaaataagacaagtgactgaacctatcgatagggtgaggacacagtctggggtgggcaagaatatttgcagaacaatctaccataccttctttcaggggtctagtagcatttagcttttccaaaatggcaagaccctgaaattctaggctctgttcccttttatttctgctttaaaaggtggctacttcttttaaatgcaaccagtagctaccaacacaaactactgaagttttgctttccagtcttttctagagcagggttcaacaaactttttctgtcaaagccatgtagtaaatattttaggctttgtggataatagtctgcatcacagctacaagactctgccattgtaacacaaaagcagccataggtgatctgtacttgaatgagcatgactgtgtttcagtatcagcactttctttacaaagcaggcaggccttaatttgccagcccctgtgctagagcttcaggttcattgtacaagtggctgtgcaggtgacagcttcatgaaatgttttgttactacataacctagatcacctttccaaccttcgatgtgagtttccctgctgctcaactgctaagccaggatcttatgtttttataataattaacaccccacctctgacaccagtttcagtgttagaatagactcagctgtactgaataacagataaacccttaattctcagtggcttagcatgactcaggcttatttcctttgctgaatgtgtggtgcagatcatggtgggtttgtggactgtgcgtttacatagatgatcagcaacccaggctgccagagaatcctctggaaagttcctaatcaccaaagcagggcaggagatgacaggaagttgtgcactggcccttctcttctttacttccactcacatcccatgaactagaactacccacgtgcccttgcctaactgaggaagctagaaaaattgggggaagaagacagaatgttgggttagttccactgcctgcataaattctaagttgctattcttatgtatagttagcagtgtaattaacagctgtaaggtacatattgatatatatggatgaatttcaattaatagtctttgaggctttttttgacaatttttttgcttaacaaaaatatctgtctttaaaaattgttactttgctcttaattttttcacaatgaagtgcttaaaattggaatgttatttctaaattggaatccgctagtataaagagccattaaccttcaaccatcacactaaacattgaagtagtatcaaagcttgtaatatttattcttaaacatgcagtgtttctttgctgaggtactgtattttagaagtattagcaacattatatttacagaataccaataatgaaaatttttttcttctgtttcattaagacctttgaattgttggtatatttaatttcataaaaccactagattacatatcttctaaacccatccatgattgcctgtcgaaatatgttaaagacaacatacatgcttttctgtatgttaacattacaaaagtaatagttgtctttcaagcaggctattttccttttttgtattaatcggtgatatttaatatgtatactgcatgtcagtacaggtaatacagtgcatttgtgttgtggatttatgctttcttcgttttttggtcctttggcttataatagtattcatcaaagctaacaggcaaagtatgttaaacatgaagccatgagtgtttatgctgctgcctgacttttgatgggcacagcacagaatatgttaaagtaggggccaggtgaaaaattctgaattattcagtagtatctatagcaagtaattttatagattagtggcaccaaggcaatggtgtcctacttctacaaacagacagaaattttatagcaaatttgtgtgacttcaggtgggaaatcagggatggaaaaatggataatgactcttctagtcctttggaactgggtatctgccagtctaaaagatcaaataacatttgttaggattgacaagatggctcgttgttgacttaaaacatctatataaagcttattgtgactttaaaatgagattttaaaaatattggtaatatgttatgcaaatgaatataaatgctaacttatgactctttcttttactgtagtagtttttttatgtgagctttgtgatgtcttttcaaatcccttttactctaaccaaaaatgtctagctaatcataatttctagcaattaaaacattactaacttctctaataactgtatgtattcataaattttaaatcccataaaactgacttctcaggtttgccttttaacgatgaatcagtgcagtaatattacagtgagaaaaacgaacaattaacatgaatgttttgcaagggatagtataactttattgtgaactgtaggattttcctatatatcatggcagtcattttttaatttttattttctgaaggacttaaagcccagtaatatagtagtaaaatctgactgcactttgaagattcttgacttcggtctggccaggactgcaggaacgagttttatgatgacgccttacgtagtgactcgctactacagagcacccgaggtcatccttggcatgggctacaaggaaaacggtcagcacacacatttatttgaaatatttttctgatttagcttttttctttattcagtagattttttatgtaaatacttaagcagaagtacgttgagttaaatgtgtatcattgtttgaaatgtgtatcaaaagtttgcaggtaactataaattttttcatcaatgtttggaaaaacttggggcccttatttgtttaaatacggatacataacatcactactaccattggataaagaatttgttgccatggccctgagacagaatttatgctctttgcttgcctataacttgaaaatgaacatttctaacatggtctcagggatgtatatagtgtactgacagtttattattagtgtacatcagtgatatttgcctatatttccaaccccatgaaactaaagctcatagcagtagcactcattgtaaattttaggagatacattaaggcctctgcaaagctgatggataattaaggtgacctcttgaaggaagcagtaaagtttcattaaaacgttgtatccagccttaaggaaatgacttttagtattttgtatgggtatatccaattgtatcaatcaacctaagaatcagtgttgaacaaaattatctggcatgtagatcatgaatttaaacattttgtatgcatatacctacttatatttaatttaggaagaaattttgttgagtcttagaaatttaggagatgaataaatctgctaagaagcatgggattttatggaaataaaccatcgttttaaaaaatgtggtgacttcatccaaaatactaccaagaataaaacctagacattttttctggcaaggaatctggaatagcagttcattttgaatcaggaaattgtaataagtcaacttttaagattctttttttataaaagatacgattaagctgagcttgattttctgagctgattaaaaacaaatactttaaacatttgctattaattttttattcttaagtaaatatgctgttctttttacttacactctacctgaaatttgaagtttttttggggggggggaattgataacttcacgtgacccaccagcatgaagattgcttttgcatttgctgtaattgattgtcatagatatggtgttatgtgtcagtgtcctataaatatgatcttaggatagctccctgccagaaattagcactaagaaaaactgtcatatatagaattgaggctgggtatggtcgcttacacctataatcccagcactttgggaggccgaggctcgtggatcactcgaggctaggagttctagaccagcctgagcaacatggcaaaaccctgtctctactgaaagtacagaaattagtcaggtgtggtggtgcacacctgtaatcccagctattctggaggtgaggcatgagaatcacttgaacccgggaggtggaggttacagtgagccgagattgcaccactgcattccagcctgggcgacaaagcgagactctgtctcaaaaaataaaataaaataaaaaatgaactggcatatggttcctctttagttaagaattatgtaggtcaccttcttgccttcccattcccaccctaggaaacggagtcaaatgtaatgcttaatgattataactacattagccagcaaggttaaacataagtacttcctccttttaatgacatctcacactcattttatttatcttatttatttatttatttatttatttatttttgagatggagtctcgctctgtcgcccaggctggagtgcagtcatgccatcttggctcactgcagcctccacctcctggcttcaagccattctcctgcttcaacctacgagtagctgggactataggcatgtgccaccatgcctggctaatttttgtatttttagtagagacagggtctcattatgttggccaggctggtcttgaactcctgaccttaggtgatccacctgcctcagcctcccaaagtgctgggattacaggagtttgagccacaacgcctggcctcccacccattttaacaactttgctttatgtaccttttattgcaggctactcagagcattttggaaagcagtgtaatcaatatatttttaactgcttaatagactaagcagttagtttaaagctagagttgtgcatgaatcagacttatgttcctagtcttcactggcccagataatatcttctctcatgcttgcagctttcaaaatacttttgtttaaaaataagcttttctgaaagttaccaaataagttgtatgctggatatttgaagtttaacattctctataaaatctgtagagaagatttattctaatagatttttgtcaaaaacggaaaccttagaaaaaatttttctctgaggcactaatttataaatattaaattttttttctaaaatcttatccttgaaagctgaaccatgacataaatatgaaaatattcattcattttaatatgacattttagggaaactttagttccacagtatttccaaaagtaatttccagtttagctcttaagactcttcagtgaactggcagccttttaataagaatgtactgtattagaaagtacaggctttaattttctaagtcctttaacatgagtaaagggcatgtgtctttctgacatctatttgtgccgttttcctcttgtcattttaaagaattgggaccttcagatgtcacaactaaatgcaagtttctaaggcttttccttctaaattgctcattcttccctcttttcctgttacactgcaagcacttactctctcctttttgtgtgatattcaaacccaaaggcataaaatgccatgatgtgttgtcagtttcccttagtaagtggagattccaaattgtctgtttctgtgtctagcagattcttgtcaacattgattgggattcccatttacagttggcaagggtcatcagtaagtcttccaggagactcttcatactcaattcgtgggaactgacttactgtatctagccaactttgctttatgtaccttttattgcaggctactcagagcattttggaaagcagttagtttccaaaactaacttcttaagccaaaagcagtttggttttatgggtttaaaaaactttaggtaggaaacatgaaatacatttctcttactaagttttccttgattagttgttggttctctgtgcacttgttccttttgggatagtagggtaaatgtagcatgatgttgccaagaaaacaaatggacttttaattcagaacaagcatagcacttctcaattaaatgtatttgggaaatccagtttaaaaattctaaagagctttagattaacttttttatcataattattcatagagattatttctgttagatattttaatatgctgaattattttctcatgcttttttctttaacttagagagtataatgcacagttgaacttctaaatagtatagtataaagattttatttttataattttactacctcatgtacatttttatttacaaagtttgtgtttggttctatttcatattttataaacaagttctcagggacaaacatgcagggtttttctatttatgcaatttctgtgcatagctctcaatttgaaattagatatgtagttaaaatgccacactttacattttcttttgtgaaccaaagactttcaaaaaataatttgtgttttaaattattccattagctaaagttacaatcactttttttcttttcgtgacgttttgcagtttttatataatgcagtcatattatgcttctttgattttaatgaccttttgctttgcttttccttcttttgtgctgcaaacatatagtggatttatggtctgtggggtgcattatgggagaaatggtttgccacaaaatcctctttccaggaagggactgtatccttgtgctgctgcagcagttaattagttaggcgatgaacttctttatgttctctaatgaaaatgaatatgctacatttatacagatgggtttttaaacaggcataaagtttgtggctattatagttcaaaaattgttgagataagaagctgaaatatttgtaggctgcatctggcagtaggacatacagtctctgctggtagtcagagcacattcactgtcactcatttttattttatactgctttttataattttgaagtatacatggtgtgtgtgattttatttatttctttcttttttttattttaaccaaaatctttatgttaatgtcattgcattttgttttcagttgacatttggtcagttgggtgcatcatgggagaaatgatcaaaggtggtgttttgttcccaggtacagatcgtatccttatctttggcctaaaatgtagtttctaaaggtcaaaatgtatgatagcacttcagtttggtcaggtataatgtattttgtctctccctaatatattgttaaattactcttaaaataccacctactatttgacatagacttttctttccgttatttattgtttcatatgttaattctgaaccctgctcaattgtagttatgcacaattacttgctggctttgagttgatttaacctaaatcaaaaatcatggcttgcattaaaaatttataataattatacacttaagtctagaaatacgtacaacttaatatgaattttggagctgtctgttgcttctggccatccttttgttttgtcccctacctcctttttgttaatgttctgtgtggtttgtgtcttttgattgttgtctcattactcacataacatactgaccctttcatctgagaatttcagcagtagtagttttgtatggtaacgatagctttggattcatactttttgttcatcccactacttttaatatttatattaacaatgatttgttatgtgtttaccagctagtaacacttagaattgtttcaggaggaagaatgggaaaagccatattcacaagattacaataagtgagttttaggccttggccttcagggtcctggagtgtaaagactagaggaaaggagaccaagaaatcctaaccttacaacttagcaaaaaactgaatcttttttataagggtcagagctttagaaaatttttttaaacctaagctaaacaaagaatggcaaaagaaaatgccacttttatcgaagcctttatttttattgcaactgattattttctgttagtgtagaaaactcagtaaaacaggatgtgttctagaaatattgtctaggagatataatcatgttttctgataaattgacagaaaaggaaaaattttgtatattattatagcattgtgtgcagtttgcagttagagccactatggatagtaattgtcattattcttagttgcttatcattttatttagaatttgtgagtttaagcttccattttaaggtgaaatcagttagtttgaacacacaataaataaggttaataaagcttatttattgatcatttctgtccacctacaatcattgccttttgcagggtgcctgtgagatacaaaatttataattgccacatcctttcttaggaatttttaaatttctgttttcttgtaatatgaatatgactaatgtattgaacattagttatggagtatttttcttagctacttgatattagatattgatcagtggaataaagttattgaacagcttggaacaccatgtcctgaattcatgaagaaactgcaaccaacagtaaggacttacgttgaaaacagacctaaatatgctggatatagctttgagaaactcttccctgatgtccttttcccagctgactcagaacacaacaaacttaaaggtactttttacaaatatgtacatttaatcccatttggggtgtgtagtgtgtgtgtatgggtttgtgtgtttatatgtattcatattcttatgggacatgaacccaaggttttctctggatggtggggaaaaaaatgaggtttttgttttttttttctttaattttatatattttaatcatatgtataagataattttacagtaatatttttaaaacatatgctttttaaaaaatctcaaattattaataatttgagaatctttacaaatatatgtacattaacatcattatgtttgcagccagtcaggcaagggatttgttatccaaaatgctggtaatagatgcatctaaaaggatctctgtagatgaagctctccaacacccgtacatcaatgtctggtatgatccttctgaagcagaagctgtaagttattttcttaatgtttacagaacatattgcattcttagagttagaatgacaattaggtttggaggagaccttttaattttaaataaaaatgtagatacatgatgatgatgtttttctgtttcttcatgaagactacgtcaaataaactaatgaacatattcgagcccctcctacacaaaataaagttacctcccactgttttttgcaatcttgcctggatacctaaccagagaactaggatgttgaatgctctgggggaccatcctaactcaggtataaaacaaattactgtatccaaaggaagacagaattctatgatctgtgatataaataaaatgtggcaatttcaagagctagaagaaaagaaaaaagacagttaaacattttatttcctgcaatgaaggagtcttcctaaactattatgtctgtataagtaagttgatgattgatcagtcttgatctaatgatatatttttataagtcatctgtctggctaatatttcaaataactacaaagagttaaaatactcccagcatactgacttggttattattgccttgtgtttttcagccaccaccaaagatccctgacaagcagttagatgaaagggaacacacaatagaagagtggaaaggtacattcgtcagattcttagagggaaaactgtgaaggagcttctggtttttatatggtgatttattatcatgttagagaaatttgtgactttaatatgcataaccgaaatgtaatattaatatttttacataagtagaaagtaagtctgcttccttccttaacttaatcttaagtttccaagtttcccaccccagacacagacacattagtgctctgtctcatatttttttccatggtttgtgaatacacaaatgtgtttagtgtctcccacctctcctcttccacccttttaaaatcacgtatggttgtgtacggtgtatgctatatgtacttgctttgtttatttattatatatttttttgagttggagtctcgctctgtcacccaggctggagtgcagtggtgtgatctcggctcactgcaagctctgcctcccgggttcacgccattctcctgcctcagcctcctgagtagctgggactacaggcgcctgccatcacgcccggctaatttttttgtatttttagtagagacagggtttcaccatgttagccaggatggtctcgatctcctgacctcgtgatccgcccgcctcggcctcccaaagtgctgagattataggcgtgagtgctttgttgatataatcagatatctggaaggttattctcttttagttcacgtatctgcctctcttgctttaataactggttagtgttctgctgtatgaatatgtcacactttatatatccatctccctcttgatgaccatttaaattgtgtccagtctgttgctgttagaaacaactctgcaatattcatgttcacatatgagaacatgcctggaagaaaaatcctggaaggagatgtgctgagccaaagatatttttcagttatttccaaattactctccaaagaaatggtagtagtgtacacttctgtccatattatataggagtctctctttgccctcacccttgcctacagaatgggttaatttttaatatttgtaaatctaatatagtagttttattctattttatgaatgtggctgaaattaatcatgctttgatagtcatggaagttttcaaatatttcttcagaaggtcccctgggacatgtgggtcaggtaatttttaggtcccgtttacttccatttgtgttgctgtccttcagtgatttgaccacttttgtaactgtgtgactttgagtaaatcactcccccttcatctcaccctcctacactgccgcctgcattttacctcatcttaaaatagaggcagaagacctgttattaagagttgtctctaaatcctgggaaggcaaaggggactggggaggtataaacatgaataagtgacccatctataaatgtattttgctaagcatgaatttgattctttcttagaaattgaagagatttagagattagttttctctgaactttgggaaacccgtggttagcagagcccgtgatagagttaaaagaatgacaaaatgataaaattggatagtgtctgctgcatttgaatatgtataaagatatagctctgtactgagtatgtatgaaaacattaatgtaatatttttacatcctactaatttacaatagacgatgaagtattttgtagaatcttgtggttttttgggttgttttttttttttttttttttgagacagggtctcactgtgtcgcccaggctagagtgcagtggtatgatcatggctcactgcagcatcaaaactcctgagctcaagtgatcctgctgcctcagcctccccagtagctgggatcacaggtgtgatccaccacacttggctaattttgttttttttttgagacagggtctcactgttgcccaggctggtttcaaacttctgggcttaagtgatcctcctgcctcagcctcccaaagtgctgggattataagtcttaagccactgcgcccagcctaatttttaaaaaaaaattttgtagagatggggtctcactgtgttgtccaggttggtcatagactcttaataggccagcagttgtaaggcacaccattatgtgccacaaagaaaaaaaacaccttcagttgtacagcaccattggttataagatatagtcaatttcagagattaaactgtgaaaaaagtacatcttaaaatcagtgagatacagtgttttcatttgtataagaatatatttgggggttttgattgctttaaaaacatttacctttattctgtatcctttactcctagccccaggtgcatgtcagtaattacccacagactgcctttttcaagatctacttaagagttttagcgcatagcagaaagaaaaattaattgccaaagccattaattacagatggctttgcctagttagtgctcctaattagttttggttcttctgccttaatccctttgtgctttttcccagaggagtgctattttctctcttaaaaaatcctcttactgcaaatgtttatcattcctttttgtttctttgaagaaaaccatctcttattctctcctttatcagtgctttctatttttctccttccaagccttaagttactatagcaaacaaacttatctccagttgttgttcattccaacatattcatttgttttaccttattaccaatataaatgtcatactctgtaatcagggattctttatcagaattttattcttcaggaattaacacagactccttgaaattcgatgcaatattttttgtttgtacatttttctcagaagagggttcactacttttatacaattctcaaaagattccatgacccaaagaagatgataaatagtgttgatgtggcatccaccattaaggttaagtgtggtgtgccctgtgagtctgaatgtctacttaagaaccttaagtagacattaagaaccttaagaaggttttttgtttgtttttgtttttttgttgttgagatggagccttgctccattgcccaggctggagtgcagtggcgcaatctcagctcacttcaacctctgcctcccaggttcaagcaattctcctgtctcagcctcccgagtagctgggactgcaggcgcctgcccccacgcccggctaatttttgtgtttttagtagaaatggggtttcaccttgttggtcaggcttgtctcaaactcctgacctcaggtgatccacccacctcggcctcccaaagtgctgggattacgggcatgagccaccacaccacggccgaaggttcttcttacgtagacattcagactcacaaggcacatcgcagttaacatcagaatcacttctgatgataatataagtgaagaatataagacaggaggcgcatatattaataccagcagagcagctcccagtgtgtctcttcagttggaacagttgtcgcagtggtctacttgctgtccagaagcctgataagagaaaaagattcccatggagaaatgttcttggaagtgataaccatgcttactcataaggagttgaaatgtagcttacctgctacttttcctccaataaaaatgtgtttatctttcattctgatttgttgtgaagcttttgcacactctaatttaaatcttggtagcatatatctagttgagtacccacagtgcaccaggctctattccagggcccaggaaatggaagtcagtaagacacgtggttcaagccctccctgagacagatggtagtacagaatggtatgtggtatgatgtgctgtagcacaagttgctggtagagtgaaaaagaaagcttctaccccagcactatcaaaccaacttcagaaacagtgaattacaggaaagattagtacttccttttaatatgatccattgttgagtgtcaaggaattgttattaattaacatccttgaatcttaggccgacatttaactgactgtcattgtaaggacactgtttgaagtacttcacatgtataaaaatttccacttaaaccatacatgcgttgtgagattggctcttagactttgaaaagttcatttttgtttacttcttttacagaattgatatataaggaagttatggacttggaggagagaaccaagaatggagttatacgggggcagccctctcctttaggttggttacaatataagcttggttaagattacagtttacttcttgtgttgtaatcttcagtggcctgaaacctgcagttcttcccatattgacaaaatcattattattccaggcttaataagtataaggaaatacagttttgttttttctactaatacattatactaatatatcagtaactgttcataagatgcacatctttttctatgatactgacattctgaagaacagaaacttaaaaactttttgttggcattgttgctgggtctttaaagaggaaacttctcaaaattcaatatacatacctttctatgatcttgacagtctttactttggataaataaaagcttcactgcagaatttagtacatgtaataccaaattgctgtctttctctttttgatattattgatttgttgaatgaaggcaataacattaaaaccatcactagaaagtattctttctctaagaagaaaactgggtttgtaggagttaaaacttttttttatcataagctgatcttatatttaatgttagtacaagtaaaagtataaaggatagaggggaaaagttaaatggcaggtaacatgtacgctaagtacataccacataacagacactagtggtttatatactttatttcattcagcccctaagatcctaaggtataggattattgcacacatgttatggatgaggaaactaaagttcagaaatttgagataacataagattccaaatctattatgtagatgaactaatacagtaacttcagagtgtgtggttttttcagcctcccattttattatctggctggcaacagagacttctctggctagaggttaggacagttgtatgaaggaggtgaaatttgagctgagccttaaagagtgagtagtatttcaaaagatagatcttgattttgaagtaaaactatgccattttaattcctcagaaacttctacttttgaggaaaaaaatagatgttgtatctagcatcttgtatatgggtaaggtttttaaaactatagcgacattgtatactataaacataattgtttaagccattttttgtggcttgctttgacatttttggttatatattttagagttgtatattttaaatctttgatcaagaatgcagtcttccagattatagtgtagatcctgttgaatatatgaattggttttgaccgcttttacctattttggaaatggccttttctctacaatttacttataacaaatttaaagctctattataaatactttgtgtaattaattagctttgtattgctatatagtagtagtataacaattgttcatgatggaggctcaggtgggatttgaaaagttcattatgtgggacagttttatactttagcatactatccaagtgagtggcacagctggagtgccagatgtttgagtaaatgtaataatttcatgagttagagcatttgtatttgttcttaatttgtaagtgaataatttgaatcttagtccagcacttgcttatgatcacaaaataagtcagtgaaaaagatagaaattgaggtttctagactttttctggatcctcagttatagcttgcaaagacgagtattagcaaattaagctgttataaaaatattctgctcttgattttgtactaaaacagaaggagtagtgtttggtaaatcaaaataccagataaccacagtaccatttccacttgatttttaaaaggaattttattctttttccctgtcgagtgccttcctatctttgttttggtttggctaatagtaaagtaagtttacctgccttgagtgtatagaggctcacttaagagaggaatgacccacgtgagactaaagattttccatattattaccattcagatatttgagaatttactgtattgctttaaagagaaaacaagtgtgtgtttttttcccttaggtacttgatttttagattaaaaagttaacaatgcatttaaaagtcaatttttatcagattaagacatttggataaaataatagaccctgaactagaggcatatataaaaattgtatatgttggagcccttttatggtttgagtgtttcagtacaagtcttagaaactagtcattgtgtactatgtatggtacacagatatactgttcagtcagaaaaggcttattccaagtattgattgaactaaatagaatatactatctgaatttcactctgactgggaagctaatggacctttcttgggtctaggagattatcacctcttttacctctcatctctcaggcctgaaatgctcatcctgcttttctcttccatttcagctcccatcacctgctttgcctcttgtggttccattcctttctgtatcccagtcccctccctaaagattttcctattcccactacactgcctattttctttttgcatttgaagaaaagctcacagaggacttctcatattgaagtgttttattgctcatctggacagaatggagggatgatctcaaatacagatgctgggttcaggagcagtggttttcagcccatttggtttcagcgtctttgggtgcctgaacctcaccctcagaaattctgctcagtgttccatttgaagaccattgattttatttcataaatgtattcttgagaacttttaagtaacttgcattattccaatttggaatgacccttatttagtgttcatgtggttcaaaagtacttagcctagtgcatgagttacctttaactatccttcatcccccagcataagtcattcctgtccccttcctaaaccaatccccttgaggatttctgtctcgagctcaggtattcctgttaactttttaaaatccaggaaatgcttgttaggtaatactttcggcaaaggaaactgtttgctcttactttatttaataaatccatatttctgcttatcaagtattagagtagaaataagaagacccaagtttacttaactaggccacttgagtgacactggcatgtcccataacctcgtgtaaactggggaagttgaattgaggtttcttcctgttaaacttaattttattccttgtcttggcatttgctttaaaacaagatgtgccagaagtacatcttgtttcaaatttgaatcatttgaatttttcctttttagtgagaagctataaagacttttttgtagggaagtagcttttaacttttgtagttacacagtcctttaagatcctctgtccaaaaaaaggcattacagacagttttgcatgtattatcagcagtattcacacataccctgaagcccattcatggatcttgctgcaggaccatttctaaatgtggctcagatgtaaaattcttgtcttaaactgaaaaacacattcattgaaaggataggactccacgattctagacattttcagaattctcacctcatagctgtcaatgaagagtgtctttaagttagtgtgttggatatcatttgcgattatttttagtgagcctttgaaacccaagagaaaaaattaccactggaggcagtcagtgcagtgcaagtagcttgatctgcagctgtctgcaactgatttgctgttttgtttctcatagcacaggtgcagcagtgatcaatggctctcagcatccatcgtcatcgtcgtctgtcaatgatgtgtcttcaatgtcaacagatccgactttggcctctgatacagacagcagtctagaagcatcagctgggcctctgggctgctgtagatgactacttgggccgtgggggggtgggagggatggggagtcggttagtcattgatagaactactttgaaaacaattcagtggtcttatttttgggtgatttttcaaaaaatgtagaattcattttgtagtaaagtagtttattttttttaatttcaagtgatgtaatttaaaacctaagttgtgtttcaaaacagcaacaaaactgtattgtatttttttgctgtaattaactgtataatgtaaacctaattattttatcatggtttaaattttttgcatatttgctttatcttatgctgctgattttttttaactgaatttgtaagattttgtttatcaaagcaactattatgtggtgacttgcctatatcatgaattatttaagatttttatagttttttttaattagaatttatttcagatgttttgttcatgatactatccttcagggttatgtgcttatcaatgaaataaccccagaggagtgagggaaaataacttgtagccagttatattcaggaataactactgtaaatgatgaacgtgttaggagacctccaatatttgctacttgccaatcctaatttagttacaagaattggtaggcaatgctacttaattttggcaaaagccccgtcatctaa

SEQ ID NO: 43 - DNA, 69317 bp, Mus musculus
  source 1..69317: mol_type = genomic DNA
ggaggcggggccctgcgcgatgacgtgggcgggcgtgcgcgttgacggcccgcgtctctgttagtcagcggagcggccgaggccggacgttgcggccgaaacgcggagccgcgaacaggattgagtagcggccgcggccaccgcaggacggcgccgttctccgctacgggcttccaggtcgccgttggctgcactgccgggtgagtgcgcgggcgccgcggctcgggcggccgccgcttttccccggccgtgaccccctcccgggaacgcgcgcggggcgggggcggcgcgggaacaatagcgcgggcggcgggggcagcggggggcgtggtccactccgcgcgacctggcttcaccgctccggccggcttccacgtcgcgcggggggaaatggagcgggtgggcggcaagttcggaggtgctcccgcggaggtcgggccgacgcgaccgtgcatacgtctcccgcacccacggggagcgtgttttgactgtgggcggtttctttgtgcggacgtgagtgccgcgacgccgagaagagccgggtggccgcgagcgcgccggcctgcgggccgcgccttgagaggggcgcctgccgctgaccttttgactttcccccgccgctgtccctttgtcttgcgcttgggttcctagtccagacaaggtagaaccaagtccattgtaaagtaccgtaaggaacgcattacattgttattcccgaaagtttcccatcccaccgggaatttaatatcatgttgactgcacagtgtccggtagtttctatttttacttctgaaattaagtgatcttttcagtagaattctggtctgccggtctattgtgttttgagatcagcttccaccaagtacctggtcagttagaacatgtttatttcattcattcatttggcaacagttagtgctgtatccaggtggagaagatgtgaaggccaagagaaagacccttaaaaattagggtagtatggaacagaatagatgtgcctttaaatgagacgattatgtaagggatgtatgttaagtaaggtatttggctcatttgactggaacttccaaggatagtgttaggaagaatatccaggtttggcttaaatatactacctttattcttaaatcccaccccccccttgtcaattttcgtatcattggtaatggttacttcagttctcttattgaggctgttaaacttggaaggtttacttctgtgtctgacgaagtaatcaaaatggtacttagaggcctattttgcatcatttccccatcaccaagcatggaagtcatactcattgggttgattgaaagacttttatagacaaaaatttaaaataaagccttaaattctccacgaagtttcagatgtgtcacataccactctcagttggctagatcataaattaatagaggatgttacctgttaaagaccaccaaagggtttggaatcactttttcacttctaggttaactattcctgatttttttctatatagttaataaaatagaggattatggcttgtgtgtatagtcataaaaagttgagtagccatacttaaaagtcagagatgctccaaactctccaaatgaaacacttacagtgtcttgtagataaaggggatttacttggtactctgtcatcaaagttgagaactttgtccacttctagtattttaggtaagagctttctctagtcatgtatgaatacacccagacacaacagtgatgtttcattaagaatctagcatgattgcatttatctcccttaaaaaaacttatgacggtgggtgtgcctgcatgatgtttttgtggggtggggtcacacatgccactgtgtgcatgtgaaagcctaagagcaactgtgtgggcttcattctcttcttccacctttctgtggggtctggacatggaactgggttcccctgcttccaggaacctttacccagtgagccatatttatctttttgtgactattatttcacaagggtttcgatgatttaagtttgaaaatcaacatgtaaatgtatcttacaaatatttctagtagttcagcgctgcttaatttctttagaggtgcttactagaaaggttaaatcttaacttgtatttaaccaactcacaaagcatatgggtttaaaaatccaagttttggtgcatttccactatttgaaaagtatcttttcagtatgaaagtagttcagatgaacttatttactggtaagataggaatgaaaaaaaataagaacatgactttgttactataagatatagatcttgagacagcaaacttttattgctttatcttgttaaatatattgggttctggaagggactccagaattaagaaattatttgagtgattcagactctacaaaggttcagttaggttgttttctaaattctgttgtttaaacagcttttttttttttgatacttaattcacataaaagagttacccttatagagtatactttttagtggtttatttgttaattatgcattcatcactactatactattctgggtcatcattttgcacaaagaacccccaccccttttaaaaataatctgtctggtgtttgaaaggaacagaatatgttaccttagtgagttttatcagcatgacagactaggaaactatatgcttcctgctccttgtaatcctgagagaagttagctggaaagggattagtgtaagagtaaactgaggcacaaatggtggcgcatgctgtaatcccaggatttgggagtccaaggcaagatgagtttgagactgttctgggtcccaagctaaagaataaattgtaccaaaatgaatacagttaggatcataatccatgaccagtattatggaaataggctggagaagatgctagatggcagtgaaagagtaatttgttgttaataactagctgtaaaccatcctagtggtatcgaggggttgctgaataggagccagcttcttgttgctttgctttgcctgtcacttgacaaatttgagtcatctccatacttgagatactttacctcaggtgtagaagtatgtctgacttaggagtcagttctctagatgactggtcaagtcagtggtatggatttctgactgatgtaggacaaggaagtcacaacctggagctttacacatgaatcacttgctctttgaattgtgatgcttgttgtctcagtcctgatcacggcctaaccattcaggagctatgcattcctaccctaatgcagctctggttcaggattcagagttcactaacaggtgacaggagtactgacatgagtcatcctgccattcagagcagtaggtgtgcctaagatagtccaggaacctctgcttccttgtagtttgtctttagaagtgtggcatctgctctgcaagttcttcgttggagttgttgagtgactggaaaacttcaggcaagagaagtaagaatcagagaaaattattaatttgtttcttatcagacttatgcaacggtttttgataaaagctagatttttttttcttggagtggcaaattctatttgcttcagagcaccatgccttctgatgacatactcttccaagactatggaagatgggaaaatgggaaattcattattccaagaagcttatgggtttaaggcatggttacatagtgaattatgttcctttaaaggacaggaaaagcctcaccctaccaaagcctgctgcagatctctgaacactttcggggtgtgtgtgtgttgggggtggggggcctttgagaaattttttgccattttctgtatgatgtaagttatatcacaaatagaacaaatagcctacatctcctgttacatcttcagcaatatcagatttggttaaaatttgccaagtttttaaaaaagtttaggaaccaaaacataggaggtggctagcatgtctttaggatcatctctgagtcccactccatattccacatgtaactaattttgtgacatagctagttcaggttatgcagcatgtctaagccagccttactagcctttaaacgagaagacaataccatactcctatagtgtcccgcagtttacttaggcagtgcatgagactgctgtggttcttggtggtagataaaccttcaggaagctttagagttttcaggaaaaaacatttttttttttctgttttaaatgacttaaaaatgtcaagtgaatttttaatcattttgatgcacagtacatattcagattcttcaggatatgccagttgtttctgtctgcatctctggtggatttgttaaagtatgaaaatctcaactaatctgaattgcctgggattatttgtgttaacatttggactggtaatcctctctgatttaaaatttggaatcaatccaaaaacaaataattatgtctggtctaatgccaccactccaccccacaacctacccccccccaagccatttctcacaacacagtagtattccctatgctttcttaggtttgttttggcaaatatctgcaaagtaggaatgtaggagctgagaataattctaatcatgttacacaatcaaagaaaatgggacactgccttatcttttatgtttaatcttattgaggccttcgacgtgaagaatgcaaatttatcagagatctgctaactacagtagttctttggagttattagtgttctttgcagtttctggggatataataaatggtatatggcatttcttgttccttcttggggatagcaataatgaagacactgatgttatataagacagattccctgagaacccattctatgccactttaggtagtaggtggtttggaagcctgacaggtactgaagtaaagtcaaatctctattctatagtctcagtctaacttcacagagaataaggacaagcatgcaagcaagcagaagcaaatatgttggccatttcattaggaaatttcttttgcctatgagatatttggaaatgttccaatcttaacatggcttagcctacctttaaaaaatattgcttgctttgtaaagagcagaaagcaaagtatctttcctaaatttggttatagttgaaagtgtacagaagaatcaaaatcacaaaacacaaacctcactgaagttgtttcaacagagtattgaaataagtttatggaaagtatgaatagcagatgatagagaagacattgcatatactacagtcctccaacttgtattgaggctatgaggtaaagcttgatctgtgctcagagcacttttaagaaataagtatttctccagtaccgagtagctttctgatgtgcggaggacccagcctgccagccattaggttgctaaggacagctccatacatctgccttgcttgggagggagctttaaagcagtgaagacttcacatttcctgaaggctgttagtgaggcaggaactccctcttcctgaactcatgagaggatgggtctctggctcagaagttgtttgagtcaactgaaggctatagagatagggaagaagctattgctacaaagactagagaaaggaccactttgcagtcaaaacaaaactcaaagcagtaaggctttgttatactgagaatttatttacatttcatttaattctgacagagaagtacaccaacttcagcatttcaaagacttaaaaagtgacacagttgaccttctcactgtgccagctacccactaggaaactgttcctgtggatccttccaaagatagttgattcaagtacaagtgaatgtagatctctcttattcgaaactttggtctggctatatttcagaattggggcttcttctgtaagatcaatttcagaacgatgataaatgcatctaccattttgtgcaaatcctgataggaggtatatctaaccttttgacagtgacaagaccttgttaagtgtaagggctcacatttgagaactggatagttcctcaaaaaaacaacaccttcagctgcagcacctccaccacctcctcagagttttaagaaggcttactgtttggtgttaagccacattactgacctcagctaaatgtaagctcaccggccacaggttgaacatacctgcatgtaatcaaacattaataagcataggtactacgataattggcacgagtaaagatacattctcttgccagttcttgtcagattttgctaccatagagggcacacttattttaagaaacatttcacctttattttcatggattttggtctttcccaaaggggaccatactgaatacccactgtccctcttccctttgtacctaagtgttgtagaattgctgttctttgcagattttttcccctaatagagcttcatttcatatcactgtgtaagtaacattttaggtagctttgtgatattccactgttctctctttggcctcctataataaaatgccttacatagggtagattaaacaacagaagtacgtttctcacaatgaccggttggtttcctaggttagggccctctttttttctccctatattctcacatgaacagagagtgcttcagtcttttccttttctagggacattatttcaccctatgagctcatctaacattagtacttcccaatggttgcatctccgaacactgtcattgtggaggttatgactttgcatttgggggcaggcacaaacatcaagtgcttaatttcatcatggtggtgtgccatttgcccaggtgtgttggcacatgctttaattccaatgctctgagtttgaagtcagcctagtctacacagtgaattctagggctacatcttgagaccctgtctttaaaaaaggaaggagagcttttaaaggtacttgctctttttgatatatagttaggttacttctgaccaagtagattatcttgtgcacacaccacttgatattatgcaaaaggagggtatcttataggataaacttgtagaggtaaaactaatggctcagagtgtttatgcacatgtagttttgatacttgtaactaaaatccaatttccattggtcctgcattgggtaagaattaactacttttttttcttcattgcccttaggagttagattaagagtcatggaagggctatttgtattttctttcttaggaactgactttatccttgatttggtgttcattttcttagatttgtaaaatttatttatttatttccatatggaaagagctgtagagacatcagttgtgagcaagaatgcccatgtgagtgctgggaaccagaagggcctcttggagagcagtaagtgctcttagttaactgctaagctatctccagctctagtttttttctattttttgtttaaaaatttctgctgttttcctttttctttctttttaaactttttttaatgttttattaattctttgtgaatttcacagtcccactcatcctgtcccttcatatctaccctgcaacctccccccaaaagaaaacaaaaaataaaaataaaacagcaaaaaaacaaaacaaaacctttttgctgtggaagctgccatataacactgtgtgtcacacagtgtgccccttctgtccacacatcttcatttgcatatgtccattgcagtgagtctttggtctggtttgaggcccctgtcttctagtactctattaatactggatccttgctgggactcctctcagatatcctgttgttgtcctgggtcatggagatcctgcagctttggatctgcaggactgaccccttactcacttcagcagttcagagatggggtagatattagaatgggtcaactcagagccctggatctgggcctacatggaaactgaattggtcagccctccagcactcctctgagtcactatggctagcttccctgctttgcccaggctctccctctctcatgacctagggggctcatcttacctgactgcatttctttgtttgttgaccatcccaccagttcctggcccttagagttgctgggcatggtagcaaacactttgaatttcagcatttgggaagcagaggcagacatgtctctgtgagttgaaggccaacctggtctacaaagtcaggacagccaatacagcctgggcttgttacatagagaaactacatcttgacacccactcaccaccccaaagaccctgaagtaatttactactgatgttgagtaagctagaaaaaaatgagaactcaaggaaaatgggattctagagtattctgatgatgtaaatagttaatactgacgcaggcttaccatgtttccaagtactattctagtgtttttacattgcttaagcatcccatgatgacctcaggcatgctaactgattttgcagatgaggaaacatttatagattactgggaagttgttggtgatgctgatgaacagtttatttaaacaagaagctaaattcaagttgattaaatggtggagttttgttgctgttttgctttttggtgtgtgggtgtagacaacctttaaaaaaatgaaaatgtggagtccaaaatgtaagtgaaaatggcaatgtttatggaagaacatatttgattgtcataggattggtgctttccataggataggcaaatcagtttgtgcttttccaaggaatcttggtgtttggaaggtgaatatttctgactctgatctctgtggcatttatttttttcagagaagtagggcattcaggcaagcagaagagaatggaagtgtagggagtttgaagcactggttcatttaaagtttgaaattttgaatttaaatctataaagtttgaaattttgaatttaaatctatcagtctggtttgtgacctcctctaacccccaatatcacattatttaactgattataaagaaatacaagtaaggcattaagatttattcagggtcaggcttttgccatgtttaacacagttcttatgggaatcaaaatcagtagaagaaatggctcagtggttaaaaacacttgctgctcttgcagaggacccagattatattaacaggactcacaagtggctcacacatgtctttaacttcaattctagaagacccgacttgaagtatgcgcatggtacacctacatgtagacaaaacattgatacagataataagtaaatctaattaatactaatttattaattaatattttgtgactggatttgtactatatgactccggctggcctggaaccatcctcttgcttgtgcctccttcctgggcactatgtttaaaggctagcaccaccacactcagctaaataaatcttttaaataaaacagtaggaagtgcagacagatgggtagatacataagacttccaagaatttcatagtgtaagggctggcaggtttgcagtctttgtcataagtaggtaggagaagaaaaaccagtgtttttcaaccttcctaatgctgtgaccctttaatacaattcctcatgttgtggtgacctcaaatcataacattattttcattgttactttataacaaattttgctactgttgttaattgtaaagtaaatatctgtgttttcagatggtcttgggtgacccctgtggaagagtagtttaatcctctaaaggggtcataacccacaggttgagaatctctgttttgtgtactcttgaggcagaatttcattttcaaacagttggaagcctgcccacattatcaggaataatttcttgtgcttaaactcttctgacaatagatattaacatttataaagtatttccttaatagctcctagatttgtgttcagttgaatatcttggtataacaacatagcaaggataaccccaaattgattatcataccagcttagtacaagagaagaaacaaggaaataggcttttttaaaaagatgtgctgagagtagtaacagaaaatcatggactctgacatggatgaggaggttaagtcaacatgtgcatagcagaagtcatagtgtagagatgctgaaattgtcagttagtacttgggatgggggtgatttcactagtgcagtggttctcaacatgtgggtctccacccctttgggggttgcatatcaaatatttacttacgactcctaactgtagcaaaattatagttatgaagtagcagtgaaataattttatggttgggggtcaccacaaaatgaaaaactgtgttaaagggcttaattaaagaacagcattaggaaggttgagagtcattgcactaggataccagttactggtattaataatgcccaggatgatcctagatgttgggtactgagatgggaaagagatataaatttgtggaatcaggaagatactaaattaaagagagtgggccttggagtataactcagtgctagaagcttacctagcaagtacaaagccctgaattgtgatatgtgtgtgtatatgtagaagggttagcctggatatgtgcagtcagcaagccatgatgggaataaagatgtatactattgttggtgtaaatattatttggaggtttctacccaaccttagatcattagttcacaaataaaagacacaaaattttatatttatactaagccttaaagcttagagttggactgatatcatcgaccctctatgctattttatgtatttcctgtcaataacttcaagataatacttgccatgttccacctaagcactcctactcttaacaggctggccctaatgaccatgcactcatgatctgcctaccccatggtggcttttccttcttcctcctctctctttgtggtctctgcctgagaccccaagctcggtgtcttacttagggtttccattaccatgaagagaccatgaccaaggcaactttttttgtttgtttgtttgtttttgttttttggggggttttttgtttgtttgttttttgttgttgttgttttttttttttttttttttggagacagggtttctctttgtaaccctggctgtcctggaactcactctgtagaacaggctggcctcgaactcagaaattcgtctgcctctgcctcccgagtgctgggattaaaggcgtgcgccaccacgcctggcccgcaactttttttaaattggttattttatttatttacgtttcaaatgttgtctcccttccccatcccccctccatgaatccctcttctcctcacatcctccccttcgcctctaagagggtcctcctcaacccatccatgcagtcctacctcacccctctagcatccctcttctctggctccttccactgaggccagacaaggcagtcctctgtaacatatatagcagggtccatggaccagcccatgtatgctcattgattgatagcttagtttctggaatctctgaggggtccagttaattgatattgttcttcttcctatgagtttgcaatccccttcagctcctattgtcctttccctaactcttctataggagtccccaagctcagtccaatggttgactgtaagtatctgcatctgtctcaggtgggttctggtagaacctctcaggacagccatgccaggcttatgtctctaagcacaacttggcatcagcaatagtgttgaggtttggtgcctatgcatgggatggatcccaagttggggcagtctctagctggcctttccttcagtctctgcttcattattgtccttgcatttcctttgacaggaacaattctgggtcaaacattttgagatgggtgggtggccccatccctcaactggggccaaggcaactcttaatgtttaattggcgctggcttacaattttagaggttcagttcattagcagcagcagcagcagcaagaagcatggcattatgcaggcagacatggtgctagagaaggagttgggtgttctgcattgattcgaaggcaaccacagagactggcatctgcaggcaactaggaggaagctctcttctgtactgggtggagcctgagcgtaggagacctccaaagcccacccccacagtgacatacttcctccaacaagtgctgcttcttgtgggccaagcgtattcaaatcaccacagctagaaattttgctccttcccttctctcctgcccagcccaggctataggcatctttattaaccattcagggagaacttggagggcaaggtttacacaacaaaagctggtatacataaagatctcatcttggcgcatccagatcttgggatacagtgtttagcatttgaatatatagtagcaccagaccaactcactatatacatgtttcatgagcaatttgcttaacattatagagcttagtacaatacttagtactatatgccatatatgaaggcagggaaataccatagatgtagtatgtaagtgcgcttgttacaaattaggaattttgggcaagggataaagaaacaggtaaaataaaggatttatagagcacctttacagtgtgaattcaagaagtaaactagaactggtgaagcaggcatgtgagatgtgatggatcagttcttatgatgggagacagtggtattagttctagtgctatgggactctccagcagtggattttgttgttgttgttgttattgctgttgtttattttttgttttcagaggggagatagggtctcactatataaccctcttgtttgtcctaaccttgttagagactgagatgttttagagctaggccctggcttctagaaaaactgctttactttatgttttctttactcttggagtctgacctaacacaagtgttctgttttcgttgattttctcagcaatctttgataaaacctttggaaaatggaagttgtttcttggttaccttactttgtggcctcttctctcagaaataagatggtgtatgtatctggtttaagagcagtgtttctttgttgcacttgtccatacattctgatactactgattggttgactgcttgctttccttccagttttggtcccttattaactgaacctcttaaatgactcccaacttcttttttttgttgttgtttttgttgttttttggttttttcgagacagggtttctctgtgtaggcctggctgtcctggaactcactctgtagaccaggctggcctcgaactcagaaatccgcctgcctctgcctcccaaatgctgggattaaaggcatctgccaccacgcctggctgactcccaacttctttagaatatttatttatataaacaagttgaaagaatcttacagggaacaccagttaacatttcatctccctcctaagtgactttaaaatttttaattttctttgtgaagtgatcttactgcaaagcttaaataaaataaaaagagagagaaaaaacattcttttccttaagtgcttaccaaaattcactagtgaaatcaccggggccttgtactttctgctaaagaaggtactaactgccggtacactttctttaatagacatagctctattaaggtgactggttctttttcttttgtgtatatgcttctgtttaggctatatttgtgaaaagaactttgatgggttctttacagaattgattcattttatcctaagttaactaggtcagagattcacagtaattcatagcattcctttgtcattcttttacaaaagggtgtggggggtcagttcttacctagtaatccaggctgccttgcaacccacaccttagcccattctggcctcaaactcattattctcctacttagcatcctgaatactgggtcatcctgagtaaatgcgccatcactgccccgctcccagcattctttttaaatcttgagacagactcttcctaagtgaaccatctggctttgaactcaccgtgtagctcttacaggccttgaagttgtggttctcctgcctcagcctccttagtggctgcaattataggcctacaactcaaggcccaactgttgcttcttcctcccaaactactactttctatttgttccttgccctagagaggtatctattttactttatattttcagataagcttttgggttttgttggtttcatgtatttccctggttttcttgtggtacttgctttaggtggtattattaatttttatgtctagtattccatgtttggtcaatgggaatttctaaaggtagcttctgtgttgacgtggtgcagagatatgactgttcactgagtgcttccttacttgctggcagagtgtttcacttgtatttaccttgtcctaacctgaactctaacctaactctctttctttagaaagttgttttcagacttatttttatttttttaattttgtaatatatttatgtacagaaagcttagtgtacatttaacccaatttagtggcaagttctttatcctttgccttttccagcttggtaatgcaagccacagacttaggacccaggacattgcctcctcagtggtaacagatctcctcatagctgtcactataattggtcctaatagcttccaccagcttagccagagcacccttgtcttcccagttaacctgtgtgaaggcaacagtggtgcgtgtcttcctgtggaccaggcacctcagcctggcctttccttgatgatgcagtaggacacccccatctttcgacacagtgcaggcaggaaaaccaccagctcaatggggtctacgtcatgggcaatcaccaccagctgagccttcttgttctccacaagaactgtattgactgtggtgactgtattgactcctgcttggaggacaggtggtctcttagttgggatgtcgcctttgccagcagctttcttctcagtatgggtcagtagcctttgcttctcgtcttgctttgtctctggcctgtacttgagggcaagcttaagcagctgagtagctgttgcctgtccggggcctgggtgaactggttaatggcagggggtgctttgagctgcttatagaggatggctctttgccactgcagcctgatgtagcgggccatttgacgaagtgtgttagatctcttttgggctggatgtcctgcccaatgccagagttcttgggacttttctcaaataaaagatagaacaacttcttggcctcctgtttcttgaggacagcgggggaccagggacaccttcttccccttggccttctttcctttgggcatcttgctcggctcggctggtggagagagccagacttatttttacatattgtctttttttttttttttcttttcttttctttaaactttgaactggtttgcttattgggatttgggcaatttatggaagagtgactgagaccattcctcatttcaaaaacagtattttcctgcttggtttaagtaagttagtgatttgtagttgagtgcttatctcatgttagatgaagaaacagttgaatgcctttttaaaaagtttaataattcactttgtaatattctgggttagcttgtttggtgttttggcatctctataatttgccacttttaaaagcaattgaatttttaatttaaaaaagcacaagtacacaaaatatttcacaagtagttgtttatatattctttctgacagtttttttgtgccaatactcttgtttcttgccaccttaattttatagaaggggaaattaaggcaggatgagatcagtaacaagactaatttgatgcatcatgaggtgtaactggacatttggctactttattgggttctttctcctgcttccctacactaccccatcccttctaaccccctaacaccaggtcgagaagaaaggttagagaggaaaggaggtgtcaatatcattagactgcttcctgctgattaggggtgtccttgggagaaagtccagtctttgtcaatctgcaatcagcaatctagcaagcaggggcagggacagcaggatgagcagcagcctctggggctgctctcaggactctggcatttttatgccctcttaagagtccccagaattccaaaatcacacacctgccagagcatgagacaaatcatagttagctgctgtggacaagctgaagaagccctatcatatcctacatctgggattaaaacaaaaacatattcatataacatttctgtgtttttaaagaaaccaaaattctcactgcagtgaggcctgtgactctgcatcctgttcttccttctcctcctgttgattccagtataataggtattactcctgttaccatagtgccctgttttgatattacaagagccatttaaattttgaggtccttaattggaagtatctagagcctcttgtatattcctttgaaatggtgttctttgctgcagttctctggccaagaaatagatattttcatgattaatgccatttctttgaaaattgaggccttaaaaagtatattaaatctagttagagcataaattttaaagtattctgcatagtataggttaaataagactgaaacactaacaacagtgtctgtggctggtatttttgtatatagttactgctagaattggagaatttttattttaatagagaaaaacatgttttatatggtattacattttgggtcagaatttaaaattctgattttgttgatatggtgctcttaaatcttctttcctggcttattcctgccctatccctaccctcctaaagttcctaggaccatatggtcactcgcttatgatacactgcttttgaaaagatgaaaggaaggaaggaaggaaggaaggaagggagggagggagggaggggagagagagagagagagagagagagagagagagagagagaagattttgctgtttgttttgttgttgttttaagatcttgtctcacaatgtagtcctagttggcctggaattcacattgtggaccagactggccttcaactcagacacccacctgcctctgcctcttgaatattggaattaaaggcatgccccatcatgtctgacaacagcaagggttttgaaaactgctgcattatatgaaaccagctgtgatggctattcctggttgtcagcttgactacatctggaatgaactacaatccagaaatggaggacatacctgtgatccagatcttgaggcatagtggccatgaaagtttaggtctaggtaaggtagtacacatctttaatcagtcttgcttttctggtatgttggggtaaccagggctcgctgtggtgggagaactaggttgcgatgatgccaagtagccttggtttctgttgcttatgttcttgcccttgtctcttgccatctggttatctgtggtgttagctggtcttgctgtttctgactatggcttgtccctcctacaagcctgtgtgtctgaactcctggaagaccagttctctcctggaggaatttggatatgaagagctatggcatagggtcagctctggggtgcagatggaaaccagaaggatcctgaccctggctgtgccttagtttttgtgtcctgatggctctgggcaggtccctcttgggccaggaatttgagcagaagtggtggtcttacacaggcgtgtctgcactcctgagagaccagctctctcccagcagcgatatttgggtatagagcactgagctaaataaatccttaatcatgtagatcccaggcatttgccatttgtctcatagttggaagttttgtcctttgcacatgtagattagttttcagccaaaatcttaggcaggttactactacagtactttggtgctctttctctagtctttacaccaacctacagataccagctacctttatcttcctctgtcttgttagctcagagaagctaccatgttttgtttagtgtggcctttttttacagtgttctggaaagagtgcctgtctttgtggcaggttagttacagagagcttatttaatttgtttttccttttccagggtttgctggatagttttgtgtcaacataacacaagttagagtcattttgaaagaagaaacttctttgaggaaaatatccctactagattggcctattggcaagcctgctgttcatttttttttattaataattgatgtgatgataactgaggatggtgtcatgctgggctgatggtctgggtgctgtaagaaagcaggaggccaggtgtggtggtgcacatgccacctctgatgggaaggtctctgagtttgaagccaacctagtctacatagtgagtaccaggacagcctgggctgtcagagagaccttcacacacaaacacacaaacacacactttcaaaagagtaaatgagtttgatagtagccagtttgtgagtggcggggaggagtgcttcctcatcagtcagttttgttgtgaggtcaggaaggacgagcatgcggagaaggagaacacctacaccagctatttggacaagttttttagcaggaaggaggattccgaaatgctagaaactgagccagtggaggaagggaagcgtggggagagaggccgtgaggcagggcttctgagcggcggtggggagttcctcctgagcaagcagctggagtccataggcaccccgcagttccacagcccagtggggtccccactcaagtccatccaggccaccttgacaccttccgctatgaaatcttcccctcaaatccctcacaagacatacagcagcattctgaaacatctgaactaaacctcagcagacatttctctttgttcttcatgaacacaagttagagtcattttgaaagaagaaacttctttgaggaaaatatccctactagattggcctattggcaagcctgctgttcatttttttttattaataattgatgtgatgataactgaggatggtgtcatgctgggctgatggtctgggtgctgtaagaaagcaggaggccaggtgtggtggtgcacatgccacctctgatgggaaggtctctgagtttgaagccaacctagtctacatagtgagtaccaggacagcctgggctgtcagagagaccttcacacacaaacacacaaacacacactttcaaaagagtaaatgagtttgatagtagccattgtggggcctctgttttactactgttgtgaagaaaaggaaagaaatgagaaatttgaagaaaggagaaaattgagtgctacagagaatggaaagtaattttaacagaaaaagaatagtattgtgaactcatgaagattggtcatgaagtaacagttgtattcattctgccctcctatgctagtgtctatttgaacttgatgtagacaggaaagtaactggatttatttagagttggtgtttttgcaaatctggaatttaaggagatcagaatattgataagaatttctttaaataagatgaaatatgaaatttaagttgacaaaggatataataaaagaagataggtggggggggtgtagtgattcaagatactgaaggctctctatggtcagataacgttcatattagtgatctatttacaaggaaaagagattgtaattgtccagtgtggtggtttgaataggtttggcccccagagattaatgtgtttcagtgcttgagcatagggagaaacactattaggaggtatggccttgttggaggaagtgtgtcactgtgtaggtgtgctttgaggtcttctgtgcttaggctctatccaacatggaagagatctcctcctgtctgcctgtggaaagttccccttctgctgtctggagatcaagatgtagaactcttggctcctggagtacctagtctgccttcatactaacatgctttctgctatgctgatatggaccaaactcctgaaactgtaagcctgccccaatttaatgctttcctttctaagagttgccttggtcatgtcccttcacagaaataaaatcccaagatgttggtaccagggactgggtattgctgtgatagggctgacatgtttttgcttggaggaatgtggatttggggattttggatttggaaagcagtgtaatgctttaagtggggcttaatgggccatccttgtaggaacatggaacacagagtgattcctgggggagggggttggttcaagaggtttcagaaaagaatttttgtgatattttggtgaagaagtggcttcttttgaccttgtctgaagagtgtctgaggctatcatgaagagatttagattaattgtattgacaaagaaaatctcagaacagcctagcatacactctcttctgtgattcactcttataaaaaaggttttgatcaagcacggcaagtttagaaaggaaaaatacaaactgtatggctcaagtattaaaggggcactaggaagtaaaatggagctaaatcctgtgttcaaggacactaaatggaattaagggagtgataaccttggggtaggatcccacctagctaagattattgtttacacatttcaggtgttattatgacttgattattgttttcatttggacataaggagatatgattgtgcatcacattgacaagggagggattatggtagctagtctcttatccacttgactatgtttggaatgaactacatataatgcagaatttataaagatcttgtgaaagggagttaaagaaaagtttaggttcagcaattgtagtaaatacctttaatcccagcactcaggagacagagacacagagatctctaagttctctaccttgaactaatcaagttctagggccaagcttaggcagtaaaggaaacaattgaaaacagaaaactggtgaagatggaatagaacaggggagggggcatgatccagccccataaagcagccgaacttggcactttcagccatgtggctctctggctttagagacaagaatagaaggtactactgggaaaattaatgctgattagctagagctaagaaattagcagtgattaagaagagaccagcatcactgaggtgacatcttctgggaagtgttttctgaaagcacaaagaggctgtgttccagagataaccaaggttgtaccttgtgctggcagctggatttggtaatgtgtaagagtcatgtgggtggtactggttttgaaatcatgctataccttcacagcaataaaaccctgtgtaagacatcaaggagtgcttgactatttctagaggtgaatcaattcagatgagccatagtcacagatggtgaatagacaggtgggaagatgattgttgatgaccacgtcgactgaactgaaagatttcagtttgggagggtttagtcttacatgtggctatcactcaccttgatagcagggtttataagttaaaggggaaagttttagttaggtgagtgaaaggagttggagacaagacagtgagtggtgtaatgcataaatgcatgtgggaatgtaagcaataggtctgccagttttaaaccgagggtatttgatttgagcttgcagtagtctggaatccttggttgattaatatttctggggtgcttaaactgtctctttagccaaactgcacttagggaatgagaattaaatagttgttaaaaaaaaacaatgtatctgaataaatatttgactctaactatgggttacttgtatgatcacagaggcaattttgattggacatattttgggttttgttttgagacagattccagctgtttatctcagtctgtgtaatataagctggccttgaattcagaattctccttcttctgcctcccaaattctgggattatgggtatatgccatcatgggtcagattattagttggtcatcttggaaaaatcttgtatgaaaatatggtacatgaagcttaaaaagattagggtaacagatttgttttttccataatatttaaaagctatacaaattttgtgagttacttttgagtttacagttttagtactatttatagtactaaataactcactgttattcccagagagctactcctgcttaaaattattgccatctgctgttgtttccaagtggttattactttttcatcatgtattaaccaaatcaggacaacgtgcgttggtagacagatagactaacccatataggttagtagagcacattaaaactcaggctttgctctacacaaggccagttagtttggttttctttgagatgaggtcttgttatgctttacaggttaacttctagctttctgcctcagctccccaagtagctgggattacaggtgaggcagtgaaacaggcctctagttgatttttgacagaactacgtacaagttacttgagtcaggatggcctgttcagcagatagtgctggcatagtagtttggatattggtaggctacaatatgagctgttactaaagctcctactctctctctatttttccataatagatttcagatctatatatacatcttaacctataaaatatctcttccctctttgttctcacagtttaacccctagtccccagcaagagctagtctgcttttctgtaggtttataatttttttctgtttaagactagatttaaaaaaaaaagctttacaactatctaaaatcatgatatgaatgcaccaaagttgcctcagggatataactattttcaaaacattttacttcctttagattttacttgttcaaaataaagccctttaatacaacaaaaccaaaccaaatcaaacaataaacctcagctaagacttcaagtaaacaaaattctcagggaaataagctaaaggaaggcacagagtttcccagatacttaaactggcttttatctaggacggcatttaaaaagggattttgtttgtttttttgtttttaagatttattttgtatgtatggattatgtacttaacatctgtgcaccaccttcatgcatttgccaaggaatccagcaagggcattggatgtcctggaacttaagttgagatgattgtgagcctccatgtgggtgctgggagttgaacccaggtcctctggaaaagcagccagtgctcttaactgctgagtcatctcttcagcctcaagcagcatttgaggaactggaatatatgagtgttgtatctttctccagtgatgagtttttgacaagtttccccttatttgtaactattttaattgtaaaatacacactaaatgtatcagtaacatacatacaatattgtatgcctattaccaaccactaaacagttccaaaatatttcctgacctcaaaaagatatcctgcatctgtgaagtagtcattctgtctctcctaccctagccccaactgctgccgagctagtttttctctctgtaggtctgcctatctagattattttatatactggaaccttacaatatgtattacttaacgtaatgttctcagaatttatctgttctgtatcatgtgccatacttcatctccaaatgatactccattgtatgaatgtaccatagttaatttatttatcatgaacttgagttattgatagcatttggatattgtgaatagtgctgctgtgagcatgcatttttatttgggtatcatttttttctagttctttagagtgtagatctaacactataaagtgttttaacttattgaggttctcacctgtcataaaatgtttcattatctgttcctgctagtcacatacaaggattggtttttcacatcttagccaatgcttattatctatcttttatattatagccaccctaatggaatacaaagttgtgtcctctatgcagtgtttattataaaattataataattatatcatgtcttcctttcctttcttccctccaactgctcccttgtacacctctcttaatttatagccttaaaaaaaatctccctccatccctccctccctcccttctttccttcctccttcccactctccttccctctctccctctctctgtgtgcattttgaaatatataaatacaacctgctgcgtttctgtactgtcacttagtaaagttgaaggtgtgcttatttatgccatcaaccagcagttaaatcccagacttcctagaaaatggggcaaatgctttaggaaagtttaggaaagttgtgagcagatgtggaataccattccacagggaaatgataaactagctatacatacacactagtcatggtaagtgtgggttctgtttgtggtcaccatttcactgcccttccagccacacactgaagttcctattttttaaactgaaaattttctatttttaaattcttgttcatttaatgaatacatccaccacaaacgtattgattccttacagtagtgaccaaatcttttctttatttccattgacttgatcaagttttccaggctctgaagtgcaggaaaagtccattctagacttttttgaaatgtttgcacacagtaaaatcagctgttcatcttttagcagacatcagttgcaggctttgctctgtattcctttccttctacagtccactccctttactcccgtcccctccctttccccttctggacaatgaatctaagaaggaaaaatacctaattatgttttcagactaaattcttagttaagatttctgtaacattgcatttgtattttttctgccttcttaggcttgtatatcataacctaatctctatgttccttggaatcagtcatccatttacccttcatgggaaaaatacaaatgaaaacatatttatttccttattatccctctaggttttggagtaccgcgtctgaaatcattatattttagaactaaaaccagtcatatcagtgattcataatctaaaaacattaatttgtacatgagaaaaatataccttctaattgggagtaaaccccactttattgtacaattttaagtgatttgtaacttctaacagttgcagacgccagaagtaattggattgatttgggtactctcaagaggttgttttcattccttttactttttttttttttttaacttaggagttttatgttttatatatctcccaaggaccttgactttttaggtttgcctcagccctataggtgagctggatgagagcccagcagggtcgcaatgttctcttccccaatcccagttgttgttgttgttgttgttgttgttgttgttgttgttgttgttgttcttcttcttcttcttcttcttcttcttcttcttcttcttcttcttgttttgtttgtttttgtttttgttttttcttcatagaaactcaggctgttggtctagccacccgttctgttttctgtctgttctccttcaggccttcataatgttctgcaatgtttgtttatattcaggttatatagtttaaaacaaaacaccttgtgtgtttgtttccatctttgctttcatataatatctgactttgatttaaatttgtgactatcctgtcattcatttttcttgacagcttcttgattctctgcttttatagattataatacgctgttcccagtaaagttttcctttaaagttactattaaacttactactatccactagatggctcatgtacaccgctttggtggcacaaattgatgtttgacagccattgtttatcatatcaaaagtaaagacagtgcattatatactttgaagattttatattttacttttgacatctgatttggagtagatgtggtgtatttctgtagtcctagcacttaggaggtgaaattagaattgtgagtttgaagctagtctgaagtacatacatataaagtgttggaacaaggtaagtttgtcttttttaggtggtgagacaggatcttgatattgtagctcagactggtctgtaattctttatgttgaccatgctggccttgaacttgtggtctttccgcctctacctctacagtacaggacttgggctgcatcccttggctgtgtctgtctttataaaagtctcctgatttatttttgagtccttttgataaactatgtaaaataggaaatatagttattacctagttttcttaaggaaacatgtaaaataatagtaacagatttttaaaaaatgattatttgggaatctcatattatacatcctgatagcactcacctcccagtcctcccatgtccccattaggacctcctacccacccactcccccccaaaaatgaaaaaaaaaaaaaacaagtctattttgtgtagttcatatactcaactggagcatggtcaaatccttagtggccagccagtcccccagtggaggatggggagtctttctctgcctgcatctataccagaacaactgtggagagctatgtctctgtgaggctgccagggagaagcagggccaggtctcctgtactgaatctccatggattcaggcagcagcccagatcacatacaaacaccatggactttgtggtaacatgagccacaaagatcaataacaggccctggccatatccggaccactgacccacttatgttagcatggccccctgaggcaatagcctgagggtatcaccaaggtgtcagtcagccagcagcacagactgcatagaccaacatgacctctggttgcatagtggtccttcaaggagtccagtccagaaagtgaactgttcttcctctcaggcctccattgcccagagccaagatgatcccatggtggctggttcaggggctgagtcttcctctgcataagctccaagctattgtacactcactttcccaccaatcctactgggcaatgatagcatgtcaacctcagccctctcccctcacctgtcatcaccatcatgcctccagttctgcctccataatgccgcccctctccatcacatacttgtcaccatcacgcctccagttctgcctccataatgccgcccctctccatcacatacttgctcaccatagtagtccttgtcaccttcctgccatgaggcagcgagcaggccagggtcataaacagttttaaatgttacaaaagaagcagttgatttctctacttgtatataatcatttttctagcttggcagtctttgattctttttgctgttaagttacaatacagtctaaataattttaggagttctagctattcatacaaaagtaaccatttctggctaaaccactgatgtgcttaagatgtcatcattgataaaactgtgctggctttcctggaggcaccagggacctcagacagactcctaacataactgccatctgagaggcttcaccatgcaactggtggaaacacatgtgggcagacccacagccaagcattaggaggtgcatgggggaatccagggaatcttatggaagagggggagaaaggattaaaggagccagaaaagttgaaggaccacaccaggcccatggcccataggcccatggcctaacaaagagcatgcataggatggacctaggccctcagtatatatgtagcagtttgtgcagcttagtcttcatatgggattcctaacagcaggagcaggggctgtctctgactacattgcctacctttggctcctttcccccaactaggttgccttatctagccatagtagaagatacccctagttctactgtgacttgatatgtcaaggtgggttgatatccatgggagcttccccttttatgcggagagaggaaagactggaggataaaggagatgggagagggagacaggggaggggaggggaggggaggggaggggagaggagaggagaggaagatgcaattggaatgtaaaacaagatgtcatcctcccataattataagtgtttggctgtgagtttctgcatctgtttccatagttgctggttttgaagtctttgagatgacttacatccctcatgccaccttataaattatcttacatgttgaccatattctgatatattttatattttttatgaattaccaagtattgtcaatattattgtcatatttataccacgttgctttgtatgaaaatttccagacttttttttttttcctttgtttttgtttttcgagacagagtttctctgtgtaacagctctggctatcctggaactaactttatagagcaggctggtcttgaactcatagaaatcccgagttctgccttctgagcactgggattaaaggcttgtactaccatgcctggccctgactttgataattgttgatagccaaggtaatagtaaagagattcatattttgtcttttggaatcctgggactaaaggtgtgtgcctccatgcccggccttcaacttaaaaatatttgattgactgattggaagatgttggcccaagagctatctgaggtatgactgacaaaggaaaatttagtattgattagaatttcagttacctacatatattcttaaaattaagaccatattagtaactaataatgtcaccaacggtcagggtcttgtgtttccaggtttttggcctttttttttttttttttttcaagtaattgaaagaaagctcacacataactgcaaaaatactacagaactttatttaaaacaaagcaatagaaaaataccagaatacacagcaagggaactggcaggccaactgagtaaagatactcagggatccagactaattttcagggcttcctcttacagggttcaaaaggaggaggaccttagttacctggggtgtagtaaggtttgttctgttttgacgtatagatagattggctggcatactcattttttccactgctcttgtctcctcccatagtgtaactgattttactcatatgcacacccaattatgtagaaaacaaatggtgactactaagggattcttcctcaaagttcactggaggacacagttttgtcttactgcatgctcacccaaaagtagttcaggccaaaaaattccaggttactaagctgttctctatttttgcctgccttcgttatataaataactaataaatgaacttttgagatggctaactgagtaagttcatttgcctttaggctgatgacctgagttcagccctcaggacccacatagtagagagagagaatgaactcttacaagctgtctctggtctaaatcgtgtactgtggacacccatacacataagaagcaaataatgtaaaatgtaaatgtaatatatacaccaatttttcaagttaactattcaaaggatgtcactaaactttatcctttcatccttgaaagcattacattatgaaatatctctacaagtataattttataactaaccattactattatgaaaaatatttgcaagcactaataacttagttgcttcatttatattgaatgcctagatgtttatatattttatttttaagttgtgtgtgtgtgtagggtgtcttttcatgtgtgcctataggtaccattggagtccaggagtgaacagtaggtcccttggagctgagttatagacagctggagtactttaccaggtgtgggtactgggaacaagcctggtcttctgaaagagcagtacacactcttttaactactacctctctctctagtctcacatgtttatatttgacttttcttggttggcaaaacaaggctaaattaggggccagagtggtgagatggagagttaagagtatctactgttctttcagaggaccagagattggttcccagaacccatgtcaggtggcttacacaaccagggtctctgataccttcttctggcttctgcaagcacctgtactctggtatgcattacacacacacacacacacacacacacacacacacacacacacacaagcactcatacacacacacttgaaaataaatatttaaaaaatagatatgtagataaagtttgaatctccagaacaagttgggtgtggaggtgtgaagagtcaaggatgtttctggcttgcttgactatagaggtagtgatagcgatttctcagctggatgaacatggaagaagcagatttagtgggacttgaaggaaatggttattttttgcatgcaatttgaggtagttttgagacatctaagtaagttatctggtagacccttgaaagtatgtgtctgccgtagaaaaaacgctcaataataaatacttgaaactcccgagttttaggtggtgataacaagttctatgggtagatgaaattcccctgggaatatataacaagagatgagggaggaccaagacagccctgaaggaaattctgtttgaaggccagtgaagaacaagggctacaaaggagactgactggacaggaacagaaacggatgagaaaaatcaatggtatacagtattcttaggaacccaagcaaaagtatgctaggtaggagactgactggccttttttcttttttggtcatttctggaaacaaaattgggaaatatagtctgtaaaggtagtgtaaagctatcagatcctctcaaatatatttaaaaagagggtgaagtaaggtgtttgtgagctttcaggaattttatgaaaaaactcaggaaagattaaaaagtataccccactactaggccactgaatattaaggttcttgatgactctccaaaggtttcaggagagcaaagaagagattgcacaaagcttactacctccaataatacattactgtatgctattgttttatctatcacatatgccacttacaacatttaaaaatttttagtagcttattatattatgaaaaagtattagtcatgttctagctttttaaattggagtatactaatgatttaatttccttaaggttattattactggaactctaatactctcagggccttttgatttctcttaggatcatttgttcttgttcttgtgaacccagagtgctgtttaaggttgcattgtttatcgttatattaacttattggtatttgtattcagaggccttttttgttccctccctaaagcacttcactttgttagaacttaaaagattatagaggctctgtttggtatttgtaaggagggtatgtttccccagcaaggaagtaaagatctgtggatgctgttcaccaaaattctctaaagggtgccagtattcagtcattcatctttgacactgcctatttagattgagggccaacacttgcaagattgttcccactgcagatgccatttgcaaagcacagttgtagctctttaccctacttgcttgccaccttgacacaactaggatcgttttggaagaaggaatgtcaattgaacaaatgctgttgttagattggcccataggcaagtctgtctatcctccttctgcccctttctttcataatctactaattccaatttgtgttgttcatacgttcatgggtgtcaggctatccactggagaatgagtaacctactagtagccacccatcttgcccaaagtgtaataattctttagctccagtaattgtcaactgtcaaaagctactcagtgagggccaggggcaatgtgaatttcctcatccatgctataattttgcctggcatgatcttgtgtaggacttagcagctagcctcagcttctgtcttgacacatccaatagccatgtcatgtccagaagacaacatttcacaacactgttcctcatccattctctgcctcttatattctttctgcctcctcttctgggttccctggacctacagtggggtgagaagtcctgataaagctgtgccatttaagtatgagtccctatattaacggctgcccactacaaaaagaagtttctctgaccaaggttgaaacagcccccatgggttagcattttatatggaactccctgtacctatgggcagctagggccacttccactgctttgagttgtggaagtgcctgtatgcctaactctgagtgagatccactctgacacatttctttctttcctcagttttctttttaattcctactgggagcaggcacatttaattacagaaatgtatttgtcatggaatcattctcttcacacatagaactttttagaaattctaaatatagtcacactgttggcaagataaactggtggtaattatatgtggaattaactaatacaaaacattttctataaaatgcatctgagacatatatcatttgctattcttaatttgtggttttaagtgtctctggtggtgattgaatgtgatcagcattttatcataagccttaagaatcttattagtaaagtactcggcaaaagttattattagaaaatgtcaggaatttgagtctgtccccaggaatccttttattttatatgatccatttttggatatatgaagattcaatccaaattagtacaaaagtgcttttaaaagtaggaattctcagggttagtgtcgtcaaattttgatcccaaacagggtccttggattgtagaactgtcccaactgtccctagtttacagcacaactcctgcacctaaaggctcagcattcattcattgcaaagagggactgtaaagattgtaagagagcagaaagtttgctgtgagcttcgctgcctagaaatgtcagagaagctgcatccttgaagttccaacaatatggctgcctaaagaaggatgacaccagtagacataccagtgtagaagagggaaagcctcaactcttagacaaagaacaacagacaactaaggagaagtctttctcagggaagagctcaagtaacactttacagattaagcaggttatggttatacatttaggagtgtgcgtgtgtgtgtctgtgtctgtgtgtgtgtgtgtgttatacacatgcatataatttaggaaaaagacaccataaatttgattgagaacaagttggggtacatgagagagtttgggggtggagaggagtcaaataatgtaattatctcaaaaacatatgtgacaagtaagagggcaggggcaagctaatcaattcatctctttcttggagttgggcagagatccaaaaatttgggtatctcctaatgataatttggattattagcttgataggatttagaatcactatggaaacaaacctctgagtatgtctgtgagggatttttttagattagattgactgagatgggaagacccaccctaaatgtaggagtcacatagtaacattggccaggactgtggaaaaaggagaaagcaagctgagattggtcattgatcactccctgtcaaaatggattcaaattatgagccaaaataagcactcctttcctttaaaaaaaaaaaaatgtttgttcaggtattttgtcccaacagtatataaagtacctaaaacactcctctcatggttctttctggcagtaagttatctactgtcctggtgctggtagatatggcatataaaatgaagattataatacgttagaagttgtctggacgtcttaggtccatccaatttggctaacccacctgaagagtagcttctggcccacatggaacattctttaaccaaagatacagaaggtaggactttatgaggttatgtagtcagtataaaaatgaagcaaggtcagactgagagtgagaaggcagtcactgacagcatttgagtagcatcactagacctcaagtgctacctagtactataaaaggaaaataaagccagggaattccttcctataccaaaattcataccactggtatagaaatttatgggtataaagtgtgtgtgtgtgtgtgtgtgtgtgtgtgtgtgtgtgtgcgtgtgtttgtgtgtgtgcgcgtgcgtgtgtatatgtgtgtgtgtgtgtgtatcaaagtatttttgagtaccttggaaaatggcatcttagaaatcaggtcactcagttgaatgtgttgacaaaattggcattcttttaaacaactaatgttgagcagccttagaaccaccttcctaatagtttaagatacttgtattttgaatgcattgtaactttagaagcttagatatcagctagctgaagtgtggtggtaatatacctatattgtgttctgttgtttaaagtacatgtttttctggtattgtttaaaaattaacctctctactgaagacagccactttcttctaattaagagtctctcctgatttttgaagggaagtcccctcacagacccccattagtgccctattagctgcctctgtatgatgtactgtcccttctaatgctctttcacctcagggcccaactatctacctatccctgtttaaaaaacaaacaaaagcaattttaaaaaacctcattctgaaggggaatcagtctcaacctctcttacctgtcttaacttgaacttccacttgtctgttagaattaggaaacggggaagagaagaaaggaagaaaagaagatgatattgacatattgatactagagattgaatccatgcaaggtatagagatagtaaaaatgtcctcttcagataagttgagggcttaaactagctgccaaaagccaagccaccagtaaaacccagagtattattaatacagcacccagcctaggtgtatagaaccatgtctctctggcttctggagtcttgagccataagacttcagttgtccaagcttggagctatggaatcccgagtctgtcagcttagccataagcttgcagcactcatgcacacaggtctgccagcagcagaagggctactcatcaaccaccgtctgaggagagccaaagcggccagagctgattgtgagcttttgtgagctgtacagtagcttctctagttttcctcttccactcactgttcttctttcttctgcaggctaatgccagtgttttgcttgcaacctttcaggccttccatctgacctcaccatagattatgacatggccccaggctgcccatgatatttattgagttgattatttgcattagaaattgtcagttggaggcctgaagaggtggctcagcagttaagagcattggctgttattccacaggacccagattcaattccaagcaccctcatggcagctcacaactgtctataattgcagctctagaagatccaacaccttcacatagacacacatgccggaaaaacaccaattcacataaaataaaaataaatcatcttttaaaaaaagaaattcatttgggtgtcagtttcttgttatcattgctttaacaaactcccagcctctcccccagcaaaactcacactccagaaattctttgaattccactggattggtgatttgctgggttaatgaatggtagcttagaattgtcttgcatgcattctgtttatcttgtttgttttaaatggagtctctatgttacctaacttacttttaaattcctgggcttaaatagtcctcactatatcagcttccagagagccagtattataggtccaacctacacacccagtgcatgcattgtgaagtagaatacttcagagagatctgttcagtacttaaatgaggagttggggagccttgactttttatctgataggttatagaatgttggtcaagaccaacatggattgcttgatgccctaaacacattagaagagtattgtttgtgcactaatgtatgaaaccccctcctcctccttgatcagtgtgtgaaggcccattccccttcttgaccttaccgaggtttcctgtcctgcttctatcctttcggccattgtagtgtatcaggacctcaccattgggtgttaggagatttgtcacaataaaagaactttgtctgttaaataggtgcattatatgcttatagtttgctgcctggctttccattgtaagaaaataataataataataataaactctagaaaatgtttaatttgcttgcttttgttctttttatgcctatgtatgtgtggaatggaggtgtatgtggaggtcagaggtcagaaatcaaccctagatgttcctcagaagtcagacactgtattttttgactgtgttttgaatttggtgggatgtggggcttgctaataaggctaagtttgatggtcagtgatagatagccaaggatcctccagtgcttgcctcccacacactgagactgcacatggcgctccacttaaccaactttttatatgggtcctggaccttgaactcaggcccttgatactcatgttacaaggtctttactgactagcttatcaacccagcctctcttttattttttttaataagataattatgcatttacaccagtcacttaaagattagcgaaacagttcatcataataaaaatgtttttaaagaaccagtcagtatttatttacatgtaccatgtactgacctaagctctgtggtggttttgtttcttgtgatgcacacttcttaatgaggatgacctagcagcctgtgttactatagtgagtagagtaatgacttggatgttaatactacacaaaatcattttcttaagacatgttttcttttattttgcagccttggtgaatatttggatgaagccattagactaattgcttgccatcatgagcagaagcaaacgtgacaacaatttttatagtgtagagattggagattctacattcacagtcctaaaacgataccagaatttaaagcctataggctcaggagctcaaggaatagtgtggtaagtttttatttcaaagtatgacgatcagtcttgacctcttctctttgtaatatagatcctttggtaagtatcaacttctcaaaaaaataaaaaaataaaaaagtcagagcaatgtaaatgaaagctgtactgtgtggggctggacaaacgactcagaggttaagagactgttcttccagaggtcctgagttctatttccagcaaccacatggtggcttacaaccatctgtaatgggatctgatgccctcttctggtttgtcctaagacagagatagtgtactcccgtacattaaataaataaataaataaataaattaattaattaattaattctttaagacaaaaaaagaaaaaagaaagtgaaaaaaaaagaatgccatattgtattaattttcctaggggattactggtcttttattgttattattactgttattcataagttgtaactattaaccaacactgctattttgatacataaatcatgactaaatacttggtcaaagttctataaggacatatactgatatcagggaagaggaaatggcaggcttgttcgtccatggatgcatcgtttcccatagctgattagtgagatgtctcatggaatcttcattttcactctgatgaaacgggtatttcagaaatctcactacattaccctggggagtaaagttagctagtacatctgtttcaaaacccatgtatctttaaagttgatttataaactaatttctacaaaagatccaggttttatagatgagcataaatctttataaactgaagtagaaaatatgccttgggatagttctgctcctgatgcagaatcactaagttagcattataatctagagtttggagaaatgctaagccatacccaagcataattacatctttgttacttcataaacaattttatttaaaatctgttaaaagaaatcagagtgtgtactggctagttttgtgtcaacttgacacagctggagttatcacagagaaaggagcttcagttgaggaaatgcctccatgagatccaactgtaaggcattttctcaattagtgatcaagggggaaaggccccttgtgggtgagaccatctctgggctggtagtcttggttctataagagagcaggctgagcaagccaggagaagcaagccagtaagaacatccctccatggcctctgcatcagctcctgcttcctgacctgcttgagttccagtcctgacttcctttggtgatggaagtgtaagctgaataaaccctttccttcccaacttgcttcttggtcatgatgtttgtgcaggaatagaaaccctgactaagacagagtgcttttgattcagtatgtctataaggttctagaaaagctcttgtatatgtctacaaatacatgtacacagagctattctttgaaaaattatttctaatagcaatagttgaaacagaatcaagtctggaagcaggaaaataaaaaatatgatatagtcaaacagcaaaatactgtacaacatttaaagtgaactagagctgtatatgtaagccaggcattatgaaaagtaagtgctgagtagtattaatacagcctacacaatagtgtaccttgttgcaccattcctctgtactgtgaaatgactatatatagaaaagagaaacacttacctctgagaacacaagagaaagagtccttagctgtaatatgtctcttttttagatatcagaacaattgtagtaaaatcctaaattattagaatttaataatagaattgtataatgaaaacactgactttcattcttttctaatatcctcatatcaagtattcatatttattaataccttgagttcctcctccaaaacaaaatgttaaaggagttgtgatttttagtcttttgtatacatattatcaggatagtttcctttctgtactcattgacttgtgtcttatttaaaaccttgtagtcttcaataattacataataatttattctgtgtgtgtgtgtgtgtgtgtgtgtgtgtgtgtgtgtttgttgcctacatgtatgtctgtatgctgcttgtttgcctagtgcttgtagaggccagcagagggcactggatcccctggaactggagttgtagatggttgtgaactgccatgtggatgttgggaattaaaactcggtcctttgagagagcagctagtattcttagccatctcttcagccccagaattcttcagcaaataagaataagtagaagtcatggttacatatcctttcttgatagatgtgcaaggtgaaggagtcatttagacctgagactaatactaatgatttgtgcagcaaggctcaaggggtaaagaaaggaacctgttgttaagccttactgctcaggacccgtctggtggaaggagagagccaataaggaaaagttatcttctgtcttccacatgacaccccatccacacgcatacgtgcatacgtgcatatacaaaatagatacatttttaaatgtaattttttaaaaataaaagacaaaaagaacttgtgtcctagtgcccacatacactcagtggatcttgggtaacagtctagttggaaaaagtaaggagtctacttgattggtttgtaaaaatttggttttagagatttgtgtttaacatttattattattatttttgatttcttattacagtgcagcttatgatgccattcttgaaagaaatgttgcaatcaagaagctcagccggccatttcagaatcagacccatgctaagcgcgcctaccgagaactagttcttatgaagtgtgttaatcacaaaaatgtaagtgttcaagttcacatttctgaggtatagatgaaatcaagatttattcatgaatatatgcctgtcaaaggctttttaaaaattattaggagttttaaattgcttctctagatcgaaacatttttaaaatctaaagtgatcctccacccccgttattaagtagtagcaaaagaacaaaaacgtcttctgaaatttagatttgataatttcctagcatttaatttgtaggagtcttaaggagatagtgtttgaaaagtattttattcagaattgagctctcttatgtcctttttgtaagacataaaggtgacatttcaaaaagctgtacagagatgaaatcatgcccattttatttgggcattgggatttaatgggacacaaaattcaaactacctctctgcacctgattctgacttcttttatcagtactaacttttattcaaataataatagttgaagaaaaactttggaaatatttacagagaactaggaaaacatttctaacttgaagataaaactttcgttcgttttgaaaataaaaagttaatgtaagtttgcattaaatttactgatgtattcagaattatttttatttttttaatgttttttaatgtgtgtacactgtacactgtagctgtcttcatacacaccagaagagagcatcagatcccattacagatagttgtgaaccgtcatgttgtttctgggaattgaactcaggaccactaaccactgagccatctctgcagccccttaggaatatcttaatgcaatagttcttccaaagtggaaggacataaactaggagaaaattgcatagaggacagttttatgaagcactaaactgaaagtgctggccagagacattgtccaaagagtttataaaatgtaatgagttccatgcttctggtgtagaaagtacatcacattttgagagctagctatctgtagaaccttttgtgtattagagttacattggaaaatatatagatgttaaggattaggcttattatttgggaagtttatgatgttttgatggtagtgaaatatgctgaattaaatactacaaagcaataataatttagctgtcagttggtagaaggcataccgaaatgctgagatttcaagaggcaggttcttgtgcttcagcacactgggaaggcttaatgggggcaaaggagtagaagaaactgactcttaaagttggggtgaaagttttttggaaaaaggagtctgacagaggttgagtgacattatcaaggaagaaatggtggtctttcttgttgcaggtgggagccagacatggtgcttgtcagacgagttctgcttatgctccctacttgtgctagagctgctcatgccccttctgtctgggcagaggggttttagagctgtggaagtgttgtctaaggttttctttgttcaattcaaatacttcttcctccaccctggttggcagcagagaagctccatttgctaaatggagaatgtgggaacgaaccatgtacatatgttagcccgctaaagtggtccagactggatggatgctcagcatactttgtttattgaatgagtataaaaaattaatatggtgaaaactacaaatggcagctccactctgccacccctggtgtgtaatgggtattttgtaatgttttatctttttagagctttgctgttctggacagatgatcttgaaatgataattctatgctcttttcaagttttttgtgatttttagtttttcttttcatcaggtcactctgatgaaacacttagcatacaaatgctgcgtgtctgatgaattaattcctctagtagctgttgaggcttgtctctttaagtattaagccacttgactcattgtctaacaagtaatcagaggcctgatagcaagtcacattgcatcctgttggtttgagaaaactaactttttgttgtactttttgttgtccaccttcagatatcaaaagtaaagtgtggctattctcagagttttaggcaattccctagtcccccaccgcgccacacgcacgcactctgggataatatctttatttcaactttacatttactggtttcacttgccagaattgctaagattgtcttcataatagctagaactgttaagcatattgtagaaattgccatgtttaactatcagaattattcagcttcccctaattcttcttcatgtccatatgcatgttattagaggcattttacctttttgaaatctttatattctatatctagttgtattattcctctgtggctgttattttttgttgttgttttatcctcagaggaaaacagtgtttttagtaagtttttacttggttgtgataattaatagctctttgatgtctcggcatatcccatctcctcatcatcccttgacctttgcttgttattctgagataactaattgcttttttattattataaaataggacagctgtgctgtttatttgcttacaaaagctcagtaagatatggttcaaatactattcagttcgtcaacttcaagtatatagttggatatgttcactaatatatgtagtgagaaagaaatcctgtgtccttttattgtcctccctacttcccacacccaacagctctaagcagttttgtttccatatgtctttaacttttaatatctctcttgtactgttggttttcccaaatattaataaaaatagttttactacttgcccaggtccccatatatatatactttatctggttgagagactcagatttatttacagtagtgcctctaacttaaataattcattttaccctttctggcttaatgtttttttctgaatatttactgacagatgccttctataagcagagcttaatgcatacgtgaatggcatccattctgtcctcatgaagattatatctagagaaacagtccctttcctaaattactggcagacatgaagtgcacttttgcatactggccgaggaaagcagatcaggtagttctttctaacaaggaccgtctgtggtctgcgatgagcttattacggaaatgagattctgttacagtgtgctgaatgtagaaatgacatgaacagtaacagagggccaaggatgttggactttacaaaggaggtccatctttagataattaagctcagtaaataaatgtcaaacataggaaataatgcactaaaagattaaaaaaaatgtttgaaactaattgatatggccaaagtgacaagttttaatatttagcaaaatgagggacaagttagtgctgtagtctggggacttcaggtggactgctggggaggtttactggctttacagtttgagggtgataagtaatagaatcaggtctgtctttataatattataaaatactcccatattatagatagtaaaatggtatctgaatttgctgaaaactgttgttagagactctgcttgtactagtctgttcaggctactaccacaaaatacagtaaactatgtggattaaaaaacagaagaattatttcttaaaattctggaggctaggaagtcctggataaggtactggctgatttggttcctgctgattattctcttcctgacttgcaaacaaacacttcttgctttgtcttcccatggtacatagacatggagaacaagatctttttgttattcttacaagaccactaatcttaccgttagaaggacctgggccttatgacctaattaactctaaagtccccagttgtagatactatctcattagagtctatgccttcagcatgaatgtacagggccagatacagatataagcctgtcactgtagtattaaaagtaattatataacaatccagatgtgacttttagaatccttggcctctaaatacacagaaggaatgggaaaacaggttgttgacatactgactgatgatggaatgaacaatgttgtttgaaatagtttatggtattaatgctgaaaaaggtgtcacactgagccttttattataaaagagagggtgcttctgagtgcatattttagtgcatattttagtgcatatttgggaatgatgtgcagataaattcttgaagaaaaagacaaatattatgtaagaataatatagacataaaaagaaaaggttaaggacagcagtgagacatacaacatagatgaaatagtgtatttgactggccctggctcagcagttcagagtacttgctgttcttgcagcggacctgaatttgagtcctaacatccacacagtggcttgcaactgtcctttgtgatctagcacccatttctcatctccacaacaccaaatatccacagtgcacatatatatatatattttcagacaaaacactcatatatacaaaatagaaacagaccttcaaaaaaaagaaaaaagaaaaagaaaatggcccagtaaagtgtcactaaaaccaagagaaaggaaaggactgtgattccatagaactgctgagttgtataagaattagtagaaagtacttaatatttgttgacaaattatgtaggtatttataataaaatgagaacttgatagagtattcataaatagaaattgttatgtgaaaccctttggttgacttactggtttctaagacttttgaggcagtttcatagcaaacttgaaagaaagatagaagcttgcacatatcccctgcctcagcaccctcaaaatcagtagacaccacctgggttgtacatttacatacgttcttttttgtttccagtgctaggaaatgtacccagagtctctgtgtgcctagtaaacatgaccactgaagtgtactctcagccctaaggttcacttggtttaagagagcctatgagcttgaacaagtgtggtatttttctgtttccccacctttatactactcatttttatttgtccaaaagatcttctggcctgatctttttctttttctttttttttttttttttctgttctccctagcaatgaaattttaataaataagtttacttgtgctttgggtataaaactggaatgattttaaactgatagtgaattgttgtaacatatgtattttcaattcccaaatgaagtattagaaagtagtttctaatgtttttatttctttgctttgccacagataattggccttttgaatgttttcacaccacagaaatccctagaagaatttcaagatgtgtaagtgtggtaactaaaatgctgttaatacaaagttttgctagtgcctatctgtagatcgttgctatacactttagctgtcatctttttctacccatgaagttacatagtcatggagctcatggatgcaaatctttgccaagtgattcagatggagttagatcatgaaagaatgtcctaccttctctatcaaatgctgtgtggaatcaagcaccttcactctgctggaattattcatcgggttagtagaaatatatcaccatgttcttttctaaggatttttttttaattttgtgtattttgcttgcatgtatttaaagtgcacaacatgcatgcagtgcctgcagagtccagaagagggcatcatatctactgaaacaggagctatagacaattgtgagctgccatgtgggtactgggaaccaaacctcagtcctctgcaagagcagcaagtgctctgaactgttgagccatctctgcagcccaccatgatctttccttttcaatcattgaagtgaaattcacaaaacaaattacgacctgaagtattgagtagcatttagtccatgcattagtgttgtacaatcaccatctatgtcaaattctaaaactttcatcagcctttctctagtgaagactacatccctaaaattgtcactcttcattttgtctctcttctcagagcctgttaattcaggacaatggatttacctgtcctagatacctcatataaatgtaataatatactatatggcctttgtgtcaggctcctttgacttagtgtaatgtttttgtggtgtctatgctgtatcatatattagtatttacttttatgaatggataatattccatatatcatattctacagataatttttgttttactacctttcagttaaatactatcttgctatgaaaattcatgtacaagtatttatttgctctttgttctttagtctttcagggtaggattgctgaatcatgtggtattcacgttttaaggaaccatgaaactgtttttcaaattttacatccccagaatccatatataattgtacagttttcctgcagcattgccagtatttagtacctgaccgctttattttagtcatcacagtggctatgaagtggtattttattgggcttttgatacacattttcctagtggctaataatggttattttaataacttttctattgccatgacaaaacatcatgaccaaggcaagttatagaagagtttactgggggcttacagtttcaaagggaagtccataactgtcagggtgaggagcatggcaacaggcaggcaggcagcagtagcccagagcttcctctactaacagcaacacagagaaagctaccttgactgatgggagcttttgcaacctcaaagccaccttcaataacacactcttcccaaacggttttaccaactgggagcacagtattcaagcatatgagcccatgagggccattctttttcatgctaccaaaggagtcaagaatctcctcatttgttggccatttctatgttattgaaaaacatgtattttttaagcccttgtttctaagttgtttgcgtctttgttaaatttacagatttgtgtgtgtgtgtgtgtgtgtgtgtgtgtgtgtgtgtgtattttttaagcccttgtttctaagttgtttgcgtctttgttaaatttacagatttgtgtgtgtgtgtgtgtgtgtgtgtgtgtgtgtattccagttctatatatacaaaaccattaccagacataatttaaaatctgtagattgttttcactttgctaatgatgtgttaattaatatgtaagtggttttaatttttatgaaatatcaaatatttgttgttttatgtggtcttgtgtcttgcacaagaatctactgccaaattgaggtcataaaaattcaacattgcctctttttgtaaatttttggtccattttgaacttatgttttgtatatggtgtagtgcaagacttatcttcactctcccatgtttagaaatccagttgcccaagctctcaggttgtattggtgccttagggaatccagctgactgccagttctctataattagactctatgtctgtctctatattagaatcacagttttatgaagtttattatttttaagtgtatgtgtgatcatgtgggtatgggacccatggagtccagaggtggtaggatcccctggagctggatttacaggatttaatgagctgtcatttggatggtagaggccaaacccaggtcatcttcaaggcttagctgctgagccatctgtccagctataccagttacacatgtaactctgtactgctttgaaatgggatactatgaatcctgtgtcctttcttagtagttttaaaaacagctttaagtgtataggaatttggagattagctttttcacatctacaggggaaaaaaaagccaacggactttggacaatgaatccattaaatctaaagaatgagttggttggtggttttatcacttgtcttgagggctttgtaagcataagatcttcccatttcctaagctgtgttagtctgtagtgctatgagttgggtagctgaaacagcaggagttattttctcacagctctcaggatccgaaactttgtggttttggtgaggtccataagcactctctgtagcttccttcatgtggtttttcctttgtcagagagcagcatgtgttctttctgacctccgcttatgtgctcataaacactgattttttttttttttaagatcatgtcatttgcaccatagttttacttctattcaatttggccaccttcccccatctcccagctgccctagctagagcttacggtaaaatcttagagaacagtagtgaaaatagtcatttgagtcttgcttgttgtaatagggaaagcttttcatcgttcaccagtgtatttttctgtttctcattgttgtaacaaagacctaacgcaaggtacacgcatgcaggctcaagggtcccagaattacctgagtttagaccatctggttacaaattgccaattctaccatggtcctaactgaatggtaagagtcagaaccagccaaagaaagaggctttatggaagtctggctccagcatagagtttttagttgttttgttggctatagagtatgacaatactgtgtcactagcaaggggcgctcacccagactcttctaggtattttatttggtcactataacataccacttcccttagtaggcaagaatcattcctgattcatgctaatacattgaatctccatttcctctaaaggttgagattgttgcaagccaaagcccttatcataaattatcttgttaggttatcatggtcaaaacctccacattaacgggacagttcgtcaacaggatattccaagtgttgccattacctgtaatttagggcaaagaccagacctctttctatagaagatgaatgaattcttctccatttatcgtctattccttatttacttatttttgtcattaaggagtattaaacttagccagaggttttatgcaccaatttaaattactgtgtatgttgcttcccttaactgttgtactgcattgatagatttttttatatttagcgtcctctttattcctgggatagatcccatttggacatggtatatataatctttccagtatattattggaactgatatgctagtatttctgttggagttttttacccttggattcattactgatttcatttgtagtttgtttgtaaagatggttttaatcatactttggtatcaggagtttcctaatctcagtgaaagttaagatgcgttccttcctctcttgtttcttagctgcttttgctcatttagaagattttaggaaataaagtatggctgaagaaatgttcttaaagcaataaagttgagctagcagtagatatactgagaggtctgttggtgtggtgacctgtatcttaggctggacaatgtgcgaaactagggtggagctatacatgtaagaagcttattagagagttccattaagatcagtatctattacaaagtaaaagtggacaaagggagaaattacattggctacatttatttcaaaagcctcagctggtggctcccatttaacctctgcactgaaaacaggtccttgctggaggagtttcctaaaggtcaccagcagccgtccctcttgggcaatggaagagtaattgtctgagccagggtctgagcagatatcacagagcctattgaagccactccttgagtcactcttcccattgtcttagggtactaatgtctggctgttcctgtcgaatattttctgactttttctgaagcaattaccaaaaattttgacataactagctgtcagttttgcatttagtcctcacagcacccccatcctcggttcaccttaactgtgccattctgtgattactcacttggtttaagaagcaatctaaacttttattccttccaggcactacagttagatgtccctgtaggcacttagaaacccttgctgagagagacttccctctaactagttcccactgagtcagcagaagagatctgtatggtaataccctggctcacatgctggcctggaagtgacacacataacctctactcagtgcatccacagagctagccataaaaacctgcctccttatagaagagcaggaaaatgtgaggaaggcaaactcatgggtgttggtgagtaccgggctccatagcctgtggttgtctgacatacctccgttctctgtcccacacctccttaatgtggatacaccttagtgtctgtgccaggttcagatgttgatcttctgagcccagaagcataggaactggctctgtcttccctcctctcaagttccttctatagaatagtcaggtggttccagggtagtcaagacagtctcattggaaattgagaaatactgatgttgatttattagttgcatttgacattatgctggatggacattgtaagtgttccttcctctggaggtaggagtgttccctcttgaggagctggatctgatttctgcacagtgcaacttccccgctgttgtccacattacctgtctgctccctatggaagtcttcctttcctcttatctcccttaaatagatcttaagtgagtattgaaggctgtgtactgaaggggtgctcagctttcttggcctgcttcttatccctgaaagatagggacacaagtgtgttctattgttgacattttggacactctttgttgttatcctgtctttgtaagttacttagtaattttgacaacagacttgagttgtgttatttgtggttcagtttattatatcagtaaccttggtagcttttgattgtatgtctttttaaagcatatttgttagctgacagtctatgtattattggacttacttgaaactcctgagtctaccttcaagcttccaggcttccaagatgtccatgatttctaacaagctattcatggcttacaaaagcacagtgtgtactcagggtctacagtgttggcccatgcagcattactacagacctcaggtcaggttcagtgttacttccagggacatccttttcccatgctatgaagtagaagaatagaaactatgctacctcgagcaggttcagaatttttcagatctggtgagcatcatgtaattttgagttccattaactgaaacaggtcataaggacaggcatgtaaaaggatgttaagctaaaccatctgttgcctttttctgggtctagcagcattttgcttatccaaaatgatggcactgttactttcatttctagttttaaagtaaccagttacttctaatgcagacagtagccaccagcagccttttttgctttctgacctcttatagagcaagggttaaggaattatgtaaagtccatattctgaatgttttttgtttgtggacatggcctctgacacaactactgacaactactgcccttctatcataatatcaactgtagataacatggggtaaaaatgactatggttaagtttgcattaaacttcctttgcaaaagcaatcagttgaagtcctgtgcagatgacataaaatagtttacctctgcataatttggatcactttccactttgatactgctgtcaatactgttaaataaccaaactcatgatcctgtgtccttgcataggttgtctgatctgaaatgcttggggccagagtatttcaaactgtgaaatattttagattttagatatttgcatagacttatagtgagcatccctaatctgaaaatcagaaatttgggggggatccaaatcaaagaactgtcatgatggcccctgtattcttggactgatttgagactaccttaaagttttccttagcataaatatcaaagtagttataacagccttttgagtattgacagttatactaaaaaaccaaaaatacttaaatttgggcctttcagatttcagattagggataatagtaactcccaagtcttgggattcagccagaaaacactaggcttagctacaataaaaaatatcaaactcttattttgttttttggttttcaaagcagggtttctccgtgtatctctgacagtacaggaactctgtagaccaggctggcttaaactcagagatccactgcctctcaaatactgggatcaaaagtatgcgccaccactgcaaaagcagatatcaaactctcagtagccaaatatgactaaggtttatttttcacattctgtatgtaggcacatcatggtaggggtagacatttggatttatagagatgcccactatctacaatgttactaatcaccaaagcaagggaagatctgcaggaggtcatgttctggcccttctccactctgttcccactctacctactaggtctacttttgctatcttgcctgactagagagagaggcttggacaatggggggaaggagagggtgggttagaatgttgagttatttctactctatctgctcaactccaagtaaactccaagtcactcttcctataagtagttatgacatatgtagaaagataaacattgatacagaaaaaaatgaactttagttaatattcatagagacaaatactcttggcagtttatttccatacacagtttcttttaaactagaaatgtatttgcccctaatcatttcagaacaaaaagtattttgagtttttttctagactagaccacctagtataaagaggcagtaatctccagctgtagcaacaatcctgggaggactactgagtttatagtggttattcttcagcatgggtattcctttgttttatattaccaacattctatttgcagaatagaaatgataacatttttatcttctgtgggaataacgtgtagtcttagtatgcttaatttcaaaaggccttagtgtctgttttctttatatattttttttaattaggtattttcttcatttacatttccagtgctatcccaaaagtcccccataccctcccacacacacactcccctacccacccactcccacttcttggccctggcgttcccctgtactgaggcagataaagtttgcatgaccaatgggcctctctttccaccgatggctgaccaggccatcttctgatacatatgcagctagagacacgagctccgaggggtactagttagttcatattgttgttccacctatagggttgcagatccctttagctccttggatactttctctagctcctccattaggggccctgtgatccatccaatagctgactgtgagaatccacttctgtgtttgctaggccccggcatagtctcacaagagacagctatatctgggtccttacagcaaaatcttgctagtgtatgcaatggtgtcagcgtttggaagctgattatgggatggatccccagatatggcagtctctagatggcccatcctttcgtctcagctccaaactttgtctctgtaactccttccatggatgttttgttcccaattctaagaagaggcaaagtgtccacactttggtcttcgttcttcttgagtttcatgtgtttcgcaaattgtatcttatatcttgggtattcttaggactaccggttagtgtctgttttctaagcctatccatgttaccttgtcagagtaagttagaaacagcacataagcattcttgcatgtagatatttaaaaagggatctttgtgttaagggccttagcttttgctgttaatctgctagtcatctgtacatgtgagagagtttgtgctgtggatatgagtgttcatcaaagctaaaaggcaagagcatgatgaatgtgaaggcctgggtatttatgccactgtcttcgttttaataggtattgcacacattttcttctacctcgagccaggcagcagtttttcacaaagacagtattactatcagaagaaagtaattttatggactagtgtctgttacatgtgaacggaagtttataagcaaatgtttgtgatatatgtgggaagtcaggaatgggcagactgataatcactttttggttctttagaactgagtatctagtgtattgagactgattccaaactttcctccccacaaaagtgaacatgtatggctatcattgttcaagtaacatatacctggatcgtgtcaggattgtgtaaatattatcagaatgctccatggtggatttagagcgttttaaagtttattgtgactttagaatgagtttttttattttttaatgttagtgagtacactgtagctgtcctcagacacactaaaagagggcatctgatcccattacagatggttatgagcaaccatgtggttgctgggaactgaactcaggacctgtggaagagcagtctgcttgctcttaaccactgagccacctctccagtcctaaaatgagattttttagtgctattaatttagtatgtaaatgaatgtacatgctaatttatgattcttaccataatagcacttttttgtttttgattggtattttgagatggggtcttgctgtgtgtcatcatttttgattgctgtggcaaaaaaactgaccaaaaacaacctcaggaagaaagggcttatttcatcttacagtttcatgtaacagttcatctctgaggaaagtcaggctagaacctggattagaacttgaagccgatgccatggaggagtgctgtttactggcttgttcctgggttatcttggcctgttttcttagacagccaggaccacctacccaggaatggcaccatctatgggttagatcatcccacatcaattattagttaagaaaacaacccacagagttgtctacaggccattctggtagaggaagtttctcagctgttgtttcctcttcttacatgactctagcttgtgtcaacttaacaaagaactaaacatacactgtgtgtattgaacttccagcctttctgctttgtcctcgaccaggctctcctcatcttcatagagataaataaaagaagtaaaacaaaatagaaaataaaattttaatacatttttgtttttaagtaaataagcattaataatgtactggctttgtttatgcaaatgaaatgatcttaaatctgacttggtgggtttgcctatggtaaggaacctctgcagtggtcctgcagactatgtaactcagttgagcaaaacaaatctgtgtgtctgtcttagcaatcattttaatgtttatttcttcaaggacttaaagcctagtaatatagtagtcaaatcagactgcactttgaagattcttgattttggactggcgaggactgcaggaacgagttttatgatgacgccttatgtggtgactcgctactacagagcaccagaggtcattctcggcatgggctacaaggagaacggtcagcatacactttcgctttgaaatagtcttctggttttgtttatcaatcagtttttaaatactgtaattgaaatgcatgcatttaagtattcattactacttcaaatgtctatccaggatttgaacgttttgccgtgaatgtttgggaaagcatgagaatcttatctcaaatgggaatacctagatgaagagttctaaaactaggatttatgccctctgcttgtctgtaatttaaacataaatatatatttctcaatgatttaatcttagtaataattctagtatatattagtcttatttgctctcatctccagcacctttagtcagtgttaacagtagcgctcacaagccgggtgtggtggcacacacttttagtcccagcactctggaggcagaggcatatgatttctgtggtctacaaagcaggttctaggacagccaggactgttacacagagaaaccctgtctcagaaaacaaaacagaataatataaaacaaacaaacaagcaaaaaatagtagcactcactataaactctgagagctacattttccaattctggaaagttagtgggtaactcagcctcgtatggaagcactcgtgtttgattaaagcctgtgccccgtcataaagagattgcatatagtattatctgtggataggttgaatcaaaccataactttttaagtgtggcgtgtttctaggatggaaattggaacagtggttcactttaaatcaggaaactattaagtcaatcttgaacatacatatatacatacttaagcacatgtatatgataccagtgaaattggggagattgcttaatttccttaccttttttgagctaatttaaaacaaatactttacatatcaactatcggtttttaaactaaacatgcttttctgtttctaagtctcaacataaggtttaaaagttttgttttgagaattgataggcagattgctattgcttttgctgtgaaacttttgattatcacagaaattgcaccacatgttaagttctataaatatgatcttgacattagagaagctgtcataaaaattgacatgttgtctgtcctctcttagatgagagtcacttagatctctcattgcttttcctgcctgtttccccaggaaccaagtcaaatctcgtgtttcctcactcataactattagccagcaggaggtggcatatacatatcttcctctcagacacacacacacaggggaggggggtagaaagagagttttcctgtttggttttattgcagagtatttcaggacagtttgggaaatttggggggtaattaatctattttaaacggcctgatagcaaattagaccccttatagcaggttttataatatggaggtctgccaagagactgtagatcacagatctgtaggctctttgacactttgatattgtattccaccgaaactaacttttaaacccaaagtttaaaaaaaaaaaaaaaagtaaaaaagagataatgaaaaacacttgtttatcaaggtttcttggtagataatgctgttctttttctgtccatttgtagacatgggtcgaggtggatataaatgtaaagtggtgttgccaagagaatacgttacttttagttcagaataaacaaagccttttcagttaaataagcctgggaaacccaggtgataattttctgaaaaaaacattaggttactattttattaaaatgcagatatctttctgtttttaatatgctaaattatttctgctcatgcttgttaatttaacttaaagagagagtaaaatgcacagttaaacctcaaaatagtacatcttaattttataattttatggccttatatacattttaaatcttatttttaaattttgtttggttctacttcatatattacatgcaaaatctcagttatagaatgtatgttttttaaatttatgcagtatctgtgcatagctctcactttaaaattagacatgtaattaaaatgccatacttcatattttcttttgtgaatcaaagctttttgaaaagtattttgtgttttaaattatgccattatttgaaattaaaaccacctttttctttttgtgatgttctgcaattttttagatgatgcagtcatattacgcttctttgattttaacaatcttttgctttgctttttcttcttttgtgctgcaaacatatagtggacttatggtctgtggggtgcattatgggagaaatggtttgccacaaaatcctctttccaggaagggactgtatccttgtgctgctgcagcagattaattagctaggtgatgaacttccttctgtttgctcatgaaaagaaatacatgctacatttgtacagtacaggttttaaaatagatgtaaagtttgtgactgttatagttcaaaaactggttgagctaagaagcttaagtgttagtaggctgcatttggcagcaggacatacagtctctgctggtcgtcagcacattcaccgtcattcatttttattttatattgctttttataattttaagtgtatatggtgtgtgtctttttagtgtttatatatttttctttttattttaaccaaaatctttatgttaatgtcattgcattttgttttcagttgacatttggtcagttgggtgcatcatgggagaaatgatcaaaggtggtgttttgttcccaggtacagatcgtatccttatctttggcctaaaatgtagtttctaaaggtcaaaatggtactgtgtcagcctggtcaagtagaatgtattttgtctcttcctgatacaaagtattgttaaattacttttccagagtaccacctcttacctgactttcttctcctcgtttattgatttatatgttaattttgaaaaggtctcaagtgtggttaattcataggtccttgcttgcttagagttaattaacataaaaagttacggctttcactaaagtttctaacacttgagtaagtctttaactattgtgaaggtagcatgaattttggaattatctgttgctactgtttgtttttatgtttgtttgtttgttttttggtttggttcccccatgtctttctgttattgttctgtgtgctatgtcttgttgtctcattacattaacatagcatgctgagaatgtcagcaagttttcctgtgttggtaattaggttggattcatgcttttagttccatcagtttttagtatttatgttaacagtgatgtgttgatcagtgagtgacacagaattgttttaggtggaatgagaatatttaccatgtaacaataagaacgtgtgtgggacaatagttattcttcagaggcttggcgtataaagacccgaaaaccccagtctacagcatactgagatactggtatcatgttcatttatttcagagctttacaaacgttattaacataggcatacccaagaatggcaaaagaaaatgctactattattaaagttatcatttttgtcacaactgggtgttttctgttagtgtaaagacctgaaaaaagcagaccaaactagaaatatttcttactctctaggaaatacatttacattttttaagagctgggagaaagttaaatttttaaatattaagattttatgcagtttgcattttgatttttatgtatagtaatgataatttttagttacaatttttattttcaatttgtttttttatgcctccattttatggtaaaattagtgtttatatatacctgcacacacaataaataagattaacaaagcttatttattgatcatttttatccacttataatcattgctttttgtaaggtggctttgaggtacaaaatatataatggctactttcttcaggatttaaaatttttccattttcttatatttagtgatgtatatatgattaaagtgttgaatatttgatacatggagtatttttcttagctacttgataatagatattgatcagtggaataaagttattgaacagctcggaacaccttgtcctgaattcatgaagaaactacaaccaacagtaaggacttatgttgaaaacaggcctaaatacgctggatatagctttgagaaactgttccccgatgtgcttttcccagctgactcagagcataacaaacttaaaggtaagttgtataattgtatgcatctcttttggatatacatgtataggaagagtttagtcatattcttaaagggtctaactcaaaattatgtctactagtagaacatgtaaaggttttgttcttttgtctctgatttttgcattttagctggatatggtgacacttgcctttagtcttcatacttggggagcagggtcaggaagatttctgagttcagggccaaccagggctacataatgaaggccctactttattttttatttttttaagatttgtttgtttgtttgttttttatttattttatatatgtgatacactgtccctcagatcccattacagatggttgtgagccaccatgtggatgctgggaattgaactcaggacctctggaatatcagtcagtactcttaaccactgagccatctctccagaccaagatttgtttattattatacataagaacactgttgctgtcttcagacacaccagaagagggcgtcagatctcattacgggtgattgtgagccaccatgtggttgctgggatttgaactcaggaccttgggaagagcagtcagtgagtgctcttaaccactgagccagctccccagcctcgaccctactttaaaaaagaaaaaaaaaatgtattttataaatcatgtatgtgccctggttttatagaaaaattattctttaggtgtggtggttcccaatgtaatcctagcacttggaaagctgtgtctgatagattgttaggagtttgagataatcttgagctacctagtaagttccaggctagcccagggtacatagcatgacctggtctttaaaacacaaaacaaaagaaaaacaaaaaaacaggggctagagagattatttgctgctcttgtggaggacctaagttcaattcctaccctccatgtgaggcagctcacaaccactcccaaatccagctccagagtgtccagtgccctctctggcctccctgggcacctgcactcatgtgcacacatacacctgccccttccctctgtacacacatatacacataactggaaaatgcaataaatcaagtgatggtaagcacctttaatttcagcatttgggaggcagagaacagctcaaggctagcatagttacaaagcaaggtccaggatagccaaggctacacagagaaaaccctatctcaaaagatgaaacaaacaaaacctgtaataaatcttttttagtactcataaaaataaataacaaaagcatctttttaaaagcataggatttgttttgtcttggtttagtttggtttggttcaatttatataaaccaagttcatctggaaattgttatcctcttgtctccgcatcctccgcttagcaattacaagcatatgtaccaccacatgcttggcaaagatgaattttctaaaataaatgtaatctcagaatcctaatgtgcatggttgaataatctcatgaactggtgtatattaatatcattatttttgcagccagtcaggcaagagatttgttatccaaaatgctagtaatagatgcatccaaaaggatctccgtagatgaagctctccagcacccatacatcaacgtctggtatgatccttcagaagcagaagccgtaagttactttctcaatgtttgaagagcatactccaaccttagagctgggactgaaatactttcagagagaacttgtcattttaagtaaaaatcagcacagatcaccggtgttggtgtttgccgaggttttcctaaagaaaactttaggttaatgagcatctgtccaagccctcatcatcgtccaggaacctccactgtttctcactctgttgaactcacagttgattagaggagcctaggatgcctgtgggtgcatccttagatagaaacaatgttttgtatttaaagcagaacagatttctgaaatataggtagaatgtgacaattttaaaatttgagataaaagaaaaaagacaaacagcttattacttagaaaggaatcttacagaactactctccagaaagttaaagttaatgataactgattgacctttgtctcatgattcattttttgcaagttgtatgtctagctgatatttcaaataattaattgtatatatacatccagtaaactataacagttgttctgacttgtgtctttcagccaccaccaaagatcccggacaagcagttagatgagagggagcacacaatagaggagtggaaaggtaacactcaccggagtctcagacactgagggagcctctggctttccatagtgacttcttcatgttacagaaattagtgttgctttctgttttcataacttatgtttagtagtaaggttttgtttatttgtcttacaaaagtagaaagtcagtttccttccttaattttgaaaatttgtacctcagttatagtcacattagtgttttcttccttgttccagcagccatgtttggggtgtcccatctacaagatgactggtgcttgtattctcagtgtactgtacacacctgtttgttgatgtatccatatatcttgaagatgacagaccctattgggtctaacgtcacactttaatagctggcaggtggtgagctatagggaagcttgtgtcccagtccatatccagctcccttgtgagaagcactgaaggtggaccttcacacagtctgttactgtggccatgtgtttatgtgcacgtacttcatagaattgagacagtagtccaaaaagcttatatgctggaccaaattttaaattttagttacttcctgattttttattaaagaaattgtagtttctgcttctgtcagcatgatacaagagtattgatccacagccactctaaccagtagagtggcttaatttatcatctttgaacatcagatctagtttttttctattttattaatatggtcatacataaatatgctttttattatttcagtgtacagtgtaacaggtttcactataacatcttcagatatggacataacctctacattgttcgtgccaacctcctgttactctctcatggcctcccttattttctctctggtcccttttcacctcctaaccagcccttgtatgtatttgtgtcatgtatatttatattgtcaaacccaggttccacattggaaagaaaacatgcaatatttatctttctgagtcaaaattattttatttaacttgataatctctagttctatccatttttctggcaaatgacataatttcattctactttatagctggctaaaactaatttgcatacacataaaccacttgttgttgttgttgttgttgttgttgttgttgttgttagagacaggatctcaaaaaagctaggtctgcctggctggcctggaactccctatgtagtgcagactaatgccaaacttccccagcactgcgtgcctctagagtgctgagattaaagactgccaccgtacccaaccttaccacattttctccgtgctttttttttttgttgatggccatctacactaatagtgtatttactgctgtggatagtaccacaatagaaatgggtgtgcagatagctctgctattgcctgccttaggtgcctttaatggaattctgctttttgggtttttttgaggaaccagtaatttctatagtgactattataatttacatttttactctaatatgtatgaagcttccttttttttccccccacatctttaccagcgtttgttacttttggctttcttgatagatggtagccatttccattgatgttggatagaatcttggtactatttttgtgtgtccctgatgacatgtggaatgttgatattttttttcatacatttattatccatttgtatttttttgataatttcctgttcggatgaaaaataaattttctatctattggttaggtagttggttggttcttagtattcagctttttgataatgcttttaaagttgtaagaatattgaaatagaagtatgtgtgtatcccagactagcatcaaacttgtgatcttcctgcctcagtctcccaagtactaggattacaggtatgtgccatccatgcctggtctccagcaaaggatactatataaacaaaacaaaacagaaataccttgaacttcaggaattacacagatgtttgagaagttctttatattttttcacagaattacttttatgtaatttttcaaagagtatatgactcaaaagtgatagataatgataccaaacaagtcagaatcacaagcaagagcattgtgtctttccgcaggcaaatctgtcgtgcaatggtctgctgggatccatgagtcctaggaaggggtgttgatgctgacacctgctgtaggctacttggaaggatctgaagctgctgcttcttttccttcagtaaaaatacccttctgtcccattctaattgtaaatgctgctttggttataaatctttctaattacagccttgttgcattaggacagaacccaggaagtagaaggaaggtattgacctcaggtctcactttgacagaattagacaagggtctgtaaggcagagtgctgtgtggctgatacactcaaggcaggggctggtttctgacaacagctgccctttaaccagctgggacaattagagcagagagcttagctttctatcaacatctatctgtggtcgaagatcagtgaattaattgctaacacctatgagtctgaagctgacactcagatcctctgccattgctatcattgcaagaacccagcttgatgcacctaacagatagaagctttgacttaaggactcatgcctgagagtcacttttcctcttctttttcagaactgatatacaaggaggtaatggatttggaggaacgaactaagaatggagtcataagagggcagccgtctcctttaggttggttacaatataaacctggttgtgattgtgccttgcatcttgtgttataatcttcagaggcctggaatctgcagttcttcccatgctcactcagtttggtagttaaatttgaaagccatgacacactattgtcttgatgcatttgctgatttaaagccagttttcattgacaccacagccatgtctttaaataagaaaaaatcccttagagttccttattctttgctttgaaaagtcttcagttggaatagataaaaacttcaccacaaaatttgctaaatttgctatgtgtgccatcacgttctgacgttctttttagtacgttagtcacacttgaatacaagcttctgaggacctcttgtctctcagtgttctgctcatcactgtacagaagggggacaagtgcgtcagcagagtcctgcctgctcggctttagcatcttggggccctgagcactacacactgtttttgttctgtatatgtatttttgagaacttaagttcttgtacttctatttagtgagcttatggcttgaaagttgctccatcttgttgagatgctttaacatgttcttccctctgaatgaggcttcccccttaaaaggatttctgtctctccataggttttcctggtttttgagctttttcattttttaaatgcatgaaatgcttgttcgatactgctttttcacagagaaaagcattttctctctgtttagtaagtttgtatttgtttttgcctggtatttacctgggtcaaagtatgcctgagtttacctactaggctgttttggttacctggtaagtgacacactctcttgtagactggccacttggttcaggtccctcctgatcagatgctggtctttttttttttggtttttcgaaacagggtttctctgtgtagccctggctgtcttggaactcactttgtagaccaggctgacctcgaactccacctgcctctgcctcccaagtgctgggactaaaggtgtgtgccaccactgcccggctttttttttttttttttttttttaagatgctgttcttttgtgttggcttctactttgtaagatggacccaggagtatcacttgaacactgtggtttttgtgagactatcaaaagtaattttctatactattttagttctcaggctgtttttagttacttggatcttagagatcttctctccaacaaaatgaagtgtaagcagttttgtatgtactctcaactcttttggaacacaccctgaggcccatttatggatcttgctgtagggccattctccatgttacttggattttaacttcttgtcttaaactaaaaatgcattatggaaaggaaaacaagtataggtttctagacattttcacaattctcccttcgtagtttgtgtgcataagagaacattagtgctgggttcaatacgattcagcaacccgtaagcccaggagaagtctatagaccctgaaggtaggtagcacaggccaggcagcccggtctgcaactctctctgcaactggtttgctgttttgtttctcatagcacaggtgcagcaatgatcaatggctctcagcatccatcgtcttcgccgtctgtcaatgacatgtcttcaatgtccacagatccgactttggcctcggatacagacagcagtctagaagcatcagctggacctctgggctgctgtagatgactacttgggccttgggtgggtgggagggatggggaattggttagtcattgatagaactgctttaaaaacaattcagtggtcatatttttgagtgatttttcagaaaatgtagaattcattttgtagtaaagtagtttattttttttaatttcaagtgttgtaatttaaaacttaagttgtgtttttaaacagcaacaaaactgtattgtatttttgctgtaattaactgtataatgtaaacctaattattttatcatggtttaaattttgcatatttgctttatcttatgctgctgatttttttactgaatttgtaaaatttttgtttatcaaagcaactattatgtggtgacttgcatatatcatgaattatttaagatgtttataagttttttattagaatttatttcagatgtttgttcatgatgctatccttcagggttatgtgcttatcaatgaaataaccccagaggaataagggaaaataacctgtagccagttatattcaggaataactactgtaaatgatgaacgcatcaagaaacctccaatatttgctacttgccaatcccaacttagttaaaacaattggtaggcaaccttacctaaattttagcaaacaccttatctaatggcagaataactcagagcatgtctttaaagatgctgggcacatccttctccattttgaatctcctacaccaacccaagaaaaacttaaactaaggaatgtggtatattctgatcatctgtggcatgcttaaagcttttgatcacacaaagttaagaggacacttcatgaatctacatttccgtggagatcaacagatgcttcccctgtcctggctacgagcctgcttctgtagacactgagttaatctcctcaggctgtaggtcctggcattggccacgagcctggactttccctgttggacagcttctggcctctggcctttcccagttcctgttccttagcgggtcagtctgttgagcaccagtttgtggtgtttctggccatttgattctacctgtagcattatcctgtttctactagctgtcaggaggttccaaagcctacttaaacttgtgtaggtgacatttaaatgagcaatatgccgttcatctgaaaatagtagcacacagccatatgtaggatgtcattttctaaggactgtttcttcacagtgagcagagcaggcatagtggtggttctttcatctgagtctttggttttttatatctgatttccagtatggacgttgagtagtgtaagaatggtgctgctcctgacaagtgtgtgttaactgtttacattttatatctgcagaatcctttctctgtaactgaattttcctaagtaaaatgtcatcaaggtctcattatttctgaaatgatgtctataatgcccaggcacctttggtattatctggaacaagagggatttcatgtaatgaactgggaaatgcatacttcatgagctgcaaggttgtaggaaggagcccggagccccttggagctcacaatcagcaggagtaagagcgggcacagcttggcagatttctgaaaggttgcttagcaggttcttttgttttggtttttggatttttcttcttttggttgctttttaaaaacatttagtgtacaattactttcaagtaagctattttaagtcttgttaatgtgcaatacttaagattaagatattacctttttaaacatagcaagtttatcaagatttctagcgtcccatcttttagtgattccttttctatatgtacaacatggtgcatttattttattagacaagtatgaatttgagactgttacgcctcttggttctagaaatacaaggttgaagtcaggattttagcagaaattggagcatgagtgtgttcttattttatattagttttgcatctaactggttttggttttgccgtgataaaatgtgtcactattgcacttaccagctgatatgctgtagttagttttctgtgtttgtgtttgattgctgagaagccatcttcttcattcagatttcgggtaagtaaggaatactagttgtttgattgtctcatctgttgtaattgccagctcccacttgccagcaatcatgtttcagttaaatttaaaaaaaaaaaaaacaacaagctctcaatgcttaatgtaagctgaaatacctaacagagtatacctaaaagcaaggtctgtttgttaaacatgtgcccaacacattaagatccactgtacacacacacacacacacacaaaacacaccactgtgtttaaatcttttaacataaatcctactggtacttttagagtcttaaagcatcttaagtatttttttaagaaattacaaataacatttctgtctatcagtacttattaagccaccctataatttgacttttcaattatatatacttatgatacccattgtcttactgtctaaaagttgtttagctgagaattagcattccacttcatggtttaggaaagagagccttattcttcctacatgtcttcctggttacaggtctcgtacccactaatacatagtgaccatctgtaagatgagcatgttgttgggattgctttgttatagagcatctcactctttaatgctatttgctagtggtttttactgtgtcatgccatgctgctgattgccaaatctcagaagagtgcacaccagaagcaaaggcccagtgtgttcacacctggctagtaagagaagcagtagtccccaccaatacagagaagctggttgtgtacaaagcttgcctgtcagccttatccctcagttctgagctcatctcactttgttaccctaagacgtggaggtagaaaagacacttgacaggataggatgagcagtaggcaagggaagctgtttcctgagttacaaaaagaacttggtttacattattggccagtttctgccgcacacatgaagacatcatcagtgttgcctcagcgctagcctgcacggcattttgagattgaaaaaaaaaaccaacaacatagtatattttcagaaatactgttgtagtttgtgagtgttgttcattagtcactcattagtgtagagtggatgcatgatgccccatgaccccagtaagtcttaccagtgagtagaatacccagcaccgtctctcacccgtagccctcttcagcattgcctcgtggcttgttgcattctagtgtgcatattctagtgtgcattgtgtttctactgatctcttgggtgtttcctgtgaaccacaggaggcacatttgtcctaatcgcacgaaagaaagatgaaagagataagggcattgaagcagaaatgtgtggtttggggtaagataggaaaattgtgtcctaattaatttcaaagtaactgctcttaggcaaattgcttttaaggggagtctagtaagcaactttctgggcacttctggtttagattctcttcattactgaaactcctgagaaatattacctgtggattagttttgcacaatgtcctattctcacaatgacttaaaattaaactaggtttttattgaactacctcacactgattttctatgctttcccaagtaagctgtagcccttactgtttgacctttactgagtgtaaattataaatgtgcgttgaatactttctagccactgttcacaaaataccagtaagcatgtgaagtgcaaaccttgcgtcagtaagagacagtcccgtgtagtcttccactgtgtctggggaattgtgctgcatacgcttattgacatcctcactgtttttgtaagaaacctgctcgagataccagtccatgctttacattttacagaaggagaaaatcttagtaaattttacgaagaaatacattacttttgtaggcccaatatttggtatatttttgagaagctgttaatcttatagcggaatgatgaagttacactgaagtagctgtctgcctggactgtgatgtctgttttctcattacggtttaccctgttaataaggttttaaacctcaaaacataggatgataattagattttttcctctttccctgtacatgtcattccttcatcccgccccttccgtgtgctctcctctcttctcctctagacaaaacaaatgggcactttgtagggaatgctgggatcgttaccgtgggttatcgttcatgccctagtcattcaacatgcaccactgggtgtaaacagtgttatctagtgtgtcaattggttataatattttaaataaaaaagaaaaagtggtatgaaa

SEQ ID NO: 44 - DNA, 9312 bp, Homo sapiens
  source 1..9312: mol_type = genomic DNA
ctccaaccattggtgtctgtgtcattactaatagagtcttgtaaacactcgttaatcacggaaggccgccggcctggggctccgcacgccagcctgtggcgggtcttccccgcctctgcagcctagtgggaaggaggtgggaggaaagaaggaagaaagggagggagggaggaggcaggccagagggagggaccgcctcggaggcagaagagccgcgaggagccagcggagcaccgcgggctggggcgcagccacccgccgctcctcgagtcccctcgcccctttcccttcgtgccccccggcagcctccagcgtcggtccccaggcagcatggtgaggtctgctcccggaccctcgccaccatgtacgtgagctacctcctggacaaggacgtgagcatgtaccctagctccgtgcgccactctggcggcctcaacctggcgccgcagaacttcgtcagccccccgcagtacccggactacggcggttaccacgtggcggccgcagctgcagcggcagcgaacttggacagcgcgcagtccccggggccatcctggccggcagcgtatggcgccccactccgggaggactggaatggctacgcgcccggaggcgccgcggccgccgccaacgccgtggctcacggcctcaacggtggctccccggccgcagccatgggctacagcagccccgcagactaccatccgcaccaccacccgcatcaccacccgcaccacccggccgccgcgccttcctgcgcttctgggctgctgcaaacgctcaaccccggccctcctgggcccgccgccaccgctgccgccgagcagctgtctcccggcggccagcggcggaacctgtgcgagtggatgcggaagccggcgcagcagtccctcggcagccaaggtaagcagaggctgcgccccttcggagggtgcttgggaaggcgcgggtcgagccagtggctgctgcgcgtcgcgcgtccagtgcgcacaggggcgtcccgggctgtctgggagctcggcgccaggaggggcacggcccggagacaaattcgggggcctctggcccgtcggggcttctctgacctactgagcctgggagtgaatattctgagtctcaacaccgtgttcaggcgtcctctttccaagagctcctcattcgcaaccccgggacaccttcgggaagctccggggaatgtcggcgtgagcactgctggacgccggcagaatcgcgtcctccggcacttgctgcggcatgcattccttgcgtggctcctggccgccgaggagagagggaggctcgaaccttcttgggctaggtctaggccatttatctccgctctctctttccccatctgagccatctaagaagagaagtgacctgggggggtcggaggatggctaggctgtgtgtgggaccgggtttggccactcgggccaattcaaggtacagcgagcaggcagaccagggagagctgctgtcgctgggaagaaggtgctagccccagctgctaaggcgacgggggcgcgccccgtctctgaacctctgacctgtgaaggggtcatttcaagcaaaagctggaaggctaggggcaagaagcctaggggcaggcgtctgcggagagagcagggagacggggaggaaaccctggtgggaattaagccgccgctccaggtaggggtcatttctcccaaagcttcctttcaagggtgtcagggatgtctgtgagtgtgtgtgtgcaactgaaaaagatcctaggtttgccggactgtggggctcattgactctgggtctgccccttctggtgttcgagtgtgcctagaggtggcaaggaagtgcggtggggagagtcctagttgagtgccccttttaaagtctttccccagccctcagcgcttccgcttttcttgcttcgctccttgatgccccaattgggcaggcacgctggttatgggcactttgcagaagtttatagccaattacaactgtataaatcaaagcgccctttgggggctgtctctgggcatcggtttctgcgtcactgtgcacatgctagggagagtcctggtgggaatgccgccgaccggggagaaggccacagatcagcctcgggtgagcctcagagctttggcttggtcccttctcctagaggaggcgcctttctcctagcaggggctcccagatcctggctcccaaagacccactttctacagcccctgtctggggcgcggttggcgggggtggcgcacgccctaaggaagacctttgcgtgtcccgggagagcggccgcggggtgagggccgggaagggggcgggagggaagccgccagagcccaggccgcggggtcagcagatgagaggccgctgtgaagtcctgcgccgaggtggcaaggccgcagtcggcgccgggtgcccttgtgatgttaatgtggggtggccgcagcccgcgggccggagccgggctcctctgcggagcgtcatctgtcaaggtgtgggggtggagggggggacgcggcctggcttgctttgatatacaccttcccagccctgccattgtctcttttagggcccggaaagagggtggtgactttcgcagtcaataatgaattctgacaagtccctctcatccctcccctccatagccccgctcctaggttcccagggggtgtggggcgcctccaaggcccttggggcatgggtcgaagagcgctcagggtctggtcatcgcgttgcccggcacgtccgggacactgaaggggcagcacccgagcaagggtcgctccgagacacttccaggcgagtctccctcccggggtgttcggctgagggaactgccctgcgcctcagctccggaggtgtcctctgtggctccagccaggctccggtgccaaccccgcctgatactatctgcgtgacccggtctgattctccatttcctcatctgtaaaaaggggcgagtaccaatggcagcctggagtgggtttgaggcggtcacgcgtgtccgagcgtccaccgcggagaaagtcgcgttagttccctttactttcatagcaggcgcggggtcggggccgcagccccattcaaatgcgcctgcagggtcgtgtttatgttaatgcgcctggcggggagggggatgaaagccggggccgccatttgctcagtagtggtaattcaaacagaatgtggttgttattaaggcattgaaagggcttttctttgataagatcgccttgtcctgcattgtttgcggctgtgttggcctttcagcggctcgggggagctccctctgatcaggcctgtatcttcccaggacgcttttgttgtggtttgcaaagggttttacctgaacaaagtcagcctgcggggcattaaacacctccaggcaactcccaggcccttcagatctttctgtgggattgggcactgggcgattgaacctgttcagctgcaagaagacccaaaagtgggacggagccagagagaacagcttctggccagggctctgccaagggctgagccaagacagacctggtggagacgccaggctcgggcctgctccaacattgtggacactatttgtcaaggcccttcagtaaaacaatcaatctgggatttaatatgttgactcaatccaatgagcatagatcactggtcaggataactctggccggatttgcagcaggaataaatggaggatcaaaaaagaaaaagtaccaaacgccaaacctggtctgggcaggtataaagtgtccccagcaggaggggttttctgcctgttccctcggccagagcccagctcagaattccacctgatgggcctggtgtgtctgggggatgattctggcgacttgtcagctcctgagccccgctttccacttgtagtaaagcaaagtagtaacccccacaccccctctacaacatgtgcccacaatgacagctgttttcggggtgggcttccatctctggtaggcctggaaatctggatgcttccaggatcccggccacttcaccctgccccctttcccttggtgtcaaatatatgccagtactgtatttggtttaccgaaagggtggttacattctgctgtcttctgtgtgaatgaggttttcactttccttaatttttaaaaaccacttaataccaaggttagtttagttgcctccactagcctcataccctccccccacaggaccctctggggggtcttgtcagacttggcaggaaccagccaaacccgggccccccagggtggtggaggaagagaaatgtccctgggttagggaggtttgtcattacccatgactgatgggctgccttgcagttctcagccctcacttctccttcctccacagtgaaaaccaggacgaaagacaaatatcgagtggtgtacacggaccaccagcggctggagctggagaaggagtttcactacagtcgctacatcaccatccggaggaaagccgagctagccgccacgctggggctctctgagaggcaggtggggaccgcctagctccctccgggcgggccactgcctggcagaggaccatgagagttagaaaatctggctgcaggggccatctaaatctgtggagagactgaagcaggaggatgcaagcattcgtctttggagtcctttttttttttttttttttttttaaacagagatggggtcttgctttgtggcccaggctggagtgtagtggcacaatcatagctcactgcagccctgacttcctgagctgaagggatcctcctgcctcagtcacctgagtagcttggactacaggctcgagccaccatgactggctaatgtttaaattttttgcagagatggtctcactgtcttacccaggttggtctcaaactccaaatgctcctcctgtcttggactcctaaagtgctgagattaccggtgtgaaccaccatgcctggcctggagtacatgcccccccacccgccaccgtcgaaacgcagtttcactcttgttgtgcaggctgaagtgcaatggcgcggtctcagctcactgcaacctctgcctcccgggttcaagcgattctcctgcttcagcctcccaaatagctgggactacaggcatgtgccaccacgcccggctaattttgtatttttagtagaaatgcggtttctccatgttagtcaggctagtctcgaactcctggcctcaggtgatccacccgcctcggcctcccaaagtgctgagattacaggtgtgagccactgtgcctggccctggagtacttttttaaaaagcctccttctacctttagtcctctttttttgatgttgttgattttttctgtctctctcttttgagggatataagaagtgtgaaaaacagccaagggtattagtttaatccagaattccatttgggtctataaagacatattaaagacctattctctttgtttccagcactgtacctaagaaaataaactgaataaagtactcagtctctcacaaaaactagagggacaagacttggttcatgaacattttatatatatagtctagaaaaacaggccaacttcacagccaggaagccacaaaattaaatctcattttcagctctaaggtgaggaaaattacgttttagtttagccttgaggggccaaaggttgccatttgaagtataccacccagcactggcctccctttgctgtgtagaaagggccttgcagtttcagttttccttggttctgagactttaaacttttgcagtaaatacgtagataaaagttgctttgaaaagaaactcagggagcaaggaaggaggaagactcttccccatgaggctgaattgggcctaagaatggatccagggttgggctgttatggggatgcccgaggaaagcttctagaaggacttggagttctgtagctggagcagaagatgttgatgatactgctgggtactgttcctcttttccctcacatcttcaccacaatgtgcttttctccacctttccatttctaggttaaaatctggtttcagaaccgcagagcaaaggagaggaaaatcaacaagaagaagttgcagcagcaacagcagcagcagccaccacagccgcctccgccgccaccacagcctccccagcctcagccaggtcctctgagaagtgtcccagagcccttgagtccggtgtcttccctgcaagcctcagtgcctggctctgtccctggggttctggggccaactgggggggtgctaaaccccaccgtcacccagtgacccaccgggttctgcagcggcagagcaattccaggctgagccatgaggagcgtggactctgctagactcctcaggagagacccctcccctcccacccacagccatagacctacagacctggctctcagaggaaaaatgggagccaggagtaagacaagtgggatttggggcctcaagaaatatactctcccagatttttactttttcccatctggctttttctgccactgaggagacagaaagcctccgctgggcttcattccggactggcagaagcattgcctggactgaccacaccaaccaggccttcatcctcctccccagctcttctcttcctagatctgcaggctgcacctctggctagagccgaggggagagagggactcaagggaaaggcaagcttgaggccaagatggctgctgcctgctcatggccctcggaggtccagctgggcctcctgcctccgggcaggcaaggtttacactgcggaagccaaaggcagctaagatagaaagctggactgaccaaagactgcagaacccccaggtggcctgcgtcttttttctcttcccttcccagaccaggaaaggcttggctggtgtatgcacagggtgtggtatgagggggtggttattggactccaggcctgaccagggggcccgaacagggacttgtttagagagcctgtcaccagagcttctctgggctgaatgtatgtcagtgctataaatgccagagccaacctggacttcctgtcattttcacaatcttggggctgatgaagaagggggtggggggagtttgtgttgttgttgctgctgtttgggttgttggtctgtgtaacatccaagccagagtttttaaagccttctggatccatggggggagaagtgatatggtgaagggaagtggggagtatttgaacacagttgaattttttctaaaaagaaaaagagataaatgagctttccagatttcagattctgtatttatcttcagattttgtctgcaactattttttattttttaaagaaatgaaatatcttctctgcttgcaagctgatttggaaaattcagagagggagtggagattatctggacagcctcattttaccccagagcatcagaagcctgaaagagcaggttctgagaccttccctgcccccaagcctgagcccagccttggaatgcgtggctctcctgggggtgcctttgggcaaaatgcacatctgaatggccaggtgcttcccagcagtcagaaattatggggggtgggggtgagagggccccctcatagcatctcaccaaatccacatggaggctttttgcaaacagcaggcagttcccttctgcagtgactccctcctaaggacgccccacaacccagctagttaaacgtgagcattaaattttttttaaaaaaaatccccctagtttcccaagacagcatttccatgaatttagtcttctgtaaatcactgggcatttccgtgagccctttctgcctccactctcttctctgtctttgcagtttccttatccccgaccgcgcccccccttccaacccaatcaccccacaaacaagatttctagacccagtataaaatgatccttttagtgacagtttcttgttatctggccgatccactggggaccgggctgcagcctttaaaatttttgatcctggaggccgccgagctgaactttccggcaggacccgggcgaggggggcttagcccttcgtttcgatcttcccaccaacatccgagagcctaatcagcgcgcccacggaggcgccttaagggcagttggggaagatgagcagagccgggaaacagcaagaggtatagaccctctgcagcacctctccaattccgcggcccttccgggtggcgtatacagctccaggattgggaaaggggctccggtggcccggcccgcgggcgcctggcctcgaagccagagggaggagtgcggggcgtggggtcggggggtgccgggcagaggaggaagccgtgtccgggtccgctgggcgaggggtcctgggtcaggggtcctgggtcagggccggtctgagccccggtgccccgcaggtctccccgcgccccggccgcgcccacaggcccgccccctagccgccggggttgctatgcgttgccgtgaaacgcctgtcaataaaccctgtttggacagtggagcaagagcacatgggttgtttgcttagtggttagaggttcaaaagtcgacattgtcccgctgcaagcgattacaagttcttccccttcccggggctcggtccccttgcacgcgggtacggggccagggaagggagctcggctgctctctgagatgcaagcacccggctcgctgctgcgagcgcctggcaagcctcccgggccacggaaaaaggcgcaaaaccaagaccctctccggcaagtgaggccaccgcgcttctaacgccaactgtgtcacccccgaagcaatacctacggaacaagggatgtggcacgagtagggagcgcagcttgaggagtgtagggaggcctgcacaggggcgcctgaggttgagaccggatgacctcgcggctcctgacgcctccagcgcagagcttggggtcccggcctccgaatcccacgcctccaccgcgtccagtcgccggttcaggcgccagagggcgcgcgcgctctgggaagagatggggcttgggctcgtgaacccggaaaggttccagttttcacccagttgggaggtgcaagcgcctctgccgactccggctgagcccaaacccgggcgctgcaagatttttctacgttggtcgtgggcctgttgaaactaagttaaaactaagtcaggcaggagagattcttgggtttgttgaatgtttaagaaaaacaaaattgggggagagggactataccattctaaaagggtcattttgcacacgatgttttctttctaaaaattacagtaatgtgggcacagtattaatatatggtaatactagaaatttaggataaatatgagaataaaacctgtcaatattgtggaacagaggtt

SEQ ID NO: 45 - DNA, 7615 bp, Macaca mulatta
  source 1..7615: mol_type = genomic DNA
ctccaaccattggtgtctgtgtcattactaatagagtcttgtaaacactcgttaatcacggaaggccgccggcctggggctccgcacgccagcctgtggcgggtcttccccgcctctgcagcctagtgggaaggaggtgggaggaaagaaggaagaaagagagggagggaggaggcaggccagagggagggaccgcctcggaggcagaagcgccgcgaggagccagcagagcaccgcaggctggggcgcagccacccgccgctcctcgagccccctcgcccctttcccttcgtgccccccggcagcctccagcgtccgttcccaggcagcatggtgaggtctgctcccgggccctcgccaccatgtacgtgagctacctcctggacaaggacgtgagcatgtaccctagctccgtacgccactctggcggcctcaacctggcgccgcagaacttcgtcagccccccgcaatacccggactacggcggttatcacgtggcggccgcggctgcagcggcagcgaacttggacagcgcgcagtccccagggccgtcttggccggcagcgtacggcgccccactccgggaggactggaatggctacgcgcctggaggcgccgcggccgccgccaacgccgtggctcacggcctcaacgggggctccccggccgccaccatgggctacagcagccccgctgactaccacccgcaccaccacgcgcatcaccacccgcaccacccggccgccgcgccttcctgcgcttctgggttgctgcaaacgctcaaccccggccctcctgggcccgccgccaccgctgctgccgagcagctgtcccccggcggccagcggcggaacctgtgcgagtggatgcggaagccgacgcagcagtccctcggcagccaaggtaagccgaggctgcgccctgcccgacactgcttgggaaggcgcgggccgagccactggctgctgcgcgtccgcccgtccgttacgcacaggggcgtcccgggctgtctgggagctccgcgccaggaaggacacggtccgggaacaaattcgggggcctctggaccctcggggcttctctgacctacagagcctgggaaggaatattatgagtctcacaacaccgtgttcaggcgtcctcttttcaatagctcctcattcgcaaccccgggacatcttcgggaagctctagggaatgtcggcgtgagcactgctggacgagggcagaatcgcgtgctcccccacttgctgccgcatgcattgcttgcgtggctcctggccgcggaggagagagggaggctcgaaccttcttgggctagatctaggccatttctttccgctctctctttccccatctgagccatctaataagagaattgacctggaggggggtggggggtgtcgggggacggctaggctgtgcgtgggacagtgtttggccattcaggccaattcaaggtagagcgagcagacagaccaggtagagctgctgtcgctgggaagaaggtgctggccccagctgctaaggcgacgggggcgcgccccgtctctgaacctctgacctgtgaaggggtcatttcaagcaaaagctggaggggtaggggcaagaaaccgaggggcagtcgtctgcggagagagcagggagacggggaggaaaccctggtggaaattaagccgctgctccaggtaggggtcattttcccacagcttcctttaaagggcgtcagggatgtctttgagtgtgtgtgtgcatctgaaaaagatcctaggtttgccgcactgtggggctcattgactccgggtctgccccttctggtgttcgagtgtgcctagaggtggcaaggaagtgcggtggggagagtcctagttgagtgccccctttatttcatcaagtctttccacagccctcagcgcttccgcttttcttgcttcgctccttgctgccccaattgggcaggcacgctggttatgggcacttggcagaagtttatagccaattacagctagtataaatcaaagcgccctttgggggctgcctctgggcatcggtttctgcatcactgtgcacatgctagggagagtcctggtgggaatgcggccgtccggggagaaggccacagatcagcctcgggtgggccccagagctttggtttggtcccttctccaagaggaggcgccttcctcctggcaggggctcccagatcctggctcccaaagacccactttctacagcgcatgtctggggagcggttggcggaggtcgcgcacgccctaaggaagacttttgcgtgtcccgggagagtggccgcggggtgagggcctggaagggggcgggagggaagccgccagagcccaggccgcgaggtcagcagatgtgaagtcctgcgccgaggtggcaaggccgcagtcggcgccgggtgcccttgtgatgttaatgtggggtggccgcagcccgctggccggagccaggctcctctgcggagcgtcatctgtcaaggggtggatgggggggacgcggcccggcctgctttgatatacaccttcccggccctgccattgtctcttttagggcccggaaagagggtggtgactttcgcagtcaataatgaattctgacaagtccctctcatcccacccctccacagccccgctcctaggttcccagggggtgtggggcgcgggccgaagagcgcacagggtctggtcatcgcgttgcccagcccgtctgggacactgaaggggcagcacccgagcaagggtcgctccaaggtacttccaggcgagtctccctcctggggtgttcggctgagggaactgccctgagccccagctccgggggtgtcctctgtggctccagtcaggctccggtgccaaccccgcctgatgttgtctgcgtgacctggtctgattctccatttcctcatctgtaaaaaggggcgagtaccaatggcctggagtgggtttgaggcggtcacgcgtgtccgagcgtccaccgcggagaaagtcgcgttagttccccttactttcatagcaggcgcggggtcgggccattcaaatgcgcctgcagggccgtgtttatgttaatacgcctggtggggagggggatgaaagccggggccgccatttgctcagtagtggtaattcaaacagaatgtggttgttattaaggcattgaaagggcttttctttgataagatcgccttgtcctgcattgtttgcggctgtgttcccctttcagcggctccggggagctccctctgatcaggcctgtatcttcccaggacgcttttgttgtggtttgcaaagagttttacctgaacaaagtcagcctgcgggacattaaacacctccaggcaactcccaggcccttcagatctttctgtgggactgggcactgggagattgaacctgttcagctgcaagaagacccaaaagtgggacggagccagagagaacagcttctggccagggctctgccaagggctgagccaagacagacctggtggagacgccaggctcgggcctgctccaacattgtggacactatttgtcaaggcccttcagtaaaacaatcaatctaggatttaatatgttgactcaatccaatgagcatagatcactggtcaggataactctggccaggtttgcagcaggaataaatggagggtcaaaaaagaaaaagtaccaaacgccaaacctggattgggcaggtataaagtgtccctagccggaggggtttgctgcctgttccctctgccagagcccagctcagaattccaccagatgggcctggtgtgtctgggggatgattccggcgacttgtcagctcctgtaccctgctttccacttgtagtaaagcaaagtagtaacccccacacctcctctacaacatgtgcccacaatgacagctgttttcggagtgggcttccatctctgttagacctggaaatctagatgtttccaggatcctggccacttcaccctgccccctttccgttggtgtcaaatatatgccagtactgtatttggtttactgaaagggtggttacattctgttatcttctgtgtgaattaggtttccacttttcttaatttttaaaaaccacttaatactaaggttagtttagttgcctccactagcctcacaccctccccccacaggaccctctggggggtcttgtcagacttggcaggaaccagccaaacccgggccccctggggtggtggaggaagagaaatgtccctgggttagggaggtttgtcattacccatgactgatgggctgccttgcagttctcagccctcacttctccttcctccacagtgaaaaccaggacgaaagacaaataccgagtggtgtacacggaccaccagcggctggagctggagaaggagtttcactacagccgctacatcaccatccggaggaaagccgagctggccgccacgctggggctctctgagaggcaggtggggaccgcctagctccctccgggcgggccactgcctgggagaggaccatgagagttagaaaatctggctgcaggggccatctaaatctgtggagagactgaagcaggaggatgcaagcattcgtctttggagcactttttttttttttttaaatagagatggggtcttgctttgtggcccagactggagtgtagtggtacaatcatagctgactgtagccctgacttcctgagctgaaggaatcctcctgcctcagtcacctaactagcttggactacaggctccagccaccatgactggctaatgtttaaattttttacagagatggtctcaccgtcttacccaggttggtctcaaactccaagtgatcctcctgtcttgacctcctaaagtactgagattacaggtgtgaaccaccatgcctggcctggagtactttttttttccccccaagatgtagttttgctcttgttgcccaggctgaagtgcaatggcgtgatctcggctcactgcaacctctgtctcccaggttcaagcaattctcctgcctcagcctcccaagtagctgggactacaggcatgcaccaccacacccggctaattttgtatttttagtagagatggggtttctccatgttggtcaggctagtctccaattcccggcctcaggcaatccacctgcctcagcctcccaacgtgctgagattacaggtgtgagccactgtgcctagccctggagtacttttttaaaggtccccttctaccttgagtcctctttttttgatgttgttgatttttttctttctctcttttgagggatatagaaagtgtgaaaaaaagccaggggtgttagtttaatccagaattccatttgggtctataaagacatattaaagacctattctctttgtttctagcactgtacctaagaaaataaactaaataaaatactcagtctctcataaaaactagagggacaagacttggttcatgaacattttatttatatcgtctagaaaaacaggccaacttcacagccaggaagccacacaattaaatctcattttcagctctaaggtgaggaaaattacattttagtttagccttgaggggtcaaaggttgccatttgaagtacaccacccagcactggcctccctttgctgtgtagacagggccttgcagtttctgttttccttggttctgagactttacacttgtccagtaaatgcgtagataaaagttgctttgaaagcaaacccagggagcaaggaaggaggaagactcttccccatgaggctgaattggacctgagaacggatccagggctgggctgttatggggacgcccaaagaaagcttctagaaggacttggagttctgtagttggagcggaagatgttgatgatactgctgggtactattcctcttttccctggcatcttcaccaccatgtgcttttctccacctttccatttctaggttaaaatttggtttcagaaccgcagagcaaaggaaaggaaaatcaacaagaagaagttgcagcagcaacagcagcagcagccgccgcagccgcctccgccgccaccacagcctccccagcctcagccaggtcctctgagaagtgtccaggagcccttgagtccggtgtcttccctgcaagcctcagtgcctggctctgtccctggggttctggggccaactgggggggtgctaaaccccactgtcacccagtgacccacaggagtctgcagcagcagagcaattccaggctgagccatgaggagcgtggactccgcaaaactcctcaggagagacccctcccctcccacccacagctgtagacctacaaacctagctctcagaggaaaaatgggagctgggagtaagacaagtgggatttggggcctcaagaaatatactctcccagattttttactttttcccggccggctctctctgccactgaggagacagagagccaccactgggcttcattcaggactggcagaagcattgcctggactgaccacaccaacgaggccttcagcctcctccccagctcttctcatcctagatctgcaggctgcacctctggctagagctgaggggagagagggacttaggggaacagcaagcttgagaccagcctgctcatggccctcggaggtccagctgggcctcctgcctccgggcaggcaaggtttacactgcagaagccaaaaaggcagctaagatagaaagttggactgaccaaagactgcagaacccccaggtggcctgtgtcttttttctcttcccttcccagaccaggaaaggcttggctggtgtatgcacagggtgtggtatgaggggtggttattggactccaggcctgaccagggggcccaaacagggacttgtttagagaacctgtcaccagagcttctctgggctgaatgtatgtcagtgctataaatgccagagccagcctggacttcctgtcattttcgcaatcttggggctgatgaagaagggggttggggggtttgtgttgttgttgctgctgtttgggttgttggtctgtgtaacatccaagccagagttttcaaagccttctggatccaggggggaagaagtgatatggtgaagggaagtggggagtatttgaacacagttgaattttttctaaaaagaaaaagagataaatgagctttccagatttcagattctgtatttatcttcagattttgtctgcaactattttttaaagaaatgaaatatcttctttgcttgcaagctgatttggaaaattcagagagggagtggagattatcaggacaggctcattttaccccagagcatcagaagcctgaaggagcaggttctgagaccttccctgcccccaagcctgagcccagcctaggaatgcatggctctcctgggggtgcctttgggcaaaatgcacatctgaatggccagctgcttcccagcagccagaaattatggggggtgggggtgagagggccccgtcatagcatctcaccaaatccacatggaggctttttgcaaacagcaggcagttcccttctgcagtgactccctcctaaggacaccccacaacccagctagttaaacgtgagcattaaattttttttaaaaaa

SEQ ID NO: 46 - DNA, 6350 bp, Mus musculus
  source 1..6350: mol_type = genomic DNA
tccgcgagccaacctgcggcgggtcatccccgcctctacagcttactggcaaggaggtgggaggaaagaaggaagagaggggaggaggcaggacggagggagggactgcccgggaggcagaagctctgcaaggagccgacggagcaccgtgggctgaggtgcagccagctacctttatctctagccccctgcgcctcgcgcctctggcagccttcaacgtttgtccccagacagcatggtgaggtctgctctgggtccctcgccaccatgtacgtgagctaccttctggacaaggacgtgagcatgtatcctagctccgtgcgccactccggcggcctgaacctggctccgcagaactttgtcagtcctccgcagtacccggactacggtggttaccacgtggcggccgcggcggctgctacggcgaacttggacagcgctcagtccccagggccatcctggcccaccgcgtacggcgcccctctccgcgaggactggaatggctacgcacccgggggcgctgcggcagccaacgcggtagcccacggtctcaatggtggctccccggccgccgctatgggctacagcagccccgccgaataccacgcgcaccatcacccgcatcatcacccgcaccatccggccgcctcgccgtcctgcgcctccggcttgctgcagacgctcaacctcggccccccggggcccgcagccaccgccgccgccgaacagctgtcccccagcggccagcggcgaaacctgtgcgagtggatgcggaagcccgcgcagcagtccctaggaagccaaggtaagcggtgccggggcgcgccccaggtcccgcgtgcgttggggctgtcgcgggctgtctgccagctcctagccaggacaggagaaggggcaaagggggaaatacaggtggattcatcccaggagtgtatatttgtgtctcgctcccccaggtttgtttagggcagtaccccattggcaacctcgggacgccttcggaagctcccggtagtgtcctaagcactgtcgcccgccgcgagctgaatcgtgcccttgagttggctgcctcccgcattccttacaccgttcctggccgagagggtcgggccgcttggattctctttgccgtgcctactcaacttagctacctgcttttcttcttccatctgaggtacccccccgaaagggccagggagtgtggaggctgcgccaggatcagtttggccattagggtctactgaaggggtcggtgctgctgcgagcacagacgccgcggtgcgcccctggagagaaggcggagccccccagaagcctcggaggaagtgggggaactccagggtccctgactcttccctctctctgccaagcaaagtctctcatagaaatcctctcttagcatcacagcggactcggcttcttaagaaggtttcttcctgacccttcccttctagaatctcgtgtgtctgagagtgttgtgtgttggattcgggagatttttcacgaaagacccgagattgccggtctgtgggactcacaagctctgtttgccctttctgatgtccggatgtgtataggagtgggaaggaagtgagcaaagtgtgacagggagtggtactaagagtccccccttttttgttgttccgtgaagccttctccagctctttgagcttccgcttctctggatttgctccttgttggcacagccaggccacatgcccgggttatggccactttgaggaggtttatagccaattacagccgtataaatcagagcggcacttgggggcctgtcgctggacacttctgcgtcactgcgcacaccccgtcaacatcttggtgggcaatgctgccggagtgaagtctccagattagcctccagtgggctttgacattgtcatttccaggaggacttactcctaaaccggttctccgcataaaccctactttcccaagcctgcctgaaaggtagtgagcggaggatcgccggtaggggtcttagccctccgaaagaacttttgcgttcagggggtgggtggtccgagactagggtcctgggagggggaggagaacctcaggagcccaggccgcggggtcagcagatgagaggtcgctgtgaagtcccgcgccgaggtggcaagaccgctgtcggcgccgggcgcccttgtgatgttaatgtagggaagctgtggcccgcagtgccggagcccgactcttctgcagagcgtcatctgtcaaggggcagaggcgtgtacgccgcccggccggctttgatgtacacctttcagccctgccattgtctcttttagggcccggaaagagggtggtgactttcgcagtcaataatgaattctgacaactccttctcatccctcccctcttccagcccccctccttggttcccagggggtgcggggcgcctgcaagcccttggggagcggaccgcagggctcacggaccatctttgcgttcctcagccagcgcgtggtgctctaagagcagcatccgttctagggcgaggaccgctgtgggaaattgttctgcgcctcgcttcccaggtctgatagttttctttagtactacaagctctttgctattcggtctgcacacttaagatttggttctgtcgtcttctgtggagtggggcactagcgagtgtgttacaggctccagtgagcccgctcccgaccggttggatccctttacttccaaagcaggcgcggggtcggggccgcagcgcccattcaaatgcgcctgcggggctgtgtttatgttaatgctcctggcggggaaggggatgaaagctgaggccgccatttgctcagtagtggtaattcaaacagaatgcggttgttattaaggcattgaaagcgcttttctttgataagatcgccttgtcttgcattgtttgcgactgtgttcccctttcagcggcggggggacctctctctgatccctcctgtatcttcccaggacacttttgtagtggtttgcaaaggtttttacctgaacaaagtcagcctgcggggccttaaacacccctgggcaactcccaccccttagatctccttgttcaactaggcactgagcactaaaatctatctgttttgatgtgagacctctccaactttggacgtggaacagttcctggccagcattctgtccattgaagcatccccgacttaaccgggttgaatagccagactcctgcctgatccagcagccccgcgctatttgtcaaggtccttcagtaaaacaatcaatccaagatttaatatgttgactcaatccaatgatcacaggtcacttggtcaggatagttgcctcgggggataaatgggaaattaaaaaagaaagaatgccccaggccaaacctagctgggcaggtgagacgcgttccaagtagaaggattttcctcctgacaacatggagatagcactcagaattccagggcaggactttgtgtgtggtactggtgactggtggggatctgccagcccatgcatccatctttccactatattgaaacaaaaggtaactacccgcttaccttgacgccacatcccaggtattttcaaagtggcctgctgtttcatttctaacaagtctgaaaatgtggatattgatattcctggggactctggtcactttcccaccgcccttttttctgatcctaaatatactatatttgatttatggaaaggaggggtgctgtgtgagaggtgttcctttcaggttagttgtgcctccaggcttacaccccccttccccaggatcctgtgagtggatattgtcaacctgggtagtagacacccccctccatcagtggatggagagaaatgactcctgggttagggaggtttgtcattaccaatgactgatggattgtagttcttagccaaaacttctccttcctccacagtgaaaaccaggacaaaagacaaataccgggtggtgtacacagaccatcagcggctggagctggagaaggagtttcactttagtcgatacatcaccatcaggaggaaaagtgagctggctgccacacttgggctctccgagaggcaggtgggaatcggctttcctgggtctggttattatggcctggggcaatcttaatgggtagcattagaaagtttggtcgagggagctgttgccttttgagaatccttgagtgtccagttgtttttgccgctctttcaatggatcagagagctgtaagggaaaagccaagtcgaggctacagggtggaactgcacttggacagagaaagagcgattggaaccatggttctcaacctgtgggtcgcgacccctcagcttgccactcaaacacgctgtgctttataatagcagcaaaattatagttatgaaatagcaattaaaataatttgtgattgggggtgtcaccacaacatgaagaactgtcctaaaaagaaaaacaaaggtccagtctacgcatacaaactaaagtctgctcatacaaattaaagaggcaggggctggagaggtgatgcttaagaacacacactcttgcagaggatcggagttctgtttccagcatccacgtcaggtggctcacagtgtcacagtgtcggctaactctgattgcaggggacacccagtgcctctggcttctgtggatatatatgaatgtatacagacatacacatatcaaagatttaaaaatccttgaactttttttttcattaacacaaaagaggccctacttgcacaccaacactttctgtagtctagggaaaagggaaggaacaaacaagagaaattcatagccaggaagttttggacaaagtttcattgtctgtgccaaggtgaagaacatcgcagtaccaatgagctgtgggagcccaagggtgacccacgaggcacactgagctggccaaccatttgtgtagggaatagctttcgtcatggttccgttccctggttctgaggttctgttgctagtaaagggttttttgtttgtttgttttttgttttttgaaagcaacttggggagggggcaggtaagtaaagaggacgaggctggcctggctttgggaacatttcccaaactcagtgaaagaaggacgctcccggggtggcgccatttctctgttcttatcttcttctaccttctattttgtcatctctaggttaaaatttggtttcagaaccgcagagccaaggagaggaaaatcaagaagaagcagcagcagcaacagcagcagcagcaacaacagcctccacagccgccgccacaaccttcccagcctcagccgggtgccctgcggagcgtgcccgagcccttgagtcctgtgacctccttgcaaggctcagtgcctggttctgtccctggggttctggggccagctggaggggttttaaactccactgtcacccagtgacccctcccgtggtctgaagcggcggcggcacagcaatcccaggctgagccatgaggagtatggacgctgcgagaatcctcagaagagattcctctcctcctacccacgaacagcatctactgatggagattgaggacagaagatgagtggaattatggacctcaggggaagacatggtttagattttttttttctttttaacttttcccattccgactcttcctgccagcaacgacaaacgaagtgattcctggggcttcttcgttcatgctctttgccaggactgactaccgacatgaagctatcagcctcttttgccccagctctttgcctctctgtatttctgtgtggagctgaggagagagtgagactggatggggtgggggtagcaatacttgagccaaggtggctgtttcctgctgactgctttctgagaaccagctggccgtcctgcctccgggccagggactattcaaactacaggagccagaggcagctaagatagctggactgaccgaagtctgcagaacctcccccaccaggtggtctgggctttcttctccacaaatcaggaaggggtggtgggttcaggggctgcggtgagagggggttggttagccaacgccaggcccctgcgacaagggcttgtttagaaagcctgtcaccagagctgctgtaggcggaatgtatgtctgtgttgtaaatgccagagccaacctggacttcctgtcccttccctcgtctttggctgaagaagaccggaattgtttgctgctgttcgagtcactgatctgtgtaacgagccaaacaagccttttaaaaagccttcttgatccatgggtagagaagttgtatggtgaagggaagtcgggagggggggaaggggatccgaacacagttgacttttattttgtaaaaagacaaagataaacgaactttaac

SEQ ID NO: 47 - DNA, 2471 bp, Homo sapiens
  source 1..2471: mol_type = genomic DNA
ggggacgaagggaagctccagcgtgtggccccggcgagtgcggataaaagccgccccgccgggctcgggcttcattctgagccgagcccggtgccaagcgcagctagctcagcaggcggcagcggcggcctgagcttcagggcagccagctccctcccggtctcgccttccctcgcggtcagcatgaaagccttcagtcccgtgaggtccgttaggaaaaacagcctgtcggaccacagcctgggcatctcccggagcaaaacccctgtggacgacccgatgagcctgctatacaacatgaacgactgctactccaagctcaaggagctggtgcccagcatcccccagaacaagaaggtgagcaagatggaaatcctgcagcacgtcatcgactacatcttggacctgcagatcgccctggactcgcatcccactattgtcagcctgcatcaccagagacccgggcagaaccaggcgtccaggacgccgctgaccaccctcaacacggatatcagcatcctgtccttgcaggtaagacctgctccggggtccccgccccgccgccgcacactcccgcggtcgtctgggctgtcactaggagatccgtagcccagacggtgactttcgtatgagctatttaactttattttcttcagaatctgctgtagattgagctgtgcgtgaaattgctagtaagttctgacatgttaatgcgtctgtctttaaatctgaattgttaccataaacgtgtttaatggaacttgctggtctgtggactacaaaaaaaaaaaaaaaaaaaaaaaaaccctttctacttaacattgtcttaacctcgtactctttatcctctttctttccaggcttctgaattcccttctgagttaatgtcaaatgacagcaaagcactgtgtggctgaataagcggtgagtgtttgcttgtgccacccgtgggtaaactgcccctcggtgtgtgtgcgcgcgcgcgcatgtgtttttgcttgtgtatctataaaatgtctgatttggtaaatgcatgcttacttcgcggtgttacccgtactacattgtctcactagacatgaaggagcttgtagctttgggtgctcgagatcacagaacattttcctttaaaaggaaatgatgccaataacttactacgaaggcggccgaggaacgtgtgtattggctttgtagcaaatgtaatgccctggatcttcctacgagtcctctggtactatgaggtactaacctccactgtaattaatcttaccgccacaaattccatagtgatcctccttccctaaaactatagtcctctgggattctctgggctagttgaggattgctaccctgtgccttcaaccctgtgatgtgggatcccagacttccctatctgttaactaaagggctgttttcaatcaaataattgttacgagaagcagactggcgcctgtagcactgctgttggagatccaaataggagattgggttgggaagtttttcccttgagtctctgctattttaatgtttaatttgcgctgtcgaggcgagtgtgtgtgttgcatctggacgccagggtttgcccaatctttgagtgtttggttaaatgttcaaactgtggcttcctcccggcgccagtcgcccgcctctgcccttaggttacattctcttaaacatgcctttctcccccactctttcgcaggtgttcatgatttcttttattctttgcacaacaacaacaacaacaaattcacggaatcttttaagtgctgaacttatttttcaaccatttcacaaggaggacaagttgaatggacctttttaaaaagaaaaaaaaaatggaaggaaaactaagaatgatcatcttcccagggtgttctcttacttggactgtgatattcgttatttatgaaaaagacttttaaatgccctttctgcagttggaaggttttctttatatactattcccaccatggggagcgaaaacgttaaaatcacaaggaattgcccaatctaagcagactttgccttttttcaaaggtggagcgtgaataccagaaggatccagtattcagtcacttaaatgaagtcttttggtcagaaattacctttttgacacaagcctactgaatgctgtgtatatatttatatataaatatatctatttgagtgaaaccttgtgaactctttaattagagttttcttgtatagtggcagagatgtctatttctgcattcaaaagtgtaatgatgtacttattcatgctaaactttttataaaagtttagttgtaaacttaacccttttatacaaaataaatcaagtgtgtttattgaatggtgattgcctgctttatttcagaggaccagtgctttgatttttattatgctatgttataactgaacccaaataaatacaagttcaaatttatgtagactgtataagattataataaaacatgtctgaagtcaa

SEQ ID NO: 48 - DNA, 2092 bp, Pan troglodytes
  source 1..2092: mol_type = genomic DNA
atcctgcagcacgtcatcgactacatcttggacctgcagatcgccctggactcgcatcccactattgtcagcctgcatcaccagagacccgggcagaaccaggcgtccaggacgccgctgaccaccctcaacacggatatcagcatcctgtccttgcaggtaagacctcctccggggtccccgccccgccgccgcacactcccgcggtcgtctgggctgtcactaggagatccgtagcccagatggtgactttcgcatgagctatttaactttattttcttcagaatctgctgtagattgagctgtgcgtgaaattgctagtaagttctgacatgttaatgcgtctgtctttaaatctgaattgttaccataaacgtgtttaacggaacttgctggtctgtggactacttcaaaaaaaaaaaaaaaaccctttctacttaacattgtcttaacctcgtactctttatcctctttctttccaggcttctgaattcccttctgagttaatgtcaaatgacagcaaagcactgtgtggctgaataagcggtgagtgtttgcttgtgccacccgtgggtaaactgcccctcggtgtgtgtgcgcgcgcgcgcatgtgtttttgcttgtgtatctataaaatgtctgatttggtaaatgcatgcttacttcgcggtgttacccgtactacattgtctcactagacatgaaggagcttgttgctttgggtgctcgagatcacagaacattttcctttaaaaggaaatgatgccaataacttactacgaaggcggccgaggaacgtgtgtattggctttgtagcaaatgtaatgccctggctcttcctacgagtcctctggtactatgaggtactaacctccactgtaattaatcttatcgccacaaattccatagtgatcctccttccctaaaactatagtcctctgggattctctgggctagttgaggattgctaccctgtgccttcaaccctgtgatgtgggatcccagacttccctatctgttaactaaagggctgttttcaatcaaataattgttacaagaagcagactggcgcctgtagcactgctgttggagatccaaataggagattgggttgggaagtttttcccttgagtctcagctattttaatgtttaatttgcgctgtcgaggcgagtgtgtgtgttgcatctggacgccagggtttgcccaatctttgagtgtttggttaaatgttcaaactgtggcttcctcccggcgccagtcgcccgcctctgcccttaggttacattctcttaaacatgcctttctcccccactcttttgcaggtgttcatgatttcttttattctttgcacaacaacaacaacaacaaattcacggaatcttttaagtgctgaacttatttttcaaccatttcacaaggaggacaagttgaatggacctttttaaaaagaaaaaaaaaatggaaggaaaactaagaatgatcatcttcccagggtgttctcttacttggactgtgatattcgttatttatgaaaaagacttttaaatgccctttctgcagttggaaggttttctttatatactattcccaccatggggagcgaaaacgttaaaatcacaaggaattgcccaatctaagcagactttgccttttttcaaaggtggagcgtgaataccagaaggatccagtattcagtcacttaaatgaagtcttttggtcagaaattacctttttgacacaagcctactgaatgctgtgtatatatttatatataaatatatctatttgagtgaaaccttgtgaactctttaattagagttttcttgtatagtggcagagatgtctatttctgcattcaaaagtgtaatgatgtacttattcatgctaaactttttataaaagtttagttgtaaattaacccttttatacaaaataaatcaagtgtgtttattgaatggtgattgcctgctttatttcagaggaccagtgctttgatttttattatgctatgttataactgaacccaaataaatacaagttcaaatttatgtagactgtataagattataataaaacatgtctgaagtcaa

SEQ ID NO: 49 - DNA, 2294 bp, Mus musculus
  source 1..2294: mol_type = genomic DNA
tcattctgaaccgagcctggtgccgcgcagtcagctcagccccctgtggcggctccctcccggtcttcctcctacgagcagcatgaaagccttcagtccggtgaggtccgttaggaaaaacagcctgtcggaccacagcttgggcatctcccggagcaaaaccccggtggacgacccgatgagtctgctctacaacatgaacgactgctactccaagctcaaggaactggtgcccagcatcccccagaacaagaaggtgaccaagatggaaatcctgcagcacgtcatcgattacatcttggacctgcagatcgccctggactcgcatcccactatcgtcagcctgcatcaccagagacctggacagaaccaggcgtccaggacgccgctgaccaccctgaacacggacatcagcatcctgtccttgcaggtgagactagcttgcaagtacgccactgcccagacgctccgggtctcccgagctgtcactcttaaagcccatcgtagagacaggttcattaactttatttttgaggaaactgtatattgagcgtcatgtgaaatcgctacttataagttctgtgtgggttgcatctggatctgcgctgtagcatgatcctgtttcatgggacttgttggcacttttgtgaaaggaggaggggggctaccttcctttaagattacctaatatcctgccttttatcctctttctccccaggcatctgaattcccttctgagcttatgtcgaatgatagcaaagtactctgtggctaaataaatggtgagtgttgcgggtgcctcctgtgtgcgcgtttcggtaatgtgcttgtgtgtctgttaaatgtttggtttggtaaatgcatgcttacttcactgtgttacgggtgccgcttgacttaccacataggcatgaaggggcttgtagctgtggttgctcaggactacagaacagttgcctttacaaaaacagaaaagaaagaaaaaaaagaaagaaaagaaatgccagtaacttactatgaaggtgtcaggaccaagtgtggctgacttttatgagcccagtggcggtacactgaggtggtaacctcagctgtaattaatcttatcgccacaaattccatagtgattctcttttcccaaaactgtagtcctctgagatttctctggctagctgaagacggctaccccgagccttacccctgtgctctgggatccagatttccatatctgttaactaaagggctgttttcaatcaaataattgttacaagaagcagactggcgcctgtgagcgggctgttagagatccaaataggagactgggtttgggaagttttcccctggagtctccgctattttcatgtttaatttgtgctgctggggccgggtatgtgtgccgcatctggacgccagggtttggttaaatgctcaaactgtggcttcctcggcgccaggctcgcccgcctctgcccttaggttacattctcctaaactgcctttctctcccaatcttttgcaggcatttggggacttttttttttctttttactttctctttttcttttgcacaagaagaagtctacaagatcttttaagacttttgttatcagccatttcaccaggagaacacgttgaatggacctttttaaaaagaaagcggaaggaaaactaaggatgatcgtcttgcccaggtgtcgttctccggcctggactgtgataccgttatttatgagagactttcagtgccctttctacagttggaaggttttctttatatactattcccaccatggggagcgaaaacgttaaaaaaaaaagaaaaaaatcacaaggaattgcccaatgtaagcagactttgccttttcacaaaggtggagcgtgaataccagaaggacccagtattcggttacttaaatgaagtcttcggtcagaaatggcctttttgacacgagcctactgaatgctgtgtatatatttatatataaatatatatatattgagtgaaccttgtggactctttaattagagttttcttgtatagtggcagaaataacctatttctgcattaaaatgtaatgacgtacttatgctaaactttttataaaagtttagttgtaaacttaacccttttatacaaaataaatcaagtgtgtttattgaatgttgattgcttgctttatttcagacaaccagtgctttgattttttttatgctatgttataactgaacccaaataaataccagttcaaatttatgtagactgtattaagattataataaaatgtgtctgacatcaa

SEQ ID NO: 50 - DNA, 130541 bp, Homo sapiens
  source 1..130541: mol_type = genomic DNA
gatataactccacacccccaaattcaagcatgtaagaagacagcaggtccgcagagaggtgtggtcagggacatttcccctggccgggagcccatggagcactgtcctcagagatgcgcaggttaggctcactgtctaggccaggcccaccttagtcactgtggactggcaatggaagctcttcctggacacacctgccctagccctcaccctggggtggaagagaaatgagcttggcttgcaactcagaccattccacggaggcatcctccccttcctgggctggtggtaagaagtggctacatactgtgggtgtttctgaaggtatcattcccacctggaagcttggcttcaggaaaatggggatgggtgagggacagggatggcataaacaaacagttagcattcctacactcactggatttagagagcatgtggcagattctccaaaaatgcctgttgggtcttgtcttttagtgaggaagccgtcaagtcctctactctcctggggaccaagctggctccaccagcttctgctaagttgcctggcttgaaaggtggaggaagtatcctcctattgttggtcctaggggagcatatggcagggaggggatttgaggacctaagagacactgcttgctgctgcctcatttgtgcaaaaatggctggtgtctggggaggctgcctcaagagagggaagatactaccaagactggattccattaagagtggagattttcacccgacctctggcaagagttgctgtgctgggttagactgcatatatcatgacgagactgctctagtgacccttgagatctgggccttggagtaggatggcataccctgaggacttaggcaggctggggtgggaaagggcgggtggttagtgggaacctgtgtttgtctagatctctgacatactcagtgctttttgtacccagggaaatagaggcatgggggacagagtgggctaggctgtgtgtgaaaatttttcctaattatctgccacctggagcattgcttactgtaggacagcagcctatgacatcggcatccacaaaccagtgcttcctttttccctcccaggaaacccactgggggaagggtgaggacacagaagcctgtgtcccctctgtccaccaggtaaagagtgtgtggagcgtgttgtattggacagttcttgtttgtcatcatttttcttagggaagagctcaaactcagggagggagggagtaggaaaagcagagtggcgggtcatggtggctcatgcctataattccagcactttgggaggccaactcaggcagatcacaagaggcaaggagttctagaccagcctgggcaacatggtgaaactccatctctactaaaaatacaaaaactagccaggtgtgctggtgggtgcctgtagtcccacctactcgggaggctgaggtgagaggatggcttgagcccaggaaacagaggttgcaatgagctgagatcatgccactgcactctagcctgggcgacagagctggaccctgtctcaaaaagaaagaaaagaaaagaaaaacttgtcttttaagatttaggaattgaataagtagaaattcagtgaccacagatggaatgctttgccagatattctctgtgtgaccttgggtaggtcacttcaccacatagagaaatttacaaatttcctttgtcaaatctgatgatggttctaaatggttctctgagtccctcctagccataaggtgctgtgaatgtaatgaatatcaatttaaaggcatttgtcacaaaaacaacgtgagctgctgtcatcttacatcctccacatttactgcatctaatagcttttgtccactttccttttggctgacttgcctacctgggggtactagtactggggtggagggtagtgaaggggtggcttagagctcttgctgagcatggattacaaacagcccctcctctaggtgagcagtaaaataaatcatgatttgttgactgcattttaggactgaagaaagccaagaaccctgcccaccccactccacccctgtacagcctctgttttctggagaagagatgactttggcaaggtcacatggaggagtcaggacccgatcccagagtcctttactgtcccatactgctgcctctccagccagaggcatggagcctaaccctggctttgggaaggaatccatcctccgtgagttggctgagggcagaatgggaaaaatgtgggccccatgcacagtgtgggacctaggcaagtttgtctggagaatcacaggaggagcctgggcctgccaagttggatcatgccactagggtgtcccggcggctggccctcatctctcctcttgcagagtcagaaaggaaatgagaaagaacttggccccagggctgtgtgagaggaggctcaggcagaggaaggctgagaaggcctaggtctctaggagttcattcctgcctggaggacaatcagctagtgcccagagataaggctctggttcaccttcatgcctgaaccttagaggcagagaataatagtaggcaagcattagcctagtgttctaaccaatgcagaccccactttctcctcatttgctcccagtggctttgaatccattgctctgggctgtgatgtggtctttcttttcagaccatgaagaggaccttatttctaccaagtgtgtcttgtttccagttaaaaacggtgcacccacacagagtaaggagtcaaggggccccagacaacccatcactgcctcaccttcttcctgggcagcggcctgtcactcagcaggctgtggcaccccactccaaactcctacaggttaaccattcattcagcaaaatcttcatcaagcaactgttatgtatcaggcaactttagatgctagagattctctggtgaacaaaaagagacatggtccctactcccatggagcttacagtctagtgagggaagggtggaggagggaattatcactcatgccagtacacagacaattgcaaactgtgataaactacccaaagcaaaggaaccacagaagattctggcactatatggaaggtggggccttctaggtggcagatgtaaagactggggcccagagggaaagcagcaggggctgtggagaggaacagagggacctgcaggaagctgtcataggatgccttccttggaggccaaggactggggcctttttcctaattgcaacaacgggacattggatgtgcattttacaaatcgctccctggctgctgtgtgcctggagaatggatttcagcagggcagaaaggatgccgaaaaaccagtcactgaggtcctggtgagagatgatggtcatatagaagccaggctcaagggaagcatccctgcacccctctttctgtctctgatgaagtacctatgtgatttttaaaaatcgggggctgctggggggctactgacagaggagacatcttcatccatctctctgtgagatgccttcctgagccttgcgcccagagaatcccacttgttcctccacttcagcacatatgaaaaatctcagctctgtttcccaacctgcacgagcacatttatccaagtcaaaaatcatctgcgatccttctgcccactctcccagcccctgcccaggcggctggcccctcctggggtttctcacaaccctccctgcctttattcctgaagtgcttgaacattgcctgcagttacactccatttagacattattttgatgataaaattatgtcttcccccctactgctcattgtcttctgcagaatataggagaataaggtggtggtgtctcctgagggcttttccccccttttaaataattctatacctacccccctccccacactcatttgaatcatcaaattgattattatccctgtggctggtgcatctcaaaagatgaaaaacccagaagcagggctggggcatgacttacagctcattttggtacagtggcatcccataatattcgggttcactgagggagcagcggacggggatgcaggtgcgtttgtagctggggattcaggtgtgtatttcaaagtgtgtacttgtgccttggagtggatgtggcgggtaagttgatcattttcaccacgattgtattttcctaagcagacaggaatttatttgctcatgtctgtgtcctgggtacatttcagagagctgccaatgactagagcatcacttcatacattgagagaacgttttatagatgcgcaccctgcatctagccatatgagagtggtgcagaactgactggcccaggtgatgagaactgggaagggaatctgtttctctcctgccttcttgctgtgcctcacctgctggcctgaccctttgcacttttgcgcacacagcgcagggtttgaggctgcctcttctctttggtgcgtgggtggagaaatgtgactcatttttaatttggaaaacagatccattccagaaaggctgagaggtgagtttgctagacctgccagttaaaagatgggataggggtggcccggggggtatgtaagcaataaatctccccccaccccagacccacctggcggttggacattcccccccacccccctttaactgcgagaaggcaggccttagggctctaacacccagtactcctactgctcaggaggtggggacctcgcgcgctgagcgtctcattccatgaagtctctctgtctcaccccctccccccaccccagcttgattctgtcactttaagtccagcccctgagagatagccaataggagccaaactatacatcagtctcccagccttaaagctacagtagggttagtgggctccaagtctcttgtgccccagcctcctccacggcttcgcatcccctctgcccgctctctccggagcgtgcggatgagtggagagctgggctgtgcgcgcacggctctctgcctccctctcccccgccgcggccgcctcctcccactctgcgttctcgcgctcactgtgccctgcccgggctcgcaccttgcccgtgcccttcactcgctcttccgcgtgatttccccgccgtctttctctaccaactgggaatgctaaaacgggactgatggacgtgtccgaactctgcatcccggaccccctcggctaccacaaccagtaggtgccctgcttctcggtctgtctgtccttctgcccgtctggcagtctctgtcctggggatcgcagttccttttctgcacattcttgtgtaaaagtggaagggacttcgggggggcacttgggggacgaaggaggggaaaagccgcacacttctgggtttctttctagggcataaaccctcctctaactttttcccgcacccccttttacaaatccacactttcaggcaagagtggcgctttctcatgcactttctccctttctctctcctctctgatcttgctccggggtgagaaaatatttgagtttttgtggaatggagcaagaagggaggcagaagcccagaacaggtgcagggatgtggttgcaaggatgtcctgtcccgtcagagaaagcctttcccgcgggcgctttgttttattatttccatcctggggaccaaaaatgatcccggcaagagagagaaaatcgaacgtgccgcggcggtttggaaactgcaggcggccagtgccgctctcgcctcgcggtctccgtggggcgccccgagggtgcgcacgtggcgcggcggatccagggcgcccgggggatgcgggcccagcgctgcgtcgtaggcaaagttcgttctcggctttgggggaggctgtgaccagcggaacagaagggcaccatttccctgctccgaggcggctttgcgctcgcggtgccagaacctggggttatccgagcggcgtgggcgcgggcggcagccggcgccgcgagaagcgactctcagaaaccgcgggtctccagccccggggcagcgcgccaagagcgcagagtgggaaagtgaactgatcgcctaagcagcgggtggtcaacccgcgtgtcatgtccgggctctcggggatcccactctatccacctacggtttccctcccgacaccctccacggtcgccgctccacctgctcgggtacctgcccgggtctccccttgggcgctgcgcaccccacggcgcccccggcgggtgtcccggaggcaggttgtgtgcgcgtgcaaagtggtccctcggaaggcttaataataataatacataaaactctaggttcttacggacagctttcctgcttaactttgtgctcgtcttcctcttttttttctgacgcaaactaaattctccaagtcagcgtttctccagttccaccgtgctttcatttgtgtaccactcgctctccccctccccccaagaaccacgactacatctctaaaataaatactctggatcatgtggggtcccaggaagtacctaacccctctcctggctgcatggagcacctccaccacggtgcaccccgcttgagagagagggcagctgtccacagcatggcttgtgttgttgaccagactgttcctgcttctagtttggggattttccccactccaccctggggcagagggccttttagatgccaccagaatgtcggcagaaggcgctggtctgggagaggaatccttaataataatggattccgatttccatcagcttgaaaagtggctttcattccttttaaaggttagattctagctggggtggggatggggtgggagcacctgaggttagtgaggctgtggacagtatttggtgcttgtggagcatttccttacataaaatgatcaagtatgacaaatattggatatttaaattattaaggctccctctctccagaggtgacttctttagttgagcacgaaatacttatgtatttgtccctggctcaagtcatagtcaataaatatgaaaattcgtatgaaggaagtacattctttgattatgcttaccaggaaagcaaggagtgagatggaggctttaacagctgggtaattcatcgagttgacggcagccctgactggagtttgaggagaaatatgggcaaaaaggcaatgtcagggaagcagcagaaggaagtcagggagctgaggtcctgggggtctgggaaaggtttgagatagaaatcatttataaactaagcctgacagaggtttagatccccaaccctttccggtttttttttgcaaagaattagcttgtccctccatggggcacaggaaaagccaaaaatatacctgctgtctccaccgaggaattgagcacccctgtcagatgtcatttctcaaagcccaggacccactgggcagcagcccaggcattgatgagctggcctcttatacatatatgtgccgcctagggagggtctgcatgtgctgtggcgcagaggggcatcatttcaaggacgagcttgtggaggtctggggctggtgtctggggagacatctttctgacctctaccccatggctttgtgacacagctttagagccatgggtagtaaagtaacagagcaggggactggattctttggtttggtagaaggatagtaggacaaagccattcattatagtgccggcatttcccagggaacatacagtaagtgggttcgtgtatgctctgctcactgttttgacccctgtggattggctgacattcccagacttgagaaaacccaagggcacagggactagagttgagggaggaggaactctctggtcctcccttttgcttctaacacatagagagcatttgttaatgctgtagaatcattctcactttcccaggtgagaaatgaacacacacagagagaaacatacgtaccttcctaccttgctctccttcattttcattttcctgtagccaatcctgtaggtgactccattacccattctaatcaatattttatgtacatatataatcacccagagtgggaggcagcgtgctcgcctgtgtgtgcctgtgtacaaatgggtccatgactggaccagctggagacccacggcaaacagtccagagagcaaggggggctatcttccccaccgtccgatgaccactttgctgttgttaaagaaacaaagaacaaattgtcctgaaggtaaaatatgtgggttcacacgtaggaaaaatgccacatggtaattcagagtcagtgacccggagaaaaacaaagggggaaattaatttttaatggtacatttaaaaataaatcagagtgaggacatcagtctcggttttccaagggaggggctctaggaaataaacctttatgtgcctgtcagccttctggaggtgtgcgctgccatggaagaggatgggtgataggaggtgggaggtgttcaggcctgaaggcgatgaactgggaggagacattaggtcaacgctggagggccccggtcccgggtaaggccctttccagctcagtgagatcctgacatcactggaaatttcctcttggagtttgttacttcccccaacccttttcattttagaaacaatcctttattttgctgataatgaggacatatgaaaaagatctgttccaaaaaaaaaaaaaaaaagcacagagaaacaacctggccacaaaacaggaatctttttattctattgatttggagtaatcaataaatattccatttagtctgggagaggaggggcagaggggactttcggggaaagcacttcaaaggaggtggcggtgacagagatttcatgtcacaccctgccttctcagagcacccctggccctagctcgggggcccttataactttgtcctgcgtgtgctccattcatattcctgataactggacattttgccaagtggtttttaaagataatctaaactcattgagaaagtttgtccccttcctcagccctctgctgaatgccttgtttcttttgagcaaagatctgcctacttctgatgggccggaggaaggatgcgtgtgacagagagacattgagggagcatgtacattggggagggcggtggagttggccatgaatgcataggattcagaaggagacagaattcgaagacagtagacaagcaagaaacaggatgcttttggcctgactctgcagcgcccttctctagaacttgtctccccaagtcctttaagcgacttcttaaaaatgattaaaattctttttggttccaaatttaagggaagagatagcagatatttagaccataatgtcctccttcaaagtaaagcccacaccacaccttgactgcctccattctggtgttccccaacacctaccggccatcatcgagtctctgtccatttctttctgaagtgagaccctcgtaatgctcttcctgctgagcaggagctctgcccagaattagcgaggatgccgcacagctcccctgggagcttctgtcgtagagtctggtggctcttgactgaatgttactggggtggggagccccagcttgacttgaatgttcaacctctggggtcctccagtgacactacagcccctagaggtgctgccagtgcagggtctaaggaaggaccccaggaagccaggagagtacaaattaagaatgggctggaactagccaaatctggcccggaatcttcctgaacatcctgcctgtttgcccttgaaggctttcaccgatttctagagataaatcaaagacgtttttagcatgtatgcactggtgacccctgattggtctctgtctctggtgagtttccccttcctcagccccagcagccttagacctctggggacagtcacagacatggtcttccctcagaggagaggcccataggctttgggtggccctgatgtcccctgtcccctggcatgggtggggtgggattatatccttttagccccgtcagctggtatggcttcgtccctgcgcggggaggttgtggtgtttataattgcaaatgtaattagcagaccagctctgggggactgggaggctcaacttctctgcacttcacggtgacccctgtaatggctggcccggcagattaaccctcaccgggccagcctgcctcctgccactggtgaggctgctgaccttctctaataatggcagggctgtcctgggaccagacaccttccgtggaggggttgtcagggcaatgactgggagagatccgtagttgggaggattttttcttccccagggcactgggctagtgacctttgcctcttgagacactgtcaccctgggcagcaggctgtgctgggccatttcttctctcgtgttcctggccatactggaaggatgtgacggaaggactgtgagtgcatgctggtcagttctgtggctctaaagggactcattgtgacttccatctggtgctcctgggctcagcgggcagtagcttgtattcacccatctcatcagcttcttctcagagccagctttggggaggtgactgttcgctggctcctggactctgagcaggtgttccacagagctggactgctttgggtagggagcctggtcataggagagcacaggctcaatttgtttctgagaacagagacctcaccagttaaccatccaacaaaaggacacaaaaacaccagacaagtggggaacatggagctgcacggtcttttccctccctcctatgagtgtacttgtatttgcctctctaaggtgcccttctgtactgatcaggattaatatcatcaagggtcctaacaggacctttctttataagtcattgcttaacagagtgtcaagcccttctgtgctgccaataaagcccctgttgtagaggatgtttctgaacctcgaaacatcaaaagccgtgtccaccccaagagagtttccaccgtgggaaacctgtgtgtgcacatgtgtgaatgtgttccggtgggtagtcccctttaagatggggtgacagtggacaggggtctctgctatttaaacatgttcctgctgactgctataccccttggctgggctgaggtctggctgtgaccacattccagcaggggctgccgtgccttgggattggttcgtccatggtgcaaaggggactgcaggggcacctgctaggtggctgtccctctggtttgcccagaggatttcagtcttaagagcctctctgcaattttctggcctgggtaggggtggggcagaccccagagagggagagaaggaagtcctgcccttctccaggataacagatggccacactcagaggagaatttgggccattctgttccaggttcccgacttccccttctctccctggaaatagccattgacaggttgtggcttaaagagtcaactcttttcttaaatcaaggaaaatcatactggttaatcagcccatgggatgttcactatggagttggactaggtggaaaaaaattattggccaaatgttttaaattcagaattgtctgagtttgagttaaaattgtataaatctaaaacaaaagttttcctggggctcagagatagaattttttcatttcattttgctgtgcttttaaacctatacacattttggtctgaaagtttcttttttaaaaaaaaaatgtctttcctttgttccttaggactttaaaatactctattcaatattgtcattcagcatccccgggactgaaccttttcagggaatggttttctggaaaattttattatatttctcaatgtcatttcattcagaggtcagaaggcagttaaacaaactccaacaagcctttgtttttatcttctgatttcaaatgtgatcaatttttatttaaaatcgtatcagagacctctcctaccaattataggggcagtcagccttgtgcctgaccattggtgtttaccaaaatcctgcatttaaaactgtacgaatgtgaagtgtcaaattgaattcaatcttttctatcaaggaaacgatgagtttaaaaaccccaaataccaaatgtggttttaacttggttcttttatttttaatggcttgaattggcttgagttcataaattagtttttatgttttattctttttgttaattcattttgaaatttttattggttttttttttggcattttcatctggcttatgctttaaaaatgatgcctgataaagggtctttgagaatcattggccttttgatgtgttcttggtttctgaagggcaaagaacaaggaaatacaggtgtaaggaaatgctataggagaggatggaaggggtgaagaagcgtgatcttttagatgagatttctctcgtgttttacaatttagcattttcctttgtcttcattttttcccctctatttttattccagcttgctgtagtttgcccttgtccttttgtccctccttgactgttttggaggaaggagtgtaggtgtgtggtctgcctgagtgtgagtgtgtgtgtgtctgtatggctggctgagctgttcagaggtgctgagcatgattagttgggtaaagtcccaaagcagaatgcctataattggcccccctgttctgattcagccatcaatacctttattcatggccgctggctggctcacgttttggtgaaaaaaacaagaagggtgtagacctgctgtttacagacaaatttcaggtggtctgtttgttatctgaggcgcgtggtgataggggctgcaggtatgggtgaggatatgaagaagcactaaactttatgcaaaaccaatttttaaatccctcccctcatctcaccgcctatgcttggaaccctagtttgggatcttggtgatgcacagtaaatgagctgttgtatgcttttgtttttgtcttcctaatcgatcagcagaaaacatttccttttgatggtgaaacaggacttcagcatgcagagcgcagtatttatcctcttacttttagcttcactctttgtcatttgtctcttgggtttgttgacattgtctacctaagcagtcaagctaacaagctttggcagaaagaacactgcttttacagaaatagtagcaattttaatgtgatggttataataattgtgattacagtaatcacagcttgtacctttttcttcccaaaaagcgcaaagcaattctcgtaaccatttttctcatagtagctggatgagggtgaccgtttcttgctcccaaacataaatatcttcgtgcaaacataaacatgcaaaggctgcaggtttgcgtgtctgaattcacccaggagcaaaaactgcctggtctctgaatacgaacaggcaggtagaggagaatacggtgttaaccacctggcccccctgagaaaagctgggtgctttgcctttgaacgaagatgggagaagtgtttcttgtaagtgatgctgtgccaagtttgaccccactactgccggcttctatgccccgtgccatgctctgcctcccagtttccccttgctccttggttcctctggctgcattctcatgacaggtttgcagaccaaaggcacagagaggacaagggggggttatgacttggcgcatgtgaatatctgggagaagaactgtgtgaagagagaggcaaagtcatctctccacccttgatcgccttcttggccatttggcttctatgaggccgttgtccctgctcctgagtacctcaacctgcactatggaggtgattagagggaggtcatcagggaactgacctctctgaatttccatgtcccttcttgtgatgcttcatggcgactcccagacctgaagcctgctcacctacagaccatgctcatctgtgcgttactttagaatccatcaatgcttctgttatttcctctctcatttccttttttgtatatgtatcgtggaacgaagaagcagctctgcttcacctaatattccagggtcccatagctgtctgtattttttttccatctcaatattcttattcatgttcttactcatagtttcttttcctcaggaaaaaaaaaaaaaaacaaccaaacctcaaagctttggattattaattgattattaactgattttacaaacaaatcattccacccccaaggaatgcaagcaagactctggctgtgctgcttaggttgagatctgctttccccctcaatcggtgagaaattttatatcttcaattcccttgttggaccctgagtaaaaaattaattcatgaataataaaaaccaatcagtcttgttgagtttaagaaggattaggagaaagggtgttttttcttacagagaacatttggaatctgtgtgtcactgtcaccgagtgtttgggggtggcttgagcgatgcctttattcatggcaaatgagctgttgattatcctgagtataacacatcttcctcagttgttaaggccagcttactgctgactgttacggggttcctacccactgctctcccaccatcccgtactccaagccagtgataattcactgaaattaagacagtttcctgtgtaagtggcatataaccaaatagcaactgacctggcctttgcattatgaataagcccatttgttgatgggatggagtccttcttggtttccctcccctttctttctcaggaagtaattgaccagaaatttacatgcttttcccagaactacagaaattagatgtgtagattctcttttcagtttccactaatagtatctacctcccagggttgttttgaagatttagtcagaggacaagcaccaggcatatagtaggtgtgcattaaatgtccagtgttattaattttttgatgttatctttggggcattactttttattcctttgacataatctcacaattatagtcttccctacagtgagactggggtgcttgaactgactactttgtttaatgtgatcaatatggctcgcgtgtcaatatgtaacacaaggggattaaagaaggaattacagtttgggatggagaggatgaataggaaattttcctctgaacgaatccctatattttcagtagggctgtccagtaaaatacaggatacccagttaaatgtgaattttacataaatgtgagtatctttttttgtataagtaaatcctatgcaatgcttgttaaatctggcaaccctatctacccatgactgtttttcttaaaatagtctgataagaaacacattgctcttattttttttctgcttttgaccaagcccgaaagattaattctaggttcggttttttaattttttttttttttttttttgcgacagagtctcactctgtcacccagtctggagtgcagtgacacgatctcggctcactgtaacctctgcctcccgggttcaagcgattctcctgcctcagcctcctgagtagctgggactacaggtgtgtgccaccacacctgggtactaattattttgtatttttagtagagacggggtttcaccatgttggccaggttggtctcaaactcctgacttcaggtgatctgcctgcctctgcctccaaatgaccatctttaacattttaccaatatgaatgtgttaggctggccgtgcccttagatatggcagtgggtaagttccctcgaccagatatattgatagagttacaattaagtaaataaatctgctgaatgaggtctcctaacagcacccagggctactgaattttgccttagggaggaacagggtaagtcaagtctttttgggaacctgtctgtgcctgatgtttccctgacaaacgggttggggtgctggactgccagaacctgagaccccagaaactggaagttacccttgccccaccctggaggccaaagcagcagctctccctacctccccacacaaggacaggaggctgacccttgtgagggtctcccaggaggctgaggggaagcagcccaaatcagtgttaggtggtggatcagggagggttaggactccaaacctgaagcagagctagttgagagcatggatgaaccgggtctcgccaacagggtaccagcggaccccagcttcccctcattcacctctcagaacagcacagtcgcacagccttggtaaacacaaccattgttttaagcctgatgccctcacagccccgggtacggggaatggaagagctctagagccccctacaggcactcactggcactgcaccccatgggtgacagttctgcaacagagccttcccttggtggggtgtatggagaatcccagggggtgagccttcagaagctcaggggtgagctcaggaccctggctttagaaagcagctctggttttcacctttccgagccctgctccatgcaatttagcactgcagctgccttgtagtgtggtattcctcccaagccccaccatgcatgcatgcacacctacacaccacacactcactgcctccgtggcttgcctgacctccagacgggctggaaagtgctcaggtctgattcagtttgaggaatgacctccagctgctgaatatgcagaagccgtgcagccagcaccattttcagagccagatactggtgttcagatgctcttctccaagccacctaattctctggggaatcattttaggatttgatgtaagaaaagtgtctgaggggggataggagagctaaatataaagtgtaaggccagagatgggcgattgtaatagtaatagttgtagtaattgacatttattgagcatttactgtgtgtcaggctttgtcctaagaatatttcatgtatgaaatcatcacttcctcacaacaatcctaggaagtaggtattattatcatcccccatttcacaggtaaagaaactgaggtacagagacgttaagtcatttgcccaaggtcacacagctgacaaagctgggatttgcacagaggctgtctgggtgtgtgcctgcactcctcaccccgatgttatgtgtcgctcattgcatctagaatttcagctttctttcattctttttttttttttttttttttgagatggagtctcactctgtggcccaggctggagtgcagtggcgcaatctcggctcactgcgcgctctgcctcccaggttcacgccgttctcctgcctcggcctcccaagtagctgggactataggcgcctgccaccatgcctggctaattttttgtatttttagtagagaaggggcttcactgttcatcctgttagccaggatggttctgatctcctgacctcgtgatccatctgcctcagcctcccaaagtgctgggattacaggcgtgagccactgcacccggcctagaatttcagctttctaactcctgccttcagaacaccttgtgtagatctaacacttgggcaaagtttaaggtggtggtggagggggaaaagaccaagacccatgtcttggttctgaaaaaaataaggtggaagaattgctgcacagagtcagacctctcatcccccaggtcagcttccatccttgtcctcggcacaggagaaagctgtaggaaggaacttttggtcttcctgacatcatcgtccaagggcccatgcccagcctctggaggccactcagtggtttgaccccctccatgcctctcctagagtctatcataaacatattttgaagccgacttccctcttctcagcttgcattttctcctgttccttgccttcccatcattctcttatcgcccattctccaacagctcccaagtctgagtctcagtgccctaccttggtgcccgtcttggattcccgcaggcaccacacagcagcacgtgcaaaatcaaagacagcatcacactctaaacctgcttatcctcatgtctctttaggcaggcaccccccaccaagccaagatatggagcgtatcttcagttcttccctcctgctcttcattgttgagtcccctcctacatctggaaaacttttacctatgtatacacctcagatctagtcattcttgtattgcttcccccaaccctggtctgcttagcaaacttctatttatcctttaaaaccctgctcaggtatccccctctgtgtggaggcatccctgacttctccctgggggaattagtctttctccttgcagctgttctctgtctcatgcccctgactggtttacaatctgttggatttgaatatttgcttattttttctcctagatcatgaggtcctagagtccaaggtcatctctgtgtccccagtgacacagagtgggtgtttaataaatgttggttgagctaacctgaggggattggaagtagttaaaggggagcccttgggggaaaagaggcagaaagaagggcctgggaagaggtaaccaggagagcactggttctgccacatttttgccctggttgagccatggaggcagctctggcttggggagcattatatccttctgggaggcaatgcagtgttggggttaagagggaaaaccctagctccagactaactgaattgaaatcctggtcccaatggtgtgctggaaccagctcaaaccagctcaggagagctcactgttaaatattcagcagttttgtgggctgatggtcaaacacaatcattattaaaaattaaatggtataaacttataattaaatacattgtattaaaaacaaaggtaatagataccactcctcacttcctcatatcttagtacatttcactttacgttcttgccatcaatttacacctaatgtatggtggaaaaaccatgcgatgctgagctgctgcctgtctcttcccaagcctgcattccatgatgacacactggtagtttgagaacagccatgatgggagtatttacaccacggaaattggcaaatgctacagatccgccgtcccccagctggccattaaacatttattaccacaccactgcactggctccgtcacatcccagctctgtgaccccagataaatgactcaatctctctgtatctcagattcctcttctgctgtgatcttccacgttagattgctgtaaagattaaaagttgataaacatggctgagtgcggtggctcacgcctgtaatcccagcactttgggaggctgaggtgggcagatcatttgaggtcagcagtttgagaccagcctggccaacatggtgaaaccccatctctattaaaaatacaaaaatcagccaggcgtggtggtgggcacctgtaatcccacctccttgggaggctgaggcaggaggatcacttgaacccaggaggtggagattgcaatgagccaagattgcgccactgcactccagcctggaaaataaagcaagactcagtctcaaaaaaacaaaaacaaacaaacaaaaaaagataaatataaggtacttatagcagaaactagtacacagtaggtgctcaataaatattagttctttttagtatttcttctcattgctccagtgatgcccctatccaaattctacggaaacagatgacgtgccaggtagaggaatgtaagttttatttctagagcataaggttcatgtcctttccctacaggacccctgtgcgtagggtttaacttgaggagctaagtgcgggaagtaaaaaccatgaattttccaaggggaaaggcgctgatggagaggtatgctgaagcctccaggccatgagaggattgtgccccaggccctttgaggaaatgaggccacagcagcacatggttgaacaggtgaggcaggcacaggtgaggtcaggagaggaatgaagcagatgccaagaacagccaagctgcagcatgaagggaggctctgtgtgtggctgcagcggggccccaggaccttgcgaggaggcagctgccctctctggaaatgctgggctgtgcggtcatgcccatgaaagcaagggctcctctggctttggaagtggagaaaatattcctggccaatcccgagttggatcacacagttgaggttacattggctgcattgtggtttcttgggatgctacaggaaagcgggaaggtaagatttggtctgcagcctccaggacagcagaggccaggaaagagcaagagtgcgtttgggcttttctagactcctccgtggcaggtttcctgggtcccagccaacccaggcccctggaatgaggattcacacttaatctctctgttacctggaaattgcttcaggttcagacctttgccatcaggaggggcagttcagtgactcagatacacacagttcccagcccagcccttttccgatggcaagtgcactacaagcccacagaccgctggcaatgcgtacatctgcatgctgtacaggccagaagctgcagctcattgctggggtctgcttctgttctttgaatccctggtctgtagacaaatgccctttggagcggccttgccgaggagaaggcagcgttgagagtgaagcccttccttcccacctcactatgggagtctttcactttaccctgagctcctcaagggcccatctggttctgattcgtctgcagcacagagtcagtcatggaggagccttcagtaaatgtgaggtagaagtttagatacattttgagaaaatttgtgctttggggtgcaccactagtgggttacctgttcagttgtacaggttgttcactgtccaagagtgcctggttgaggaggtgggtggggtctgaacttagtttttctaattcacaacaagccacacatagctggggcatgggggtgagtatccaaggggttgagggcctagaggggcctgaggaaccaccttgccaggctccaactcattcattgggagcaacttcctgtctaacctgtgtctggattctctgaagaactctgtgtttctttctgctggcaacatccctgcagcctgcatttagagccggatagctcttcgaaggctttctgttctgtgtaactgcagtacttagcgggtcccccatggctctcagcaggccccggggcagggaggggcctccaggcgctgccctggctgctgatatttcaagatgccagtggaagcagagacactgcggccctgtgttcccagagtcaaggtgcagggtggcgtgtgggtatgagtaagccagcagccctggcaggcaggggcatatccgagaaacagtgtcacagggttcctgggctctaagggcctctgtgagtagatttttgggagtgctagaatttatcaacttggaggggaaggaagctgctgttttagcatttgatgcctttaatctttacagtaatacctacgtagggagtcctgtcccccgtttacagaggtccagaggagctgagtgactgcccaaggtggcgcagtggatccacttgaagagccaggatgcatgtccaagtctgtctgcctgaaacagctcagaattccaggggcccagaaaacccactgtttctatcacagatctctgtcttgccaggcccaccctcctgatgttttccccaacacattaatgtggtctcaggcagaactactcagctgaccctgggctcaggaaaggggagcgcagaccctgagacaggcatgtggctcgggggctgccaccagggcctcatcccagtatggctgtggagagggtcaggacatctggaagagccagtgttgggatctgttcatgctgtgccaagagaagtgcttccatttgccaagaaagaatgaggaagagggaagggcaggcccacctccttgctgctccctgggtcagtagccctgggtggccactggccttcacagagaagagccacttgggggtggtccacatgtgtgagctggaacccagggcctgtggccagccctgggagggcctctgtgcgggcatgtggggcagggaggcactggaggccagtttcctgtgcaaagcctttggggcatagcggatctggggcatagcagagaaggaggcctgctttggtctgtaaggtgctgtagccaggatctaacacacctggacttgggtttgtgggtttatctcccttgtgtattctttgaccacccagctccatgcctggccagcagagttctcgcaggagaccctgtaggcttgttgtgaggccatagttggaaacctgatgggccctccctagagacctattgcctggagaagtgctccctccgtagctccagtagacgcccctacttgcagtcttgcccaccaccttgctctcaacactcctctccatgccctgcagcctcctaagactttcctctgtgccagctacttttgcatggcaacaatagtaataaaaatagttacatatggtcaggcaatggatctgttttttggtctataagtgtattttatgttaaaaattttacattttatgacttcaagactttgcatgaaatacctttactgcaaagaagaaaacattacctgggatcagagcagtcacagaacacagaggcccctggcagtcaggagagaggtcccctggtcggtgcccaggtggagagtgtggccaggtgccggcaactgcaagtgtttccaagcaggtgcccatgtccagcagatgcctgcaagacttgaatcagaggcactgttctgagggcggaaggacctggggtccccaggctggccgaggcaagggactccacggctgctgtcttctcagtaagaacaccttggattcttttttttgagacagagtctcgttctgtcacccaggctggagtgcagtggcacgagctcagcacactgcaaacttcacctcccaggttcaagcgaatctcctgcctcagcctcccaagtagctgggattacaggcatgcaccaacatgcctggctaattttttttttttttttttttgtatttttagtagagtttcaccacactggccaggctggtctgacctcaggtgatctaccctcctcagcctcccaaaatgctggtattacaggcgtgagccaccgtgcccagcctagaacactttggattctaattttagtacttccagctcctggccatgtggatgagatcagagattgtgcctgtgtcaggtagacttggccactccaggcaaaaccagcttctctttgatgctgggctcttttcttttcccccatccttctttctttctagccctgtttccctgcctctgtcgttctaggccagtttccctctatttttctctttgctgatgctcacgacaatagtaatatttgctaacatcttctgactgcccactatgagccaggcgctgtgcaaagtgcatcttgtggctactcatatgttttgcctccttccctctttctgggccttttgtactgaagattcacctggtatcccttgagcacctcatgtggctggtactctcctccccaaagaggatgcagccttgtgggggctgggagggagcctcatttgctccagcgccctcattttacagaagagaaaactgagggcttgagctgatgagggccttggctacagttctgcagcttgggtgcagaaggaaagccagggcttggcctcttgacctttacccagagctgtcttgcatcttgtggatgcaaattgtttgctgtcagctgcgttgagggcctctttgaccttggggttctgagtacctaaatggtgagcctcgggccaggcagtgcagatcagtgatgtcactgtgccagtgtcactgcatacccacctcaggctgggcagggcgaggagactgcaggagccacgcagagccagaggatggctggacggactgacatgaaccattcccatgtaagaaaattaaaagataaaaataattttgatagagggaaaactggtaggagggaagatgagctggccgtctgggcgaggtggcctccttcacaggttttgctgccatcatctccctatgtgggcccacttctctccccgggccatccctgtaggctcttctttgcccttggtgacctcagtaggagctctccgtttccgacagtcagcccctcgcccagtgggaggaggagatagagaggtaagagctacctgagaattaagccatgtgcactatctggctcatgctggtcttcccggggcctcattccatggctggcatagaaatatgaatgcatcgtcctgctgtcaggcagcatcccagctactccagcctgtgtccaaggtcagtacctaactggccatccctgctccgaggtcacttgagggtctggcaatattaccatggatctgaacaccactggctccccgggggctgcagcggggcgtgtggaggaaggagtccctccggactcacggcccacactagaagaacataaaggaatagacagcccctgtgtggtgcagcagagcaagcaggacctttgatgtcagacaggtatgaattcagctgacaactcaactctcccttggtgtgtaccctggggcaagtcacctaacctccctgtgcacgctggcctcatctgaaaagtgggaataagaatccttctcttatagggttgcagaagaatttaataaaataatgcttgcaaaatgcttttatgcagggtactgtcagcctcacaaaccagagatgccccaagcattctctgtaaacacggctatgaccattcaaaagaaaattataaattcattttaaagtattatttaattaggagttattatatatttttccacctaataaagactaaaagtaccaagattatgatacttggtacttggggtggggggcggggttgagaaatgctttggcattaaaaagaggccttcagccgggcatggtggctgacgcctgtaatctcagcactttgggaagctgaggcaagtggaccacaaggccaagagttcgatacaattctggccaacatggtgaaagcccgtctttactaaaaatacaaaaactagctgggcatggtggtgcgtgcctgtagtcccagctactcgggaggctgaggcaggagaatcgcttgatcccaggaggcagaggttgcagtgaaccgagatcacgccactgcactccaacctggtgacagagtgagactccgtatcaaacaaaaacaaaaacaaaaacaaaaacaaaaaacaaaaaaacagccttcacaggttcatgtggactgagataaaaatacaggcaacatagagttgagtaaaaataaaaatcaagtagctggacagtggatagagtaaaatcacatgtatggctttttaagctctaaatgctgggtatatgcttttgaaacttggggaaagagatattaaaaaaaactgtcctttgagttagctgtagggaatgggcttaagaatcctggtattgggagagatttttacctttaactttgactcttttgattgtatgtacatattctataatgaaaacaattttaatgtgtaagttaagggaaccaagtgtgagcaaacaagccagcaaactaataaacctttctaagaaaaacattgaaatacaaaggatccttatgaaaacttggaagtcagctctctggacacacagtcctctagaaaccaggttctgtccctgctccaggtccctgcccacctgctcccctggtcccctgcagtgcacatgctaccaagcctgtgcctctgcctgcagcaggacaaacccagacagaggcttagcccggaggctcaacttccggaggctcaactcccggagccagcgctggcggtagatgcagcagccaggctcggcctgggttggcaagggttggcctcaccactagattctctctccacttcacgcctcatggagccaggccgagggagtcgctggaggatcgtgactacccgagtgggtggttgctcacctgcccaggaagccattaatcttgtgtctctgcggcctctcctcccacgccagccgcccgggcacggactgactcgggaaaggacatgaaaggggccctgggcttcattccatggtggaccatgaccctggaaaataccatctggcttttctgtgtgtcttctgacaccaattcccctagtcgggacacatcaaagagagtgcgcctggtgacatttctcattgttattcctttggcagggccttcggattcaggtcacagatagacttgcacctccagaggctgcctgtggggcctgagccccccatcttacagatgcctcaggagggggcttgtagaggtgacccaggaccccctagcggccaagaccccagtcaacggcacccagcaggccagtcccccagggccagtctgggcagcagaacctcctggagtgaccgctctgactttccttctctgccctctgatgctacccacgcaaaacagccaaagcgccaggtaccccatccagggtgtcagtaatgtgtggagtttgaccttaccctgggaatcccagcttcagtcacagagtcatattttctttacggaggctgggcttgctggctttaaagtaattccaaaatagatttattggacaaaatttgggcaaaaattgagacaaaataatttggggcaggccaggcatggtggctcgtgcttctaatcccagcactttgagaggccaaggcaggaggattgtttgagaccaggagttcgagaccagcctgggcaatgtagcgagaccttgtctctatttttcaaaaagaataaaacatttaaaagaataataatttggggcaaaaagggggcttctgaataacctcgaggtttgatactcagaaatgcactacctcctgagcagaaagtcgcctgtggcaggaggtatgtgcatgcaaagttgacctgtttggaaggttatagaagatacaacagcagccaggggcttgcactatctgttgcacactttccccttttgaataaacccctttgtttcatatcagtggggaacagaggatgggcacatgcagggcctcattggatattctctcacttttttatgtctagccttttaaacatggggcagtgcctcctacgccagcttgtgctttgttggaaaattggttcaatagccctgctagctggcatgcattgaagtatttcctatatgccaggcacagtgtatcgtgcattacccagttagtacttttgaatttcacaactgtcctgcaaagtaggcacttgcattttcctcatattccagatgaggaaataggagctcagagaggttgagtagcacccccaaagtcacagatctaacacaaggcaaagctggcatttaaacatagacccacctccaaagtccagtgtgctggacacacctgcagaagacaaatagttcccccatatttcaatctctctctctgttggaaactgagtccgctttttgttattgcttcccccatcagagttcaaaggcagctaggaaatggggtggtctctgctttgctgcttaccaccttgtcacctttcatttgtatttccctagagtagggaggcagtgccctttcttggcagggtgcagtgggtggaaggagggtagggctgtgggggaaggggtcagaggagaggattgcctctctctaggtagtcaagggggcatacgtatggggtaagaggctggttggcattgggcattgcattcggggtcaaccattccagttcccagatacacatgctgatagaatccttgtgacaaccctgtgaggtagaagctcttctgctcctccttttacaagtgttgaaactgaggctgtgtgccttgctcaggttgctgagctagcacacagtggagtctgactccagcctaggtctgcctgcctcctaagtcccaactcaccaccaccatcctgcatttgattcggttcagcctctctgtctgctgaggggactgtaggaagtgacagaaaggatgcagttgcataggtgggttaggggttttttaaatcctcattttcctgatggagaccctgagacccaagtgtcttgctgaactcagtacactggggactgaaattaccacctgtcccctggctgcagcctgccttttttgcagatgggtccaaacagcagatgtggatggtctgggagggaaggttcctgtggctgtgtgatgagggagacgggggtggcttgctggccagccgtgtgttttaaccagcgcgtatatatctttatttaaaggagtcctatgcttttgacaatccatcaggaagctccctgtgacggagtccaaggggttccctggtattgctctgtgatctttagacaagccacttagcctctgaacctctatgttctcatctgcctgatgaggataagagaatcccaactccctgaatcaatgctaggctaggtgaaatcaaacagccaacacaggttggatgtgcactccaggaggcttcctagcaatgtccccgccgctcattcctcctcgttatgccctcagagcccacatcatcccctttgaatatgctcgctgatggcaagtctccttccattccgggtggatttaatgtttaatgcagccaaggtcatttggaggcaagtctagggaattagctgggtgacagagctgagcaaagagatttttgattacaaagaaagtgaggatgtgactctatttctcagataatctgggctgaaaggcagctcccaagaggaactccaaaaatgctttgacgaaagccagcatcactgggaattgggaagagatgcccagggtgaccatgaggaaggggacagcgctcactagggtgtataaataccggttggtcacaattggtctcctgacttcacagtcacaccctgctgctcctgaccagatgctgccgtttcaaggagcaaactcggtgggaggtcatataggtgtccagtggaactggggtaattgtggccgtctcaggtcaggctcagtccctgatccatgcggaataaataatggcccagcaagatgcctatacctttctcatcttaccagccaaacctgcaaattacccaacagaacccatgctgctttggctgggagggccgaatgagccagagcttgcaagagtctagctgggggcagaagggaggaaggatacacaccccctcctgctcctggtacctcatctgctcttgagaattagcctggcagtgggagcccttcaactgggtacttcgtgtactgccgtcctttgacattttccttctgggaaaacttctagagaagccattctgggaaaggtagagatttagaagttttgaataagaaaatagcaagctgagaacataatctggggagaaagagcacagggcagagaactctgaatagtggcagatggacttccatctgaagaccgttgcagatttgaacaaaatgagggaaatgacaagagccggaagccttccaaaaggaaccgcttccattgaagtctgtccctgattctcaggttagagtcttcctcatttgggatgtgaaaatggtttttcttttataatgtgatgcttgtactaggttgccttttcccacgttttatgttctcacttgacaaatagcgtcaactttgtattggtcccagtttgggtggtggtgaacgggagtgggaattatcttgtgtggttggaagatgggaaccactggcctagaacccagaaactggaaactagctgtcctcaagctgggccttaagtctctgtagggaacctggggacagaaagtgaagacacacgaacaactgtttatatccgccatcctccaacgggcaggctcctatgggtggggctccatttagcccaggaattctcctcttcccattggtgctctgctcttctgctctgtgcagagggcagctggttctaaggtccagagatataagatttcttcgctggtttaagcagcaccgagagtgtggtcctctcgctctccctgattgtgctctgagctctggcctcttgcagggagttgccagacacatgtgtgagaagaagggctccttttgccgttttaccccgggtgtgatcacagctccggcccaggccactactgagccctacactgtccaatattcatatgggagggttgagacgagaaaaggcactaaacatcctgtgtcataggaaaagggaacaaaagaggaagcctcgaaacagactgggagttgtcattcatgaaagagtgagccttccaaatcccccacgctggctggtctttacagcctggaagacttcagattaaagagaccatgatgaatggggaccgtgaggatagattacttcagggaacacctcagtgtcacccagctgatggtggccccaatttctgggcagtgggtggggagtggaggcctccagccctcttcgattctgaccttcagctgcagcattccttgagcattcgtggaactttagtactgcaagatactctcaggggaaacagcttcctggggagttcgccaaagaaacagaaccaatacgatgtatagtcatgtgccacataatgacatttcagttaatgatgggctgcatatatgatggggtctcataagattataacactgcattttttacaccttttctttgtatagatatacacataccattgtattacaattacctacagtatttagtacagtaacatgctgtacaggtttatagcctaggagcaataggctttaccatacagcctaggggtgtagtaggctatgccatctaggcttgtgcaagtacactctatgatgttcacacaatgatgacatctcctaacaatgcatttcattattaagcaatggatgactgtgtgtgtatatatcctttatttatgtatataaagagatttattataaggaattagcttacatgattatggaagccgacaagtcccaaaatctgcagggtaagtcagcaagctggagacccaggagagctgacagtgtaattctagtccaaaggcaggcagacttgggacccaggaagagccaatatttcagtctgagtccaaaggcgggagaaggctgatgtcccaatttgaaggccattgggcaggaaggattttatttctcttgggagagggtcagtctttttgttttattcaggcctctagctgattggatgattgcacagggcaacctgctttacttaatttgctgatttcaatgctaatctcatccaaaaacaccctcatggaaatacccagaataatatttggccaaatatctggagactccatggcccggtcaagttgacactcaaaattaaccatcatagcagtcacatgagtttgggagattcttgtaaaccatggccctgtcttcggccttccagggcattttagtgtagtaaaggttctgagaatgcagtcaagaaacctatttgacttgttcactcaagtgttttccttatttatttggccatggtactttgtggggactggggaggagggaaggagggaagggccatgatgcctgttgaatcccatgactctgggaactatccattgggaaacaccaccctggagatgtaacattagaaagacactgctgtgccagctgcaagaaagcggtctgtccatgactggggctgtggtgcattttgaggcttccaggcactgtcatggtcaagctgcatcccaaagtgaaaggactcaagagagaactttctgggaattctttctttcttttcttttctttttttgaaatgcgggtctcgctatgttgcccaggctggcctcgaactcctggcctcaagctaccctcctgcctcagcctcctaagtagctgggactacaggcatgacatcccactcagctctgggaattctttctttttctttctttttttctttttcctggagacagggtcttgctctgtcacctaggctggagggctggagtccagtgatgtggccacaggcatacaccatcacacctggctaacttttgtgttttttgtagagacagggtctccccatattggccaggcagctttcaaactcctgggctcaagcaatcttcctgccttggcttcccaaagtgctggaattacaggtgtaagccaccacacccagccagaatttgtaattcagctgcacttagagggtgtttacttggtactggctgagtgctaagtgctttgtatgcatgatctcatttaatcttttcaaccactttttgcattaggaactagtgtctcattttacagataaagaaatacgcacagagttgtgtgactttctcacaagtgggaaatcaggatttgaacctagtcctgtctgactctagaacaatgcccttaaccactctaccctgattcccactgtgtggctgggaaatctataggcaaaaacaaaacagaggcctcaccaggcatgtggtttgaaatcaaacagtttatctgaaagtccttaactgataggatgccttttgatggcaaaagggaaaatgaagagatgagggaatgggaggaagtataatactgttagggaagacagactttgcatgagggtaagatgtggtcatgtcgaagagggaaaggcagagcatagctcagggtgttctgagccatcatctgccttgttggtgacagagagaccctgctcagctctacatttccttgctgcacgaggccccggtgccctcagaggtggtccctgagagtgccagagaggtggaggtggtgacaggtggtaagaccctgctgagcaggaccatctttttttttttgagacagagtttcactcttgttgcccaggctggagtgcaatggcacaatctcagttcactgcaacctccgcctcctgggttcaaacgattctcctgcctcagcctcctgggattacaggcaccctccaccacgcccggctaatttttgtagttttagtagagatggggtttcaccacgttggccaggctggtcccgaactcctgacttcaggtgatccacccacctcggcctcccaaagtgctgggattacaggcgtgagccaccatgcccggctgggagcaggaccttcttgtgctccaatcattggtgtgacttggacaagtctacatactctcaaatatctggtgtgctttctgtctatctgctgtgcaaacaaggttgttgcatcctatttttgcattagggtgttccagaaaggaagagtctcatgtgtatgtgtgtgtgtgtgcgcgcgtgcgtgtgtcttcagcaaccagtactcaccagggacctagccataggagtgcccacaaacagtgtgtctgcatatgtgtgtgtagatacataccacacataaatgtattcctgtatcacaaagtacttttaaattctttatatatattatttatataatattatataatataattaattatctgtctctcccaccagaataaaagtttcctgaggtcaaggacttccttttccctgccaaaatggtgtccagaactttgaggtatctaataaatattgtgaatgaatgaatggccagaccatgggctgtgatctcttagctaatgtcctagaatttacaccttcagcagagccccttgggaaatggcagtcagcgttgcagccaccttcacctcttcctccaccgtctcctcttcctttattgtttctgcctccttttctccctccccttcccagtgcttagaatcgtctctggcaacagctccagcccagccttttgaaaatacacttaatgatggttttgactttttttctaaaagcaacaaaatcatttggaaccaagaagattagctgtttttttggccactgaggtccttaactcagagatgataaatagggcacggtaatcagatcagtattttgttgtgggcagtaaactatctctaatggtcattccccttatagaggagggctcagtatgaaagaacagggacagagagacccaggaagcccctcagaaggggacagacccagctggatgttgacattctggttgcatcgttttctaaagcaatttcctgagtttttgccctcctgtgtgtatttacatagacacgaactttaagcctgacacctcagaagctgtttgggaaggatgggctcgcagattttgtttttgtctttgtttgtttgattgttttttagatagggcctctctctgtcactgaggctggagtgcagtggcgtgatcagagctcactgcagacttgaaactcctcggctgaggcaatcctcccacctcagcctcccaagtagctgggactacaggcacacaccactgcaccactaccactacacccggctaattttttttttgtagagacaggttcttgctgtgttggccaggctggtctcaaactcctgccctctagcaatacgcctgcttcggcctcccaaactgctggggttacaggtgtgagccactgtgcccatctggttcccagaactgaagaaggcctggaacctagagggcagatgaaccgataatgggagtgtttccttgtaagttgccttgggaagtagtgtgggtggtttatcttgggcatttaagtccatgagcatgatcagaagaggtagaatgcttccagggggcttgttggtgagacctcaggaaaatggacaaaggaaaagacagaaggaaaatggacaaagctcgggatttgcacatggcctgctgtagccaaactacccttaggatttagcccttctccctgccaagcctctctgaggtcgcgccactgcactccagcctggcaacagagcgagactctgtctcaaaaaaaaaaaggtgtggtggcatgcacctgtagtcttagctactaggaaggctgaggcaagagtcacttgagccaaggaatatgaggctcaggagtttcaggttacagtgagctatgattgtgccgcgtcactccagcctgggtgacagagtgagaccctgtctcagaaaaagggaaagaaaatctaacctataaattattttctaacataatgaaatgtttacgaatataccattaatgaagcaagttgacattaggttgtgctttgtggacatttaattacacatttaaacattttgatcttgcatttttccttttcatatttggggattaaaaatgtatttgcatatttcaagcatgttgaaggtctttggaaaaactcaaaggccagaagctctgtgcctacagggctgagtggacaaaccgcccctgctccggccctaagaaattacagagtaaggaagaggcaagggaggacactggagaaaaatgaagcattgactggagatgtctctgagggtctctgagggtgggaggtggggttggggctgggagttagggcttggttctcaatggttttctgatatctagttcatttaatccccattgcctggggagctcttcccctaactctccagatacccattagctcccttcctctcttcattaaagattctactcaaatgtcacattggttaaaacagtgccccggctgggtgcagtggctcacacctgtaatcccagcactttgggagactgaggcaggtggatcacgaggtcaggagttagagaccagcctagacaacatagtgaaaccccgtctctactaaaaatacaaaaaactagccaggtatgatggcaggcacctgtaatcccagctacttgggaggctgaagcaggagaattgcttgaacccagaggcagaggttgcggtgagccaagatcatgccattgcactccagcctgggcaacaagagcaagacttcgtcaaaaaacaaacaaacaaacaaacaaaaaaccagtgccccatccttgcccatccttgtctaacacaagatgtagtgctaagaagccattaatgccatgtggacaaataaacagactaattgggtagggagagtcctctgttattgattagtctgtttacttgtgcgtgctctgtcttgatccgcctcctgcgggcagggaatgtgttgtattcaccagtgtctggcacctaaaggctccacaataaatgcgtggttgttggcacaatgaatgaacaaatgaataaatgaatcttggccctccctgcctccagtggctgttgggagaatcaggtgagagaaaatgcagtcttcaaaggataagctgatgtgccgtcggccccaggagtcacagcacattttctctttctaggagtccttaaaatgcaggcagaagctcatcctcagaaattctgagtcagtcggttgggggcagagaccagcgatctgaatttaacaaactctttgggtgatactgatgctgctggtcatcagcctatgctgggaggagactttgctgacaactagctgtcactttttagtcattttgctgagcgggacacaaatgtagagccacaatgcaatgtgaccctagagcccatggttccagagtcgggggttgcccctctccatgtttgagggccgaagagcctgcatcgagcagagccaccaggctaaatcctctgaccttgactttggtttagggaccagagtctggtatctaagtgcgatcttactctagctttcccatctgttctgtttaggccagaggtgatccagtgatttgggagctgcaggtcacacaggctgctcagagggtaagttgggtccagtcgggccagcagggccacatggccgattcacactcagtccaaaaccctcgtggctgagcattgatgcagaccatgctgtcttgtgggagtggtctgggtgcctctaggagggcagaaataccacattactgcctggtgaccttggaaagggggacagaggtgctggcactgggatgctgagcagccaaagccagtgagacccacgtggagggaggcagctagcttgcttgcttcctgaaagccagacagagcctctcagcctaatttgcttgtgccaggcagcctgtgaattcttatagccaaaccacctggtgggtgactgttgacacgggactgccgggtcctggcagcccagccctagcacagacaccaggcagcacacagacctcaggtcacataggcactggccagtctttgaggacacagtgtctggctccagttatttctacctgcagtacagtctcggggccctgagtcaacaggcgggtttgagaggacttcaggtcttggccccaaaaaagtgcacatgaccaggttcacggtcacctcaggctatctggccccactcattgattcatgcttatgttcattctacagaaattattcagcaccttctacgaagacacaaagaaggaaaggagttcccatctgtccttaaagaacttaactgttaaatgatgtcccaggctgggctcagtggctcacgcctgtaatcccaacatcttgggaggccgaggcaaaagggtcacttgagcccaggagtttgagaccagcctaagcaacatggcaagactctgtctctacaaaaaatttttaaaaattaaccaggtgcaggtgcatgggggtgcatgcctgtggtcccagctcctccggaggctaaggtggtggggcgattgcttgagcctgggaggtcaaggctgcagtgaaccaagatcacaccactgcactccagcctgggtgacagagtgagaccctgtctcaaaaaaaaaaaaaaaaaaaaaaaaaaagataagcactacatagagcagtgggcagcccccaaatgcatagagctggcatgcagcaggcactcagtaaatcttggttgaatgagcaaggtgctggaggagctaggaggagagagtgagaaactggccagggaaagctcctgcatgaaggaaaaggaaaaggcattctacatgaaaggtgtgaatgttacaaaatatatgaggagtaatgtggccatgtggagaagtaagagctcacttccattgagcgcttcatttcaaccaggcattgttctgaacatattacacatatcatctctttaacctttgagatagggcctattgttgtcactcccattttataattgcacagcctgaggcccagagaggctgagcttaaggccatgcaggtagtgagtggcagagtcaggtgttaatccactcaccaatgggcacttaacccaacctgagcctccacttctccatctgtaaaatgggaacgcccaggcttcccctgacagtttcttggacagattaagaaagctgtgcatgagtgcacatggaatgtctgtgaaaaagttacaagattcacagaaaacttgctaacaatggttacctttggggaggctgcctagaggaccaaggattagagaaagtatgtatcagtttttggatctctttttgggcctccagcgggtgaaagttaaaatgacaagcagcctaaatgggaaggagttggagggtgggttaagtttgaaaggagaaagagcagttgaggctggagaaaggatgttatttgactgtagcgaacactctgcctgcaccccccagtccctctctctttgaggggaaggatgccgtggcgacggtcttcctccttaatatagtatgtacattttatctctgcagacttcttgcagacttggtttaaagatctcagctcaataccattagtgtatatctgcagagggccctttgtaaaattgattagaaagtgggcttttgcatgtggggtgggggcgggggtgggacctaatcggatttgagcatgagatggtatctaattccctgcatctagcaactggcttggggacctccctgggagccagggcccccctaatttggtttgcaaatacattagccaaacaagctgagggggctcctttggggagagggtttttgggggatggggatgggagatggtgggaaggctgaggaaatgaagaagggaagggttttctgtgcaggtcctggagtataaaccgtacatgcgattgccaaggctgtgcatgtctcatggttttaccccattcgggagaatgaagcaaacttctaagaggaccaggctgggcctggtggctcagtcctgtaatgccagcactttgagaggctgaggggggtggatcacctgaggtcaggagtttgagaccaccctggccaacatggtgaaactccgtctctactaaaaatacaaaaactagccaggcatggtggcacacgcctgtattcccagctactcaggaggctgaggcaggagaatcacttgaatccaagaggtggaggttgcagtgagctgagttcatgccactgcactccagcctgggcgacagagcaagacaggtctcaaaacaaacaaacaaacaaacaaagacttggtgtattgcttaccatttttgagccattatatatacattttgtttcattttttcagtcttttaaaaaaaagtaatacattcacatgtgtaacaaaaatgtcaaacactatgagagtgcaggcagtgactggtagggtatttttcctcccctaatccttggtcccctagacagaatccctaaaagtagccacagttaccaagttttctgtgaaccttacaatattttcaaaaattgtccatgtgcactcatacacagctttcttaatccctccaagaaacctgcagaggaaacttggtgttcccattttacagatggagaatggaggcacaggttggttaagtgcccactggtgaagggccaggatccaaattgtgaatgatctggtggtctggctttatatcctggggtctttctgtgaaatcatatgctctcttatgtgcctttcccagaaagagagggggctgttcagagctataaacacagcaaatatttgagtttttacttctccaactcttttcttcttatttttttttatttttttattttttgagacagagtctctctctgtcacccagactggagggcagtggtgcaatctcagctcactgcaacctcccccttctgggttcaagtgattcttgtgcctcagcctcccgagtagctgagattacaggcaagtgccaccaagcccggctaatttttgtatttttcgcagagacggggttttgccttgttgaccagtctggtcttgaactcctgatctcaggtgatctgcctgcttcagcctcccaaagtgctgggattacaggcaagagccaccgcgcctggcccattcatttcttcttgggtccatccatatgctatcgttttgtccacttatacccaagcatcctaaaaacaggatgcaaggctgggcatggtggctcacgcctgtaatcaatcccagcactatggaaggccaaggcaggcagatcacctgaggtcaggagttcaagaccagcctgatcaacatggtgaaaccccatctctactaaaaatacaaaaattagccgggcatggtggcgggcacctgtaatcccagctactcgggaggccgaggcaggagaatcacttgaatctgggagaaagaggatgcagtgagctgagattgcgccaccgaactccagcctggacaacaaagcaagactccatcttccaaaaaaaaaacaggaggtgaacttgcaagggcatctttactacggtctccttcagttcagtacccctttatgagagtgaggggtggagtgtgttgagtgaatcctcgcctgctttatctggatcttgagttctgcccacttcctactagacactgtgtgtgttgcaggaaggaggatgctggtggcagcacgtgctgcaaattgtgtggcagcatccagcttcataacagataatcacagtatcaacctcggagggttctttggagggtggaataataccatggcatggtacctggtacatggtaatctctcaataaatattagtgattagtagtatcactagctagagaagctttcgtacattgctcatctgctctgtgcaatttgcctcaactataagaatagtattattctgttatcatcacactattatttaatatttaatatttttaaacaatctgtgtaataagctggtatcattttaaatacaattagcatagtgtcaggtatacaaaagatgctcaataaatatgatttcccattttattcccgtctctttaccagttttaaatcaagatcttgattcttctttatccttgttgtgaatctaatttctgtaaagtgagtccatttgtattcccactcacatttattgagaacctgctgtttacctggcattctgctctgtgctgcggggcacacaaagaagaacagacctcggactccgccctcacaggacgaaaaatcaaatcaggaagactgagaacagaggcatcaattgcagcccaagctgttcgcagggtttggggcatgctcctggggtacaggaatagatggagtggcttcatgttcttcagtacctcagtttccccttctgaggagtggaggtagttccctttcttgtttcttggtatttggaagatgtggaacaacctggctgatgtggtttcagtcttgtgggaaccagtgggctgagcccctttctttacccctctacctctccctcaccaccaagtaccctatacctctctcccaccctaccctggctggaagctgctcctccactgggctgtcgacctgggagcctccatcctcctcctccttgcaaaccacaccttttcaccagatcgtcatgccaaccccatcctcccccaacaaagaaggttttgaagggaccagaatacctcagctttggatgctgtactataaaatccagaattatataactgctggattatggagtgattattagctttgctgaaagattttccatttacataaggattagctgcggggttcctttaaatagctggctttgctaatgcatttgtattgcaaagaaaggtgggtgggggaaataaggacaggattgtgaagcagaaggcccgagttgcagtggctcaggcctctaatccaaatgactcaggaggccggggcaggaggatcacttgaacccaggagttcaacaccagtctgggcaacatagggagaccctatctctacaataaattaaattaaattaactagggatggtggcttgtgcctttagaaaaataaagaaaagaaggctcgagttctaagccagctgagtaactggtcattttacctcttgaagccttgggtttctttgatgaggaaagtgagcggtgaccaccctacccagacccagcattgcaggagaggactgtgcaggcagtttgcaaagagctgggcgcaggcagtcaggtgaggcaaagctgcaccgcagtgctgttggtgtgatgagcctgcccctcaaagggtgatgtcgaaacccctggtgttgaatcttctagctggcctctgcccacctgtccatgctggtctcctgacagacccccacctggcttcttcctgtgccccggccccggccacacacctgtgtcccggacttcccacaccaactccagttccttggctgtatactgctgttccctatctctgtgacttgcacatactggtcccagtgcccagaatgccattccccaccctcttcccttcttggcctggcaaacacctacttgtccttcaagacgtaggctaaacttctcctccaggaagccttccctgactaccttacactaaggagggttagacactcctctgcactcgcaggtcccatgaatgtgtgtgtgaccctatcgtattgctttgagatccttcattgtccagtgactttatggtcattgatcacttatttgtatctgccatgagctactgagcttaggggcagggtccctgttgtgtttgactcagtagatgtgtagtaaatgaaataagtaagcgaatagtaacaacttctcatgtgcagcaggtgtttcatccccagccacatgcagcagaggcggcccccgcaccgtcccccaccccgtaccatcctcacccctgcaccatccccacccctgcaccgtcccccgcccctgcaccgtcccctgcccctgcaccgtctcccgcccctgcaccgtccgccgcccctgcaccatccctcgcccctgcaccgtccccgcccctgcaccgtccgccgcccctgcaccgtccgccgcccctgcaccgtccccgcccctgcaccgtcccctgcccctgcacggtccccgcccctgcaccgtccgccgcccctgcaccatccctcgcccctgcaccgtccccgcccctgcaccgtctcccgcccctgcaccgtctcccgcccctgcaccgtcccccccgcccctgcaacgtccccccgcccctgcagcgtccccccgcccctgcatactgcatgccctgaagcacaaaaaccctggtgttagaccacaggggttcaaataaatcctggctccaccccagctgtgaccttaaccaaattattttgctcccgagtttcttcatctataaaacaagatcataatagttctgaccccttagggttgctgtgaataggaagtgagttaatctgtgttcggtacttagagcagtgcctgggcgcagtaccttctgcgtctgatggcggttttcatttcggagggccctgagttgtgcccctgtggttcctccccagctcagtcccctgtgttgctgagcttgcagtctctgcctctttactttcttcgcttgctctagtgacctgtctcagatccccactcccccaaccagtcagcacagaaataatcaaattttacttgattattagtcattactttctgctgctgtttttgtttgttccttaaaaaaaaaaaaaaaaaaaaaaaaactattctagatttaattgagttgattgattagcacaatcgctgattggaaggagatactctgtaaccctctcctcctccggtgccttttcccagagaggcaccaggtggactgcccgtggcctggaggtgcagtggcttgtggtggctgtgtgggctgggagcctggtcctcccaggcctagtgacctgaggcaagtccccggccctctcagggcctcatctgtaagaaggggattgaagtaaatgagcctctgaatcccctcacttttaaattctatgaaaactctacacctgagtgcccccagccttggtttgtgagtcgcccatccattcaatatcacagctacctctgggccagcacttctcagggtgctgtggggacccagacgtgagcaagtcaagagccctgccctctaggagctagtggggtggggttggggactggcaagacgctaactccagcatttttaacttagtgtgttccaagctcagtggagtttcagaggggaatgcctaattcgaacagttgtagaggggtgacatttggattcagtccaagacaaaataccttgtacaaactttaggggtgtggagagtgaactttatagaagccacctctatgtgctgagtacagtggtaagcacttaaattgttttaaaactttttatatcaaatagagataggatggccgggcacagtggctcactcctgcaatcccagcactttgggaggccgagacgggcagatcacgaggtcaggagtttgagaccagcctggccaacgtggtaaaaccctgtctctactaaaaatacaaaaattagccaggcgtggtggtttgcacctgtaatcccagctactcaggaggctgagacagaagaatcacttgaacccggaaggtggagtttacagtgagctgagatcatgctactgcactccagactgggcgaaagagtgagactctatctcaaaaatcaataaaaaattagtaaataaatagagatgggggtctcactgtattgcccaggctggtctcaaactcttgggctcaaatggtgctcctgtttcagcctcccaaagtgccgggattacaggcatgagccactgcgcctgataagcactttcttttcattttctttttaatccccacagcaacactctaagtaaaaggatatgatatcacttttatagacaaaacacccaaagctcagagaggataagtggcttgcctacagtcaacagcaagcgagggagaagtagactttgaatgatgtcaaaccttatcctctttacacagtttcataccatattacagtattaaataatttgaaggtaaaataatcagctaatttcccaaatgtcacttctatgtccattttggaacatgatcttccatacataccctttttacattacataattagagtgatgtaccattttccctttttttttttttttttttgagacatggtcttggctctgtcacacaggctagagtgcagtggtgtgatcatagctcactgcaacctcttggctcctgggatcaagggatcctcctgcctcagccctccaagtagctgggctataggcgcccaccaccacacccagctaattttgtatttttgtagagatgggtttttgccatgttggccaagctggtctcaaactccagttcagactgcctttgtctcccaaagtgctgggattacaggcatgaacctgcgccccgcctctatttttttacttatagcattttttccccccgtctctgcttttttgttcttttctctttttttgagatggagtgtcactcttgtcgcccgggctagagtgcaatggcgtgatcgtggttcactgcaacctccaccttctgggttcaagcaattctcctgccccagcctcctgagtagctaggattacagatacccaccaccacacctggctaattttgtatttttagtagagatggtgtttcaccatgttggccaggctggtctcgaactcctgacctcaggtgatccacccgcctcggcctcccaaagtgctgggatttcaggtgtgagccactattcctggcccatctctgggttttgttcattgactcatatatttaccgagcacctactatgtgtcttgattctgagataaaacaattagtccaagaccctgccttcagggaacttaaccttaggtggacagatgataaacggagaagcaataaaacaaataatagaatgtcagatattaagaatggctgtgaagaaagtaaagcaggataagatgtagagtatatgaaattagccgggcatggtggcgggcacctgtaatcccagctgctcaggaggctgagacaggagaatcgcttgaacccagaaggcggaggctgcagtgagctgagatcatgccacaacaatccaagctggccaatagagtgagactccatctcaaaaacaaaaaaagaaagaaagaaaaagatgtagagtatcgataggggtcagggtgtcttccctgaaacgtgacatctcagcagagacctgactaatgatgaggtgagctgtgtgggtatctgggtactccaggtagggggagcagtcagtgcaaaggccctgggatggtgatgaccttggcacacttggggaagagcaggagaccagtgtgggtggaatgtgggaaggtgggatgtgaagttggaaaggtggctggggtcaggtcacaggctttgcaggccatggaagagactggcttttgttcctagtgtgtttctctggtgtcttctagttcccattattccacaattcaacccagtggatgtggtgttattaatcaacatcaatgttgtttcctgcagcgtctgtgtgtgcctgtgtgcgtgcatatgtgtgtgtttgcagcgaacacgcatttcaagcatatttcaagcatgtgacttttgactatgttggggtaattctgtagcagcgaaataactggttggaagtgtttgctcatctttttggctcttgacaggtaaaactatagtgtgacttctggtgacaagagctgaaggcatggcaggcagtggatctgtggtgcaaaggtgcagaggcagaaagaacaagccttcccagaggcccgaggcatcacacaggtagtccctggccataagggaggagccactggagaagcaggtgcctcgtgaggacaggtgggcggtgggccaagtgagcgcctcctctctcctccaagaggcagagccaggtggggcttttacatacttttttttttttttttttttttttggtgggggatggagtctggctctgtcacccaggctggagtgcagagacacaatcttggcccactgcaacctctgcctcccaggttcaagtgattctcctgcctcagcttcctgattagctgggattacagacgcccgccaccatgcgtggctaatttttgtatttttagtaagacagggtttcaccatgtttgtcaggctggtcttgaacccctgacctcaggtgatccacccacctcaacctcccaaagtgctgagattacaggcgtgagccactgcgcctgacctttttccacttttgaaaaagctttttaatgaaattgttttttggctttacagaaaaattgccaagatagtgcagaggactcctgtataacccttatctggttttcacttttgttagcttcctatgttaccatgatagatttgtcacaactaagaaacttaccttggtacattactatgaactaacctccatactttattgagatttcatttatttttccattgatgtcctttttctcttccaggatcccatgcagaatcccacactgcatttaattgtcatgtctgtttagtctccccttgtctgtgacagtttctcagactttccataattttcataaccttgacagtttttgtttgattgtttgtttgcttgttttgagatggagtcttgctctgttgcccaggctggagtgcagtggagcgatctcggctcactataacctcccacctcctgggttcaagtgattctcgtgcctcagcctccctagtagctaggattacgggtgcctgccaccatgcctggctaatttttctatttttagtagaaacagtgttttgccatgttggccaggctggtctcaaactcctggcctcaagtgatccgcccaccttggcctccaaactaactgctggaattacaggtgtgagccaccgcatccagcctaaccttgagagtttttagaagtgctggccaggtactttgcttttccatttttcaactatctatttttatctggaatcatgatgttgagagcctgtaaacttttttttttttttgagacgaggtttcactctgtcaccctgcctggagtgcgatggcacgatctcggctcactacaaccttcgcctctcaggttcaaacgattctcctgtgtcagcctcctgagtagctgggactatgggcatgtgccactgtgcctggctaatttttacatttttagtagagatggggtttcgccatgttggccaggctgatctcgaactcctgacctcaggtgatcttcctgcctcggtctcccaaactgctgggattacaggagtgagccaccgcacacggctgagagtctgcaaaatgttgagatcgagcttcgaactcaggaatcaagggtgggggacacggtgctgggttcagtcctggccttgccccctacccactaagtgacattgaacaaggaaatcttccatgcttcattcttatcctgggggtgagaatattcacccccgagcctcatgagggttagctgggataagacatggaaattctcatgaacttggggttccttctcagtttcattgctgggtaagcccctggtgagactgattaccctgaagacattcacttcctctcacaggagctggggctgtgaaatgccagagtgaggatggcggggaggttgtgacaacttggcaggaagcactttgaaggtcgtattctatattgatcctcacaataactccatgagttatggtagtaaaatgggttactgtaggctcatagaaggtcaagaacctgctgaaggtcatggaggaaagaagggcaaagtcaagacttgcacatgggccatgagaccctgtgccccttccagtttaggctggcctgagctgcccggcagagggggcaggcagctctggggtggatgtgggcaggaaagcccagagccctggatcctgggatggagagggtctgtctcatgggtcaggaggactggggttcggctaggggtctgactcacggggcaagaggctagagttatggattctcagtctttacacaccatattggtctcaggccattgcattacagtgagtgtttcattttgtaatgtagactttttttctctaggtaatttcatttttaacccttgagttacctgtgaaaccagcatgagcaaatgagcaaaaggctcatgactagcgggcagcttcccaggtaaatctcaggaccaatggtccagcttcctgccagagagccaactgtcttacctcctgtttcatgtatcttcaggcccccccagcagatggtgagggctctctgctttccaggaagggacaaagaatgactgaagccagacagggcaagtggctgtctctaggacacacagcttcagagcagacaccatatcagttagtcactgggctctttctaccaaacataataagaactcagaagacactcgtgctatttattatattttaaaacttgaaatgtaaactacaaagttgcagttccgacattaatgggagagttgggaggccacagttctaagtgcatgagctaataggtcttctcctacagggtgtgagtgtgtgtgtgtgtgtgtgtgtgtgtgtgtgtgtgtttgtgtatgagagagagagagagagacagagagcaacacatttaggtcagtgcactgtgaggaacaaagtaattttggcactttggccaaatggccaaaaattaccttcaattcaaccaaaacacacagaggttggagggatggacggtccttttcaaaaaggggtcccctggaaccggtggccaccatgccctttgtatcaggggttcccatttcatccacctcaaagtttctaaattcagagcttgcagaccaccctcacacaccccacctgtgcacatggatgacatggccctgctgattcctctggctctaaatgatacctcttctgcctgtcccctgcagtgaggtgtgcccaggtattcagacccctgcagtgtctcactgagcaccctaagcactcacccgtcaccctctggttccttggggcccggtgctggccttggaacactggtcccagtactcaggcagtccaggaaatagtctgtttggcctgccagctgtcagcagccttgcccctcctcccagcctggatccagccggaggaggacagagcccgtttctcttctgcccacctttaaaggctaggctggccaggatagggaagaagtagccctgtctggagtcacccctccagagatgtgtaaccccagagtggttaaaatcccatacattggcatcaggatggcttagagggcaaatctttgcctttccatgtgcatggaaggtgtggggcccacctgacaatgtctggtgcctcgattgattttcccatgtataaattaggatgaaaaatccagagttattttgaggagtaaataagcttatatatgtaaagcgctttgcacatagcaagtgcttaaaaagaaaggaaatgtagtattgttattcggttatataatatagcagcatttgtgtctctttttcttccaaagagcttgcacatctgtttactccatgtacccttacaacaaccaagtggagtagggcagtttttcttggatccagtttactgatgcagcagctaagatgcagtgaagtgtaatgacatgcccaaggccactccacaaagcagcaggggcactgaggtccctggagggcacaggctaggttaggtgtgtcccagtctggctcacctgcagccggaattcctgcctgccacagctgcccctccagtccccctgtcactctcctccctcccctccctgagaactgctgtcttccacaaggacccctcactacccagggagggagggtgtggttgggcgctggtagggggtggctctacctcttcagccagtggcagggctctgccattgccagcagcatcttgcaggatgaaggttgcatcagtgagcagtaattgaaatgcaaaataacattttgatcgagccagcaggctgtttatttatcagatcaatagtcaaaatgccccgtctggagaagctagtgtgataagtgacagtcttgccaagggcagtcctggtggctacagtcccctccctcaaaggcctggattagaaagccaaggagcctgggagtgacccctacctctgcttctcccttacagaatgtgggcacgcacacgcacagcccttgccacatttccttctttttttttttttttttttttttgagatggagtctcactctgttgccaggctggagtacagtggcgcaatctcagctcactgcaacctccgcctcccgggttcaagcgattctcctgcctcagcctcccaagtagctgggactacaggcacgtgccaccacacccagctaattttttttgtattttagtagagacaaggtttcaccatgttggccaggatggtctcgatctcctgacctcatgatctgcctgcctcggcctcccaaagtgctgggattacaggcatgagccaccacacccggccgacatttccttcttatactcagtttacagaggagatgactgagaactatgtgggtagggaccacccttgctgtggctgccaggacctgtacccaagattgctgagataacagcacatattttcgagcacttacaatgtacaggtgcccaatgcttcacattattgggtcatttactcctcagaataattctgtgaggtacgtatgtctatattacccattttgcagatgaggaaaccaagtcctagagaggtcaggcaacagttgcacagcgagtcagtgacaggccgggattccgacacaggcgagctgggcccagagccctcatgcccaggccctgtcagttccctctctcaagggcagggggccgtgaaacatttttgtttacacagtggggttctggctctgaagtcaagcaacccctttccagccccacttcccacagtttctttacgaattacattgattttgtgttaaaatttagtttttagcattttgaaagcagatgtctcaatgagttgctctcagactagcctctctaagttgccaacccaacacattaagtagcttggggtacttacaaaaaagcaaccaaaatcagaaaataagaaaaatgcatatatctttcataacctttttttttttttttttttttgagagagtctcactctgtcacccaggctggagtatagtggctcaatctcggctcactgcatcctctgcctcccgcgctcaagaaattctcacacctcagcctcctgagtagctgggattacagatgtgtgccaccacacctggctaatttttgtatttttagtagagacagggtttcaccatgttggccaggctggtctcgaacttctgacctcaagtgatctgctcactttggcttcccaaattgctgagattacaggcgtgagccaccgcgccatcctttcatagactctttaaaccaggatgatcagaattcgatcgaaactgatggcaaggtggatcctttaagaacttttgtgggctccactggaccccaggggctctgtgggttctgctcctggggcgctggtggactcctcttctcggaccttgatcctgtcctgtgactcagaccggtgactgtcacatcctgagggagtgcaggcctctggaaactgtaatggttgtttgactggggtcctcagatcccacctaaccctccttactcattcaacaaatatttattctgcacctactgtgtgtctattctagacactggagtaggacaggaaagaaaacagaaagcctctgccatcatatacggggagcaaagaccctgaggtgggagcgtgattggtgtagtcaagaaccagccaggaggccagtgtggctgggatggagtgacctggggggagagtgggcaggagatagcatgacagaggttggggggcagatcctgaggccttctgagctgtggaaaggactcctgcttcactggagcccctggctgtcttcagcagaggaatgttgtgacttacaccccttcatgatgtaactcatgacagcactttctggctgtgtggtccctgccgagatatttagcgcctctgggcctcagtttgctcctctgcaaaatgagggaaatgatagtacttcaactagttgttgcaaggaatcagtgatttactaaccattgtcccgagcatagagcaagccctccatatgtgagcactgttgttgttacagagatcagaacagggttctcagctggctacagtggccagtctccatctgtccacctgagttaagatgcctctttgtcatctgcccaggctgcccatttgcacaaagactgaaaaattgagtcaggatgagccctaagcttcctatgtgggttctgctcctggggcgctggctgatcccctttcttggaccctgatcctgtcctggtgtgcacaaggctatgtagaaagggccatggccatgaccagggagtggatagaagtgtcgtccccttcgttgtgtgggcctgcacactgtcctttgggaatgcacagggggcagcagtgaggctcagtcacatgtgtgatcagagtggaggtcagcaacataagccaagcaccttaaacgctgattccatcctgggttgtataagcagaagtatagtgtctaggatgagggaggtgtcagtactgctctgctctgcactgggcagagctcacctggagagctgtgctcagttctaatgctcttttttgtttgtttgtttgtttgagatagagtgtcactctgttgcccagactggagtgcagtggcacaatcttggctcactgcaacctccacctcccaggttcaagtgattctcctgcctctgcctctgaagtagctgggattacaggcatgcaccaccacgcccggctaatttttatatttttagtagagatggggtttcaccatcttggccaggctggtctcaaactcctgacctcaagcgatctgcccgcctcagcctccctgaggctcacacctgtaaatcccattataggtgtgagccactgcgcctggcctgatgctcttctttaagaagagaagacagagcagatgggttattctcagaagtgcaggggatgttgaccctggtgaggagaggggaggatccacagggagcaggagctgccttccgcagtctggagggctatctcatggaagggcttagacttgttctgtaggtcatgaggggtggggttgtataaactgtaactggaagctcagagggaagaaatacttttacttttcacaaaaaaaccttttatttttatttttatttttagcattctgagcaagatgtaaatatttgcctcctgaactagggatctccctatcactggggtctttataaggcaggtagccacatggctgggattcagggaaagggactcaagcatcgaatgggggtgggttggatgccctttgaggtcctggcctgcctgagcgcccctggctgtgtgggggttctgcctgcccctccctcctcacctccttcctccccctcctcctcccttccagcaacagatttccctgctgtccctccaacatagagctttccctgtgcggcccctccctcttttcttcaggtatctgcttaaatgtcacttcctcagagaagccctctctggcagctctatctggacactcccctgacccaccacgctgtgtcctccctgctggttttttgtttgttttttgagacagggtctcactctgttgcccaggctggagtgcagtggtgtgatctctgcaacctccgcctcagctcactgcaacctctaccacctgggttcaagtgattctcctacctcagcctcctgagtagctgggattacaggtgcccaccaccacgcccagctaattttgggagcctcagcctcccaaagtgctgggattacaggtgtgagccaccacacccagccctccctgctgtttctcatagcactcaccactaactgcattgatactatttggctgtttacttatcatgttaggggggatgacacttgtcattatttcatacaatcccagtgcttcagttgcttaacacggcagaagcaggtcttgcccagaggacattttggtgagggcgtttggcaggtggcctttcacaaggtgttcaggggcccaggctcctgctaatttgtggctctgctatcccccagggtcttggagccccctggcctgaagatgggggaagagagaggaataggagacaggaggggagggagtggagtggggaaggagggcaggagtctgtgggagatttttatgggccagataagggagtggcttatattactttgcccacatcccattggccaagacccagtcatatggccatagccaactgccagggtgactgggaaatgtagtcctcctggtgtctagcaagaaaattaattaacttttggtgaactcctagcagtctcagctacacttatttatcacatgtcattgaatttatgacatcatctattgcaagggacaccatgatttctggaaccactaattaaattaaactaagacatgccattgatttcaggtgaattctgattgccaagatggtaaaatgtggaaaaatggtacagctcggagtcaatgaactatggtattgtctctccttgaggacagggacccattcaccttgctcaccaacatattcccagagctgcaagagtgtcaagcatgcagtagatattcagagaacaatagttgaggccaggcacactggatcacacctgtaatcccagcaatttgggaggctgaagtgggaggattttctaagcccaggagttcaagaccagtctgggcaacatggggagaccatgtcgctacaaaaaaacaaacaaacaaaaaaattgtttaaagacaatggtagttgaatgagtgacagtgtgtgagctactcttttgtttaagtgcgagaagcccccttgagtaaactacagtgtcagggaatcaggccatgctcgttcacctgaacagagatgctgcaggggcatgggaggaattgccaacagtaactggggcttctaggactctctgcctcaaccgttccttctctctgctgccagcttcgatattcttctctctcactgcacatgggagggaagaatgaccttgctcagctcttgagctgtccatcttactgcctctgtccctggagaggcagccctgacaccaaaaatctaatgggagagactcactggcccagcttggatcaggagcacaccctgggtcaataagctgagccaggaaggcagatataggatgtctctaagaatatggcaatttctgcaggagctgtgtgtgtgtgtgtgtgtgtgtgtatgtgtgtgtacgtgtacatgcatgtgcacagaaagacaggcaatgtatgttggggtcagacgtccttcacaggagagaagctagtgcttggcagtcagttctagcagtgcctgaatatgggacccctttgcctgaaaagggactgtgtcagtgaaagtaacaggcatgcaaatacataatgaaatgggtgggtgggaagatgcatggatggatgaatgacagaaggagagagggagcaagacagtcttacttgctttagcattaaacattttaaagaatctaaatggaagctgtctcctcattaccaaatagggatgctaaaaacaactcttaatatttattaagtacttcctgtatgccaggcattgttctaagctcttttctgcattaactcactaattcccaagaccatcttgtgagatgaatactacgatgaatactataattcacatccccattttacagatgacaaaactgaagcatctagaggttaaataaccccattcataaggggcagagctaggattcaaacccaaacagtccagctctaaccacaaagctctctggcccagcgccatggctactatgaggattaaagccatctggaggctactgagtgtgttcaatgacagtaattgggttatatatatgtttgagatggagttttgatcctgttgcccaggctggagtgcaatggcgcaatcttggctcaccacaacctctgcctcctgggttcaagtgattctccttcctcagcctctggagtagccaggattacaggcatgcaccaccatgcctggctaattttgtatttttcgtagagacggggtttctccatgttggtcaggctggtctcgaactcccgacctcaggtgatccgcccaccttggcctcccaaagcgctgggattacaggtgtgagccactgcacccagccatgaggtaggatatttatgccacatcactgcttgatatagagtgaaaataaaaacagatttaagaaaagttaagctaaatttacagatgtcagaactccaatagctactgaaaagaaggatactagaggtgagtttgggggcatattctgaattttcgatgtccttccctcaaacacacccctttgtggtggtcagagcccagagctggccaaggctaggtggactaaagtgagagctaccaggtaccattgggccctgcataaggacacttgactgagaggacccaagggagggctgaagtttcaaaaagccagcagtggccactctccgtgagcctgagctcatgtgtgctgggcttggccagtgaactgggatctcccagctgtcccagggcagccactctgcctccaattgtctcttcctgccttggtagagcctctctcttctcattgtgatgcctgcagcctggaaaatcatggataaaaagccctgattgaaaggcactaattacccattattattttccatgccgtaatttgtgcggaatgagatttcaatcagttgtcggggatcagcctggttttgactaatctttctaacgacaagatgcttaattacagatttttgcctgagctccagagcgtgcagagggaggcaactctcgctgaagccaccatgctcttgggtcatcctgcagccctgggtcccagagggcccccaaggggagaaagagaaagaaatcattaggaaaatattcccaaggaggccaaataaaatggcaccaccacagagacggggctgtgttagcaacatggacatagagggtattggggggctgctttctaagtcaactcatcctccagaacaggtcaccacttgctgtgtctctattgcccccatcagccccagcctcccccaaagcagcctggcattctagttagtaagtttgagcaagtcattagtttcttagggctgttttattatctgaaagtcaccagggtagtcagaaaaatctctgagaacttatgattcagtgactccagctgtgctgaagtgtgtgtccagaaaagtgttacctattgttgaaagctgaaagatacacatacccaagattcaatcacacaggagtgattaaaaaaaacaccatctattaataaaataggcagttcaggccgggcgcagtggctcatgcctgtaatcccagcactttgggaggccaagacgggtggatcacctgaggttgggagttccagaccagcctgaccaacatggagaaaccccgtctctactaaaaatacaaaattaactgggtgtggtggctcatgcctgtaatcccagctactcaggaggctgaggcaagagaatcgcttgaacccgggaggtagtggttgtggtgagccgagatagtgccattgcactccagcctgggcaacaagagtaaaactctgtctcaaaaaaataataaaaataaaaataaaataaaataggcagttcagattactcagagggaaggtcaatttgaattgatgaaaaatctgagtttaagttttatgtgtgtgtgtgtgtgtgtgtgtaattaatggatctcagtgcacagaattggattcttcattatcgctggttcgtaacacttaaccattggcctacttgccccttccttccttccttcctgcctgccttcctgccttcctgccttcctgtctgcctcccttccttcctttcttccttccctaccctccctcccatgtaataagtgcccatgaatccatattcaacaggaaaactggaaccttgacagtaattcgcatctagccacatggtcctccccatcctaccctcctgttaggggcattctgcaatctttaatactattttaaaggaaatttagttacagtatagtagttctaggtgcctgaggggctgatttgtgactcataaagccttgctggagggtctgaggatctgctttaatggatagctcttgatggcccctggttagcaaattaattattgaaatgtacataagaatctctcaagtgttcagaaaccatttttcttctgtggagtggattcccatgtcagttttgtttatcctcttaatttgcccagccagcttctttccctcctggtctatggcaagttccttgaagaatcatcctcaattctaggtctgggggccttggatgagggaaggggtttgctgggtttaaccacaggcctgcccactgctggactttctcagaagaatcacagcctcaggcaacatccactgagtgcctgcttgtcacctgcgctgttctaagcattgtgccttcattggctcttgctcaactctgtgaaggaggtgctgtgattgagcccattttacagatgaggaccctgaggtccagagaggatgacctgattactcaaagccagcagcaattagggatagaactggcacgtctgctaccagcatgcaggcttgtagccattaagtggcccagctgcttgttccagttcttaaatgcatggccccagcagggatgaggctctgggggccgtccttcagcctgacccagattcttgggtgtggtgggtagattctaccccatagaggaaagcaagctggacgcttatcaggccagtccattcctctgcctgctgccctctgaccagcagcaggccacctagtgtgggaaagatccttgagattccagcgtaaaaaacagtgagaggccgggcctgatggctcatgcctgtaatcccacattttggaaggccgaggagggcaaattacccaaggtcaggagttcgataccagcctacccaacatggtgaaacccgtctttactaaaaatacaaaaattagccaggcatgggggcacacgcctgtagttccagctactcaggaggctgaggcaggagaatcacttaaagctgagaggtggaggttgcagtgagccagatggagctactgcactccagcctggatgacagaacaagactccatctcaaacaaaacaaaaacaaaacaaaacaccgatgatgatctcttgttgataccctgaaatctgtcttcctctagaagtctaaggcaaaatagttcagcaatttgagtttcattcagaacttttgagattcccctgctctctgcattaggaaaatcttcaacctgctttgtaatccagcagagcaatgtccagccaaggcaggaagagccccccagcaagctcggtgtcccctggggatcaggctgcgaagggaacagggtcccacgctggctactgagaaggcccagggcagagatgagttggggcacgagggaggccacgtttaatcagatgggggtgaaattgaggccagggcagcgcttgctaagctccagttaggagatgaatcaaagggaaaatgatgccccaaggggcttcgaccactgactactgccctttcaaaggctgcttggatgggcgtctgttccctccccatgaagagtcaatagttatcgatccagtggggaactgggtcccagccaaccacagatgatggacttgacactccccgctcctccccagaacacaagggtcagctgcctcctgcctcatcctgcagcagctactcctcctagacaccggcttggccaccaccccatggccacctgtgaaatctgaagtgccagtctcaggcctagacgccgtctcccaaccttccagctttcttgcttcttcctcctgctggacctcagcctcagcctcccggagaccaccattgccgcctctccattttctcccaatcccgtcctttctgacatcactcccttgtccaccctcttccctcatacttctaagtcagtggttctcagcagttttgctcccagggagacatttggcaatgtctgtaggttttggctcacatacttgggggcagggtgctacgggcattgagtgggtagaggccgggggtgctcctgagcatccagcagtgctgggacagccccatcacatggaatcactcagccccagatgttagtagtgccgaggatggaagcctaggtctcagctgctggagatggggcccgcttgcattgttgcaccagcatcatgagttaagaggcctggagaacctttgcgtcccagatttctgctcccactttgtcccacagttactattgcaaacttccctccttctcctagtcctcctgccctccggcccttgccttcactccctgtccctcctacttcacagagtcactgcaggctgagtggaggtggtgtgggtgggtttggggggtaaagagggcctcactcaatgcccccctctgccacctacaaacttctcatctgtacagccaaccttccctctcactcttactgaataagctatttctctctctcttttttttttttttttttttctgagacggtgtctcgccctgtcacccaggctggagtgcagtggcacagtctcagctcactgcaacctccgcctcccgggttcaagtgattctcctgcttcagcctcccagtagctaggactacaggcgcatgccaccatacccagctaatttttgtatttgtagtagagatgggtttttgccatgttgaccaggctggtcttgaactcctggcctcaagtcatctgcccaccttagcctcccaaagtgctgagattacaggcatgagctaccacacccggctggattccttgcaaactcttacaagatcctctcatgatggcatcacttcttccagtaggaccccacccttaagaatcacacccttaagaatcaacacccttaagaatcacagctgcaccaccaaaaccaaaccaaacctccctgtagatttcttgggccctgcctgtagagacgcttcttcaaaatatgacgtcagtgggatcaggtctaggaagccacctgttcaccaagcccctcagctgcctccgatgaagattgaagtacagtttgcaaaaagctgacacgtattttgtgtcttcagcctttaagtgttgattttgccctctaccactaatatttaacatcgggtagccatatgattcatgatctacttcagggagagaagtgggggcggtgatggtaatgacactggaccagcagtaggaccgagattgctcagggccaactgggaggtatcgatacctaatttttaaatgtcttaaattccttacattctcaacacgcccccttctcatcaaagaagctgacaattagtactgacaacagtaacaaaacattccttccccacgtcacagcctccaagtccaggagggcatgctttgtttacaaggtagctggtgctgcctgaatgtgttcatgaaggcacccctgctccgcccagtcctctacccttcacggccaattttcctgaaagaattgtctgcattcactactttcagccattgcaatgaggcttctgtccccatcatgcagtaacctggctgtggtgaatgtccccagacacttcctgactgctaagtgtagggatacttgccccttctcactctcactccacctgaccttataggatggaatctgctgcccaccgcccttctagatggctctgctcatccaatttccatgacatgctctattttttccttttcccacacctctggttacatcttctctgtcttcttggacttctttccctctgtcctgcctttacattttttttttttttttttgagacggggtctctgtcacccaggctggagtgcagtggcacaatctcggctcactgcagcctctgcttcctgtgttcaagcaattcgcctacctcagcctccccagtagctgggattacaggcatgtgccaccatgcctggcgtgagccactgcacctggcctgcctttaaatttttcattcgaatgaatgaacacatgaggtcctgggggataaggacagatggagggagtgggcaggtctcccagagggtctggcctctccagcaactttcttccccctgcctggtgcatcaggaaccaggcagcccagagagcactgtgcctctctccccctctgcttccagagagttctctattctgacactttataggttaagaaataacagcgaagctgggggtggtggcccatcctgtaatcctagcactttgggaggtaaaggcgggggatcacttgaggtcaggaatttaaaaccagtctggctagcatagcgaacccctgtctctaccaaaaaaaaacagaatacaaaaattagccaggcgtggagtcacgcgcctgtaatcccagcctctcgggaggctgaggcaagaaaatcgcttcaaaccaagaggcagaggttgcagtgagccaagatcgcacacctgcactccagcctgggcgacagagccagactctgtctcaaaaaaaaaaaagaaaagaaaaaagaaaaagaaaaagagcagtgacaggattccagggtttggaactctgggtggcagtcagacattgtctgcattttgggggattggaaagatgaggtccctgcctggagcagctcttgcccaggcctggtagcagagaggcagagtgctgtgaagcaaggaacgtggacctgcagtcaggttcggactgcagcttctcccaggactcaagtgaatgggataggctctgagctccggccttttccttctcccaggactcaagtgaatgggacaggctctgagctccagccttttccttctccgaggactcaagtgaatgggacaggctctgagctccagccttttccttctgtaaggtggggataggagggcagagcggacaggctgtgaggattaaataagatggcacggaagaaggtgtctcacatgcagctggggcctgatgggcagccgctagtatcgcccagcctctgagaggggaagctgggcagctcctgagagtgaggaaaacatgcagaagagcctggaaggaatttcaacccagaaaagaagctgtggccctctgggggtcttcatatagtgtgaaaatatgaagaatgagagaatgaatgaagcaagaccagaggcaccgcagcagtgcccccatcagcatggcacccgcggggccctttctggcactctgtgcacttgtgttggcttagtgtctgttgttcctatgaaagtatgagcgtcttgagatcgtgagctgtgcctgtcgtgttcccattatctggccagcacttggcacatagtaggtgcaaaaaatacacattgacagttcctagaaaaggcatgctgaggaggccaaaataatagttatggaaatgaggcggggtgtggtggctcacgcctgtaatcccagcactttgggaggccaaggcaggcggatcacctgaagtcaggagttcgagaccagcctggccaacagggtgaaacccccatctctactaaaaatacaaaaattagtcagtcgtggtggcgggagcctgtaattccagcttctcaggaggttgaggcaggagaatcacttgaacccaggaagcagaggttgcagtgagccgagatcacgccattgcattctaggctgggtgacacagtgagactccgtctcaaaaacaaaaaacaaaacaaaacaaaaacatggaaatgagaaagctggaggactaaaattactagatcctcctgagttgggactcaggctctaaattaatagcgggcttcctgtaccaaccctgatagttaataacgggcttcccgcaccaaccctgatagagttaatagcgggtttccctcaccaaccctgatagaggccagcatcttctttgcttccctctcagccctgagggtcttcatccagggcctggaggtggggcccagacactgcaggatgcaggatgctttgcacccttctgaatcaaggaggggagcggaagaggaaaccaaggcttggggagcaaaccgccgcctgctctggtgtccttcagggttgtccagccatgagacgggtgcagggaggcagttgggaaaactgtggcctgccctctcctgggaggggctgggagctttccatttactttccttggggcaaatgcctcttatccatcaaggcacagatctgaaacaggtgacacagagtacttggtcactacatcatcgctgctgtaattactgtttatgtcaagtgtatctcctgagatctctggagccctctgcagcctggggaaggtttgggctgaagacccctgggatctgggagctgtgttgctcagcagggtttttcacagtgccctagggtcttcctgtgaaaagcaaaacctaaagcagccatcaggaaagcaggaggggattaaaagttaggatgtggtcagctctattctgcctgcctcgtggaagggtgcctgaggagcaaggtgcgcccctgttggctcatcacatgcccctgcagctgatggcctgccaggctgatggtctttcctggggactccactggtggttgggaagaaggtgtgtggcagtgcccagggagatgatcacagagatgtagaagggcctggaggagattctcaaccaggggactggggcttataggagagtgtctccgaggactcagggacattccacaggaaacagaagagacccaggagtctctgtcttcacacactgcattttgggagttggtgaacttctggagagtaggagctttatgttatcttttatctttgtgtctgtagctcccagcttctggtctatgggaaagtgagttccttgactccagccatagtcaatggcagcccctcaggaggggctaattaattaattaatcaatttttgagacagagtcttgctctgtctcccgggctagagtgcagtagcccgatctcggctcactgcaacttctgcctcttaagttcaagtgattctcgtgcttcagcctcccgagtagctgggactacaggccggcgccaccatgcccggataatttttgtattttttgtagagacgggctttcaccatgttggccaggctggtcttgaactcctgacctcacgtgatccacccacctcagcctcccaaagttctgggattacaggcatgagccaccacgcccagccaggagggcttaatttgtattaatcattaatgagaccagggacagtggaggcctctcccaatcataaggttgcacagacacattttgtggcattgctatttggccatgggttgcaagatgcaagtgggctctgtgggtgtgataagagggagagacagaccctccctgccacccaagagtcgtctttccattggcaggctgtcctatgacctccctatcctttgctcctctgcaagatctttccctttttcctttcacctgctccaggcataagcatgagcctcctctctacctccatagggggaggctcagggagtgaggcagcctgtcaaggacagggacagatcaacaccacccaggccaccctcagacccaatcctggctggaatgtgacccacagctgggtttccctgaacacacaccttaatctcccaggtgtgagctcagctgtctttcttgtccatgttgagagaagaacaagtcctctcccttcatcctgggagctgggatacgggaggggaacacccttgcccgccttctcctccaccagcatggccggggtggaggggcttggtttacaggaaacattctgttatcccacacagtgatcttgccatactggtaattcacctggactttgtgggtgggtggggaggctcagtgggtagaaatagctgggggatgctcagggttggggttagaatgctccctcaagctttccagtggagacatgtctcttgggggacaggcaggctgggtagaagctggctactcggggtctaggaagggaaatgagagagggagggtttgggagccaccttccagacatgccttctggtaccaagcctggaccagtggcaaaacccaaagggcagccaatctggctggtacctttgccacaggattccttcttgaatcagccaaataacctgttgcctctggttccgatcttagtgaaggtaggggtcccagggaagctccaagccaggtcactgtacttagtctctgggccaaagctgtactgccaagactgttacattgtagccattggctgggtgcagtggctcacacctgtaatcccaacagtttgggaggccgaggcgggtggatcacctaaggtcaggagattgagaccagactggtcaatatggtgaaatcctatgtctctattaaaaatacaaaaattagctgtgcatgacggcgggtgcctgtaatcccagctacttcggaggctgaggcaggagaatcgcttgaacccaggaggtggaggttgcagtaagccgagattgggccattgcactccagcctaggcgacggagcgagactccatctcaaaaaaaaaaaaaaacttgtagcctttgtgtattattgttatgcaggaaggttggccaaacattttggctgactagtttccatcttgtgtcaccctcaaactagaaatttgcaaagcactagggtgcctaatctgaagattttttgtttgtttttgagataaggtgttgctctaccacccatgctggaacgtaggggtgcgatcatagctcactacagccttaaactcctgggctcaagcaatcctccctcctcagctcctgagtagctgggactacaggcatacaccatcatgccaggctaattttttttttttttaacagatggggtctccctatgttgcccaggctggtctcaaactcctggcttcaagcgatgatcctccccgctcagcctctcaaagtgctgggatttacaggtgtgagccaccacacctggtccgctgaagtttattgatcaaaataaagtttctttgaggcctccgaaggttttggaggtaatgccagaaacttgctcccggctgcgccgaggggagaccagctgaccttctccaccgttgttttatcgcaccaaagccttagcatagagcccttcccagccaccctacctgcggggctggacccgcccaccacacccacagcaccttgctggggctgacttcccgatttgtgtccacaggctgctgaacaggatgtcctcggacgacaggcacctgggctccagctgcggctccttcatcaagactgagccgtccagcccgtcctcgggcatcgatgccctcagccaccacagccccagtggctcgtccgacgccagcggcggctttggcctggccctgggcacccacgccaacggtctggactcgccacccatgtttgcaggcgccgggctgggaggcaccccatgccgcaagagctacgaggactgtgccagcggcatcatggaggactcggccatcaagtgcgagtacatgctcaacgccatccccaagcgcctgtgcctcgtgtgcggggacattgcctctggctaccactacggcgtggcctcctgcgaggcttgcaaggccttcttcaagaggactatccaaggtgcgtggtgggcctcaaggagcctgggcgcagggttgggggtggcagccgtgcctgcgggtctggcagaagccctaggaattcccagagactgccaattctgggcgctgttggagcggtacttctgtggggcgccttttcccttgctcagggcttctcattctggcactggacagctgcaagactgttgttgagatgacacgcgttccccaccccctcagctcccccatgcacagccccagaaaaccaaaagaaaatccacaggaatgccaaaccctgggtgcttctcactggtatggagtacactgtcaaatgtgtgtccctcaaaaagtttattttgtgcgggggaaaaatataatttgccctgcaattccagacttacgggacatagaaagcgtccctcaccttgtttttgtcttacttatacaagtaaaacgccagatgtggtgactcatgcctgtaatcccagcactttgggaggccaaggccagaggataggtcaagccaggagttgagaccagcctggacaacacagtaagaccccatcattattattattatttttaaattaatgcatggtggcacacacctctagtcccagctacttgggatgctgaggctgcagtgacctgtgatggcaccactgccttccagcctggaagacagagcaagaccctgtctcaaaataataataataatatatgagtattttctcactgtagaagactcagacctgttggaatcaggacaggagctcatcctgtctggatcccagtttaacctatttttaagaccgaccttccttcattccttccttccttcctttcttcctcccttcctctctctctctctcaacccatcctgtctggatcccagtttgacctatcttttaagacctgtattttctttccttccttccttccttccttcctttctctctctcactctctttctttttctttctctctctctttctctctctctctctctttcgatgagagtctcgggccaggcacactggcttaagtctgtaatcccagcactttgggaggccaaggtgggccttgaggtcaggagttcaagactagcctggccaacatggtgaaacccccgtctctactaaaaataccaaacaaacaaacaaaaaatcagccgggtgtagtgtcaaatgcctgtaatctcagctactagggaggctgagacaggagaatcgcttgaacccgggaggtggaggttgcagtgagccaagattgggccgctgcactcaggcctgggcgacagagtgagactccatctcaaaaagagagagagataagggtcttgctatgttgcccaggctggagtgcagtggctattcataggcacaattattgcacactgcagccttgaactcctgggctcaagccatcctaccatctcagcttctcaagtagctagaacgacagtcgctgccaccacacccataagctttttatcaatacatttgcatatcacctgagtcacattccaatggccatggtggtggcaccctctttctgtgggtactagagtcaatcactctgacaaaaggcgtgcaagaaccctggtgggtcgctctgtaaagtcaccacgaggtgaattggggagaataaattggggagaatggtgggcctgcccccacagggctgttatcaaattcatggcagagagagaccactgggaccactggtgcacatcaccacacccagttaattttatttttaatagagatggagtctcaccatgtagcccaggctggtctcgaacacctgggctcaaatgatccacttgggcccactttggcctcccaaagtgctgggattacaggcctgagccaccgtgcctcgccgatagctgtgactgttaattgcgtcaggccctgggtagagcactttcattcagttagtcaagtatctgttgagcacctacaaagcaccaagccaggctgtaggtgctggtgataggatagacaaaatctctactcatgcaggtcactgcgatgagctggtgccatccaactggcacagaaactgcagaccagacaggagaacacccaggaaccacccatcctgcccctgcatcagatccctttccagggccctgcctcactgtccccagaatgtacctaccccattcatttcccttttagaagaggcaggctaagcttccccgggatgattctgtttattcaacaaatatttatgtgtttaagtttcttcagatggcaatctatttatgaaaccaattgaagacattaagattggatatatttccacttccacatatgagttgagatggtgtggtgcattggctaaccatcagggctcctggtcagagagttccatcgtccccttatagctgcaccttggacatgctccctgtttctctctgtgcttcagttacttcatctaaaaagtgagatatcagctgggcgtggtggctcacgcctgtaatcccagcatttcaggaagccgaggagggtggattgcctgagctcaggagttggagaccagcctggccaacatggtgaaaccctgtctctactaaaaatacaagaattatccaggcatggtggcaggtgcctgtaatcccagctgcttgggaggctgaggcaggagaatcccttaaacccaggaggcagagggtgcagtgagccgagatggcaccactgcattccagcctgggcaacagagcaagatcccgtctcaaaaaaaaataataaaactttaaaaaataaaaataaaaagtgagatattgttcctaccttatagagctgttaagaagcttacgtgagttaatatatataaagcacttagaatattgcctagcacctagtaagtgccaaacaaatgtttgtaattattattttaactttaacaatgtgatttaagacatattattatgaaaacaacggacacatttatcttatagaataagcttttgtaatctacatatatttaaataaaacaataattgttttgatctaacaggactcagattattttagctattttagttataaatttcttttttcttttcttttttttcttttttttttttttttgagacagagtctcactctgtcacccaggctggagtgcagtggcatgatcttggctcaccgcaacctccacctcctgggttcaagtgattctcctgcctcagcctcccaagtagctgggattacaggtgctggccacaacacctggctaattttttgtatttttagtagagatgtggtttcaccatgttggctaggctggtctcaaactcctgacctcaagtgatccacccgcctcagcctcccaaagtgctgggattacaggcatgagccaccgcgcccggtcataaagtgatttatttcttaaatgagcccttttaaaaaaataaacatgataaaaaaaattctagcagtgcaaaacagtagagcacgttttcctgaaaccccagacctcagttttcttaactatcccagaaggacccctttaccatctttgtcaagcaaatattttttgagcatcgtctttatcaggcactgtgctggcctccaggacataaaaatgaatgcaccctggtctctgcccgctttatacaccctgagtctgagtctgggggaaggccctgggatctctgtatttgaaaagcactgcatggtgatgctgtctcttgcctcagccaagaatgagaacctccagtatgatggtttttacacaaatcatcagatatttgacaaacacaaaatgtttaagtcaactgaagttaccaagataacaacatttttctttctaaattggaaggttgtcttggagaggttgccattattttagactctttgaggtcagtttttgaagaattgcttgttagaagacagtcacattttcttctcaccatgttgttcttagatgggctggagagttttgaatcacattttttgaaagcagaggttaatgtgtgtaaactcagaaatcctactgcatgcttgacagaggcccaggtgtctgcgaatgttctcagcaagtcaggagtccacatgaaagattcgtaaatagtcttaattatttgctaccgcgaataggataatgatctcttcgtagaagtcaaaagacaaacagcagcatttgtgcagttggaactgaactgctgcagcctcttctctttccacaaggagagtttcaagttcgtaaccagaaagaggtttatattcaggacagggaaaagtaaactcaaggctgacagattgctgtggttattttattaactctttggttttgttctaacaaagatttaggttttgttgttgtttttttttttgagacagagtctcgctctgttgcccaggctggagtgcagtgatctcactgcaacctccacctcccagctcagcttcccaagaagctgggattacaagcctgtgccaccacacccgactaatttttgtatttttagtagagacggggtttcgtcatgttggccaggctggtctcgaattcctgacctcaagtgatcctcccaccttggcctcccaaagtgctgggattataggcgtgagccaccatacccagccagattttgttgtttctaaacgtagcaactgtagaacatctggaaaactaggaaaagtacagacaggagaaaaatgacctagaattggacaaccacagagacaaactcagaactcagtgagcattctttgagtccctctctgagtaaggtgcagagggggagcaggagagaaagggacgtggttctttccctaagaagctggaatctgttgtgggtttttttttgttttgtttttgtagagatgaggccttgctatgttgcccaggctggtcccaaactcctggcctcaagcaattctcttgcctcagcctctcagagtgcttaggattagagggaggagccactgcgcctggcccaggtagctgcaatctactgcttagtgcccatgagtctacaggcgtagcactgtgctccaaaccaggacatagtctcctaagcacctaatattcaggtcattttttttaagttctattgtgtggacagagggcttaagtcatggaatgagccattcacgagtgcctgtaaatgcttggaaagctctgaaaattgggccaggtgtggtggctcctgcctgtaatggtagcactttgggaggctgaggcaggaggatcccttgaagccaggagttccagcccagcccagcttgtgtaacaaagcgagaccctcatctctacaataaattttttaaaaattagctgggtatggtggctcgtgcctgtaatccctgcttcttgggaggctgaagtgggaggattgcttgagcccaggagtttggaggctgcagtgagctatgatcctgccactatactccagcctgggcaacagagctggagtttctttaaaaaaaaaaaaaagcggccgggtgcgatggctcacacctgtaatcccagcactttgggaggccaaggcaggtggattacctaagatcaggtgttcaggaccagcctggccaacaggatcaaaccccgtctctactaaaaaatacaaaaattagctgggtgtggtggcgcatgcctgtaatcccagctactcgagaggctgagacaggagaattgcttgaacccgggaggcagaggttgcagtgagatcttgccattgcactccagcctgggcaacaaaagcaaaactccgtctcaaaaaaaaaaaaaaaaaaagaaagaaagaaagaaagaaaagaaaagctctgaaaatcatgttaatcgtgttacctcacaccctgcctcttccttagatcacttccttctgcgcaatccaatggttgtactaatatgggaagaaattttgcagaaacaaagatgtcatgatagatttagggagaaagactaagaccgagtcattccttctccaccaatcttttttttttttttttttgagacagagtctcgctctgtcacccaggctggagttcagtggagcgatcctggctcacttcaacctcggcctcccaggcttaagcaattctcctgccacagcctcccaagatagctgggattacaggcgtgtaccaccacacccggctaatttttgtattttcagtagagacagggtttcaccatgttggccaggctggtctccaactcttgatctcaagtgatccacccacctcagcctcccaaagtgttggaattacaggcgtgagccactgcgtccaatccaccaatctttattgagccctcactatgtgcttggctggtagtacaatggcgggggagggaagagggggaagatgggcaaactacggcctgtaagccagccacccttggttgtataaatcaagttttgttggaatacagccacacctatttgtttgtatattgtctatggctgcttgagcgttacaacagcagagctgagtagttgcaatagtgacggcctgatccacaaaacctgaaacactcctctgcactacattgaactaggcagattcagtctcctggctctcagagacctataatcaactcctagtagtgcatgttagtgtttattccaaccctgcccaattctatgctatgaaagggaggtttttttctgttgttcgttttttttttttgttttgtttttgtttttgtcgctgggggctgtgatgacactcactgagaatagatgagctcatagacagatgaaggcaccttcctgaaggaacagaatggctccaagtcagaagagatagacctcaacctgattgcatttactcgcatatctaaagaaaaaaaaatgccaattaacaaggattggctagccctggaggcatagaaaaaacagacatacttaggcaaagccaccactcctaggaaaagggagtcttagcctagggacagcctgatgtgattaaacattccgtttatctgattaatatctttctggttaggatctagttcccctgcaggtcttctgcaaggagtgaatttgcaggtcaggcagacagatcaatttctccttgtatgtgtgctctctttgcatggcatccctgagcttatacatcaggttcctgaatttaggcaagaggagtgcctctgagagatggagccactttctgtggctggaaaagtcagctgcttctgggacttagggctgagtgacactgactccaccgtaatgaaaacctttgtaataaccttgaccctgtcaccctgtgtctctctcagcaatgactctgcctcctgttttattgagaaactagaactccctcagcttcctgccgccaaaccgatgcactctcttccatgttcgcagctgcttccgttcactgattccgcagctatttcttgcaactcactcactgctggaagagatgtctcctaccccaggctcagctcttctctggctttgaatcctacctccttccctcctcctgagaccctctcggctattacctcctctcctttgtcttcccttgctcattttctaaagtctccttccttccttccttccttccttccttccttccttccttccttccttccttccttctttccattaacattcaactatctctagtatctccaatcttgtaaaatatatatctcctctaccttcagcttcctggttcttcctctcttcctcctctcagttcttgacccagcttctgcgcccagcatcttccttctcatatccatggcttcagttgtctctgaaatcaggatgaatgctaattccataggtcttgctgtcatcctcttccccaagctccattcctttcacacctaatgaacatttccacttggatgccccagaagcaccccagttgcacgaagtcttaaacagaagcggttttccttccatcaccatttctccttgtgttcccaatacagtgcctgcatcagccctccatgttcaagccagacacctgggtcttacctttaactctgcttcctgtcccagcgcccacccccctaccaccccgaactaacatcccagtggccaagtcttgttcattctccctccttcagatcacttgacccagcagcttgtcttccttcccctgcttcagctcaggccaccgctgactcccaccgcttcctacctgttctccctgctgccaggctcggccgttcccagcctgaacacacatctgaccatgtctcccttctttcttgtggggagaatcaaagctccagaacatggccaaggacgccctctgggattgccccacgtctcatgccactctcttttgcatgctgtggtcaccctgattgctctgttttctagttaccagattttattccatgctttcaatttctagactttgcatatactcttctctctgttgcacctactcccaacctctactcccagcttgtgtcccttaggtctccagttagtaggcatttcctccaggaaggcttctctgattctctcctctcattcctcctggatgccctgcaaaggttcgcccatcacgccacccttctcccactgtatggttattgccattttttttgtctgataccccaagaagagtacaagctcctaaggcacagggttacatttacttacctttttttttttttttttgagaccgagtctccctcttgttgcccaggctggagtgcagtgacgcaatctcggctcactgcaacctccgcctcccaggtccaagtgattcttctgcctcaacctcccaaatagctgggattacaggcacgcaccaccatgcctggctaattttgtatttttttttttttagtagagacggggtttcaccatgttggccagactgctctcgaactcctggtctcaaatgatctgccagcctcgtcctcccaaagtgctgggattacagacgtgagccaccgcgcccagcccacatttacttcgattttcacttaaccccatgtcctctcacagtacctggcatgtagaaggttctcagtgtgtccaaatgcaatgcaatccccaaacaaagtgatctcccatttcccagggaggacaaactgaagaagttgggccagtttgcatatgtgtaaactttaagggatctaggtaaaatagtcagatgtctgcttataacaatatattatttagttacgcttgtatattttaaattaccttatggaaaacaatatattatttttgaaaagttgtttttctacacatattttgtgaaggaagtcttatcaaatgaatctttgatacaaatgtctttgttttccttctctagagttttttgagtcatttaacagtgtttcagtgtgctgccttcatttccatcagttaattgaaattttatgagaatgtatgcgctgctatccctaaagtttttttattttaagccataagtatacgtcctacaccataaggggagttctttttttatttgtgttgacttatgatcaggatatccacaatgtatcaggtacatactgcttttgacacccaacacttgtaagattattttcctgggaataactaaatttgtgttaaatttctttactcccaggccaggcatggtggctcatgcctgtaattccagcactttgggaggccgaggcgggtggatcacttgaggccaggagttgaagaccagctggccaacatggcgaaaccccatctctactaaaaacacaaaacttagcttggcatggtggcacatgcctgtaatcccagctacttgggaggctgaggtacaagaattgtttgaacccgggaggcggaagttgcagtgagccaagatcacacactgcactccagcctgggtgacggagcaagactcagtctcaaaaaaaaaaagaaaaaaaagtttgtttttatttactccctttgtagtgattcactcaggcaaggagcattgattgcggtcttcttaggaccatgtgtcttcccaaattttagattgttgttcagtacaaagtgattgacttaatagcacctctgatgtgagaacttgtaaagactcaaatcataagcaattttctctctttttttctttcctttttttttttttttttggtccttgggacagggtcttgctctgttgcccaggctcagtgcagagacatgatcatggcttactgtagcctcaaactcctgggcttctgcctcagccttctgaggagctggaattacaggcatgcaccaccatgcccggctaatttattttttaaaaaaattgtaaagcggagtctctctatgttgcctacactggtcttgaattcctgggctcaagcattcctatggcccccaccctagtgggcttgcattgtagggggaaagctgacaataaatatgataaataatgaagcatggtgacagactgagacaggtgttatgaaggagaaaaaacaatgatgagaccagagagtgactgagaaagggggggggtctcatttagaaggaggattagggaaggttgtgctaataaggtgacttttaaaggaagctgaagctcatcaaggaatcctgggaccagcgttccaggcagaggaaaaagccagtgtgtttcaggacagcaggagggccaacatggctagtgtcagtgagcaaaggcaaagtggaaggggctggagaggatgggcaaagtctaggggccatggtgaggggtgcacttggatttttttccaggtagagtagcagccgttgactaacatgtgatacatggccatgaggggctgtacggttaggtaaagccagtctgcactcctccttgagttcccagggtagatggccaactttgcacaggccactgggagtcttttgagcaattcctgggtctctaacttaaaacaagaaggaacaagtaagaaagaggcctggcacagtgcttcctccattcacctggggcccagatgcaggcttggaagaaaactcccctaggagaggggaagggggatgattgatgggttattccaccttgggtcgcctccaggtcttttgtcctggagaatgcagctggcggatctggatcctggatcccgggaggcacaagacaggggtgcagagacaagagcaggagagggcaggagtcaggagctaggtgctggtcccggcccagtcactagccaactggctgaccttgggcaagcaaggactgagttcctctggcctcagtttcctcatctctacaagaagagtccattaaacccacaaaatgttagctatctgtagggcactggcaaatgacagaacaaatcacaattcctctttttggagacacagccaggatgccagtcagaatgtggtcagcctgtgacttaggtgacacatagagtccagagaaggtttataccttctggagggcagggagggcttcctggaagaagggacactttctcagaagtggaaggtaaacatgcttggcagcaagagaggagggggctcagtggtggatgatgggctgggaaaacagcatggcactggagtgcaccaggcttcacaggtcatggtaaggaacagttaagtaaggagtcatatttaagatttgagggctatttaaccaggcttagaatctcagcttcacgatttcttagttgtatcaccttgggcaagtgacttagttttcctgagccttaatgtccgtatcagtaaaatgttaatagttcctgcccctacagtgttattgcaaaaatgaaatgagacatgcatgtgagggtgtaactaagtgcctggcacatgaaataaatagtatttgttttgttagttgtgcttggcaatgggaagtcattgaaggcttctgagcagggaattaatcagatctcctttcagcaagataattcaggcaacaataggaacgatgatgtggaagcaggagaggctaggggctgggagcccagtgaggaagcaattttattttatttttattttatttatttatttttgagacagagtcttgctatgttgcccaggctggagtgcagtggtgcaatctcggttcactgcagattctcctgggttcaagcgattcttctgcctcagcctgcccagcagctgggattacaggtgtgggccaccatgcccagctaatttttttttttttttttttttttagtaaagacagggtttcactgtgttggccaggctgatcttgaactcctgacctcgtgaccctcctgccttggcctcctaaagtgccaaagtgcagggattacaggcgtctgccactgcgcccagcaggaagcaatttttttttttcccccaagatggagtctcactctgtcacccaggctggagtgcaatgtcatggtcttgggtcactgcaacctccgcctgggttcaagtgattctcctgcctcagcctcccgagtagctgggactacaggtgcatgccaccacacctggctaatttttgtattttaagtagaaagggggtttcactctgttggccaggctggtcttaaattcctgacctcatgagccacctgccttggcctcccgaagtgctgggattacaggtgtgagccattacatccggccacaggaagcaattttaacagtgcagttagggccgtccaaaccaagatcagggcaaaagggctagaaggagaagttaggcttgaggaactttcaaaagtggattcaggctgggcacagtagctcacacttgtaatcccagcactatgggaggcagaggcgggtagattacttgaggtcaggagtttgagaccagcctgaccaacatgatgaaaccccgtctatactaaaaatacaaaaattagccaggcgtggtggctataatcccagctacttgggaggctgaggctggagaatcgctggaacctgggaggcagaggttgtagtgagccgagatcaggccattgcactccagcctgggcaacagagtgagactctgtctccaaaaaaaaaaacaaaacaaaaacaaaacaaaacaaaaaaaaaggtggattcattattaaaaggatagtgactggattgtggatgctaagggaaggaggactcttagatttctaatttaggctactagggagatggcaaggccattagggggaaaacataaatacccagaaggaacaatttcgtcagctgggagagtcagggtgggaaggagcatgagataatggataaagttttggacatattgagtttgatcagttcacagagaccctggagagtttggaattacagcccagaagcaaaatcttgagtggggttttaagtctaaggagagcctctaagactgtggttctcaaagtgtggccctcaggccagcagcaaaggctacacctgggagcttgttagaaatgcaaattttgggccccaccccagacctactgaatctgagactggggggcaaggcccagcaatctgatttagcctttcaggtgagcttcattcaagctcaaatttgagaactggtgttcgagagaaagctctttagaaggagaagggttgagggaccctgcggaacagaaggagcataggaggggccttgaaaggagattgaggagtgccatatttcatcagttctaagatgcacattttctccaagtaacatctctgaattgggctgcctgtcacagttaccattgaccaggtgacagccgttccctggttgtcactgcactcaaacgcacctcaaaagttgcagagtaggggccagtggcctgagacaacagtgaacactttcttaacaaagcccttgatagtagagaggatgactctgtgaaaaaaacatgaaaacaatgactgatcaaaaatgattcagaagagtttgagatgttttagcaatattttaaccaatctgtttttctcgtattttctcttatgtatgtgtaagaaggctacgggatcaaatcaaatctgaaaaaaagctcttttttttttttttttttgagactgggtctcgctctgtcacccaggctgaagtgcagtggcacaatctctgctcactgccgcctcagcctcccttcaacctccctgggctcaagtgatcctcccaccttgagcctccaaagtagctggtaccacaggggcatgccaccacactcggctaattttttgtatttttggtagagatggggtttcaccatgttgtccaggctggtcttgaacacctgggctcaagtgatccactggccgtggcctcccaaagtgcctggattacaggtgtgagcctaatcggtggattcttttttctttcttgactgatgggtaaaataatggtacatcttaccactgaaagcatcttagttcattacaaaccaggcgactaaaaaaacaaaagaaagcaagtactccagagttgattaaatacacatagaaatagtcagagatgttgcaagagtccctgcagagagaagggagatgaaatctaacaaaatagcctgttttaagagggtggcaatgggtgtctgctgcttcaggaaggaccaggaggagaaagaccaagaggagacaattgcatttggtagctgaaaggtcactgttgtggaattctaggattctctgggtgggggctcttgctttcaattcgtttgcattcattatctattcaacagatattaatcgatttccaggattgagatactgtacttgagatacagaaatgaaaaacataataatctccattcccaaaaagcacacagttcagaagggaggcccacaggtacacctgtgattatgaaacactaaggtagctgctttgagtgtggggatggggtggtggcgagaaacatgcgagcctatctggggcagaagggaagaaagtgtcaccaaggaggccatgtgagagctgtggctccaaggatgtggaggagctggccaggaggaccaaatgaggagtttcaggtagagggaggtatgggagggccgggggctccatgagatccatgaactattatacttactgacagttcagatctgctggagcctacaaactggaggcctcagtgagaggggattagggtggacaatttggaaatggtcagatcataaaaggcctggtaggctttgccctggagtttagattttgttctctgctctgggtggcaagagttggagaatttcttaaatttatactttaaatttatttctaattcttttcaaaataaggtatacaaatagtttaaagagtataaaagaaacataacttttaggccaggcacagtggctcatgcctataatcccagcaatttgggaggccaaggcaggcagatcaccaggagttcaagaccagcctggccaacatggtgaggagtttgagaccagcctggccaacacggtgaggagtttgagaccagcctggccaacatggtgaaaccccgtctctactaaaaatacaaaaattagccaggtgtggtggcgggtgcctgtaatcccagctacttgggaggctgaggcaggagaattgcttgaacctgggaggcggaggctgcagtgagccaagattatgccactgtcctccagcctgggcgacagagcaagactttgtctcaaaaaaaatatatatatatgttttataatgaaggatcacagtcactggccctacccattctcctcccactctaattcagagttaaccatttaaaaaaaactctcttctatcatttagtaatattgtgatcttatagctatatttgctgacagcaagttttaccttctttcttgacttgctgttatggaagatgagttagctccaattacacaacccatcccaacacacacacacgatcatcccgctgtcccaatatggtaatatcacaaaattttctattttgcctgttgccatttccttcttgacatgtccttgacttttctcatgggttgtattccctgttttctggatcctacctcttcctctttttagttctttccttctttgggaaagcatgtagttcatgggcgtccttaaaaggtataggagaggtaaaatcggcaataccttgtatatgtggaaatgcctctattccatcctccaaccttcacattagattcatgtcttggcttggtacagaattctagttgaaaataattattctcagctgggtgcagtggttcatgcctggaatcccagcactttgggaagctgaggcgggtggatcacctgaagtcaggagttcgagaccagcctgaccaacctggagaactcctgtctctactaaaaatacaaaaattagctgggcttggtggtgcacgcctgtaatcccagctactcaggaggctgagtaggagaatcgcttgaacccgtgaggcggaggttgcagtgagccaagatcacaccactgcactccagcctgggcaacaagagcgaaactcgcacacacacacacacacacacacacacacacacacacacaaaagaaagaaaagaaaagaattgtccatcaggatttggacaccattgctgctttgtcttgtagctcctgctgctgctatatcttgagtcttcaatgcctgacactttctgaggttctgcagtgtggctagcttatttcttatctggatcccttgctttagctacctaggtttctactttcctcattctctgagacagttcccactcccatcctgccagttattggatttttgggatgacgcatagacaggtgtgctccatgtgccatgatgggccagagaacccataaacttgtctgggaaagttattaactgacctccagggggcagtgtggaggatagattggaaagggaaatggagacaggctagtgcaggaccatggtcgcaaggggtgatgagtgtggaactaggactgttgcagaagggagggagggagcaggtatcaggaagtaggatgaaaaggatcttaggggtagatatggaaaaatccaggaggccccttcatttctgacaggttgcaggtggctagtcgtccctttgatgagacaagggatacagtaagaggaacaggctggatgaggatgggttcagtttgagaaaggtgagggcccaggggacctccaggtagacacatcagcaggcagatagctataagggcatgagcactggctgcagatcattgccaatttcgtgatagtggaagccagtggcatgaatgagatcatccagctcatgggtgagggggaggatcgggagagcagagggccctgggcaacgcagagatgaaagggatggtccctgtctccagaggtgtgtaaataagggagtggaactgagtgaccatcaccccagccctttcacaccagctgaatagagtggtaccatttgagctctgtcattagccagcagcctctgagcccacaggtccccgagagctatttgtccgagcttagcaacccccttcctgagcctgtggcagggctgccctgctctctgcagctgttcatgaacagctgatggggatgaccctgggatttccttctctccgggaagcacaggatcaaagagagctgatggtggtggttacccctctgccttaaggtcacggagaagtccaggtcaggttctaccagtgcctgcctccttcccacaggcaccggcagcatccactctgaggtctagggaccggaggcagaccttaatgttctcaaatatcacagttggtggctagcctcggatccaacacctagaaaagacttatcctggaatcctttggttgtatctaccctgtaagacaatcttgtccaacctgtggcccaggatggctttgaatgcggcccaacacaaattcataaactttcttgtagcaggatgagtttttttttttttttctcatcagttatcgttagtatattttatgcatggcccaagacaattcttcttcaatgtggcccagggaagccaaaagattggacactcctactgtaagatctgcctgaatataaaaataagcagagcagccgtggtggcctgtttgccagtgcctgcacttcactaagacctttgtatgctttctgtcactgaatctagggaacttttattttttatgtatttatttttgagacggaatcttgctctgtcacccaggctggagtgcagtggcatgatctctgcaacctctgccttctgggtttaagcgattctcctgcctcagccttccgaatagctaagattacagatgcccaccaccatgcctggctaatttttttatattgttggtagagacggggtttcaccatgttggccacactggtctcaaactcctgacctcaagtgatcctactgcctcggccacccaaagtgatgggattagaagtgtgagccactgcgcctggcctgaatctggggaacttttagataagaactttatgagatgggggctgtacccattttacagattaggaaactgaggctcagagaagttaggtgatgtgcccaaagtggagtctgcacctgtctatactgaatacactcccaggttagaacctggaatttatgctaaccattggccatgtccctgtcctgagagaactcatccccaaaactgccacacctcagctgcacgtgtgtgtgctgccaatgtcctatccctgttcctacacgctcctaggcccgcctcaagagaccacaggaattctgatgaattaatctcatcactttatcgaggaggcacttaaaaaaattacaaagcaaggccgccagcctggctttgctggcagctagccgctggggccataaaataaattgaaaggaaccaaaataaacaaataattaggtctctctctctgacacacacacacacacacacacacacacacacacacacacacacaaacacacacacatgcatgcaggccaacccctaaagggtgaagagcctggttggggacttgctgttagcacttggtcctcttgtcctgggagagcaccagttccagctctgcacacacacttcctgactccttgctctgagcagcagcctgtggccttatccttcctcaaaaagtgacaggttggctgagcagctgagagcaaagcatgggaaaagtgaagagtgtgcaaagggtgtcccaggcagctggaggtgtgaagcccatggagagccctgtgagctcctggcacagtggctcagagcaggctggagctgacgggctgggtcccagtccttactgtcccataccctggattctgttcaccctctccttttttttttttttttttttttgagacagagtctcgctctgtcacccaggctggagtgcagtggcgcgatctcggctcactgctccctctggctcctgggttcaagcaatccttctgcctcagcctcccgactagctgggactacaggtgtgcaccaccacacctggctaagttttgtatttttagtagagacagggtttcaccatgttggccaggctggtcttgaactcctgacctcagatgatctgactgcctgggcctcccaaagtgctgggattacaggcgtgagccaccacacccagcccctctatcttacagatgagaaaaatctgtttacctccggggttgctgggaacatgaaatccttgggatctgtaaagcagagctgtggctgctccctgacaagcattcgccagtgtgagctccccgtgtgtgcgcattgagcggctgggtgtcccaggcagtgggactagagaggagctggagtaggtggaggaggcagacagatacaacacaggggacattaatgggttatcagcagggagaaggagcgcctccccatgtgggacctggagaaacagagggtggagggagcatagagagtctgttctaagctgcaaagcaaaggcctggcgacctaggagaccatggagttccagaaagtgatagttatgcagagcgaatggagggaatcagcacgctgaggctgcagagagagggtgggcctgggtgggaacgggccaaatcctccagcgccttctaagccaagataaaagcttgaatgaattagctttcatatgtgtttttctcctttctgtttgtcttttgaattttaccgggcttacatgaatattgaaattattccccaagaaaccacccaagccagaatgctctaagaaatagggctagacaaaagcaggtaggggtacacagaatcttcatcccttccccttcccatcgccttccatcctccagcacagagcatgacctccagctccctccctgcaagaaatgggatggggagaaaggtggtgcctgctggacttgagacagggagagagagggagagggggagagagggagatggggagagagggagggaggatagctagccttcacctgtagatctctgaggtgctccggaaatagttttcttcaccagtaaaaagggatgagaatactctctgagcctttgtgagtactcaatacagttaggcacattgagtaattttgctacctcaaagcactttgttaatggtagaacatggttcatgcttgtttccagaaaatccaatagaaaaggtttccatccatatcccatgtggggaggtggtgacacagggaagcccaaggccacccttctcccctactacccaccaggcgacctcagccgctgggtcagcaccaggcacctgtcctcagtggggcagcacttccaatttccccatcctccttgtgagatacagggtgggacaggagatctgtgtggccttgggtaacctgcttcagctcccagagcctcagtttcttggtctatgaaatgggacactgatgtgccttcagaggctgttgtgaggactgagggagctgtgcagactatgcacacagtaggtgcacaataaatcttagctgctattcctctgaagtgggtagggtttggtgtggaggattcagataggcaagcctccagctcctccctgctccctcaggaggtggggctggaacgagagatgtgttctagttgagagattctgttctggaaaaccctggctcaggctgacctcaagcactttgggacaggagtcgaagagacacaataccaaaacagtactgtgatgtgctgttcttcatttgtacgttccagttacatttttttttgagacggagttttgctcttgtcacccaggctggagtgcaatggcgcaatctcggctcactgcaacctccgcctcatgggttcaagtgattctcctgcctcagccttccgagtagctgtgattataggtgcccacccctatgcccaactaatttttttttgtatttttagtagagacagggtttcaccgtattggccaggctggtctcgaactccatacctcaggtgatccacctacctctgcctcccaaagtgctggattacaggcatgagccactgcgcccggccactccaattgcatttctttacctcccccacctgctctccccccatcgtctttccctccattaccaggcacattgtaggtgctcaatgcgtattcgttaataagagtcagcaggtcagatgcctgtattagaaaggcagtcacagcctctcctgactggactgtcaaccctcccaggaagagcgctggaaggtcagttcaacctaaataagacctctgtgttcacactgcatagaaacacttggaaaactcatctgtaaaatgggaatagtattagtacttattttctctttcatggaattgctattgggaggggagggactctgtagatcagtcattcactgcattctacctgcctgtctctatattgcgggggctgtgctaagtgctgctggacactggggagcagcccaaggtcttggcttcgtggggcctacagcttaaaagagcatgggttgggtttatggtagccattcttttgttttgttttgttttgttttgttttgttttgttttgttttgtttgagacagagtctcggtctgtcacccatgctggagtgaagtggcgtgatctcggctcactgcaacctctacctcccgggttcaagcaattctcctatctcagcctcccgagtagctgggattacaggcacatgccaccacacctggctaatttttttgtatttttagtagagacggcatttcaccatattggtcaggctggtctcgaactcctgacctcaggtgatccaccaacctcggcttcccaaagtgctgggattacaggcatgagccactgtacccggcctggtagccattcttataacccatgaaaggagtggcctgaaaaatttatcacagattccctccgctgaatgaactctgctcataaaatgaccccctcgcattgaatagtgtttaaagcagttgtccatatgtggtcttggttaattcttcatttagtagattatctcactgttttgaagatgaagaaatttcaacttggtcagaggaaagtatatcctcaaggttagcaaagccaggtggcctgggcccctccagtgggatgcagaacccgggccttgatcctggtggacgcagagtttccaggaggcttttcccacatgttggggtcccaggctggaggctggaggagcctgtggtggtggtggtggtggtggtggtagtggtggtctgcactaatgttctggtcagcatagggggcgttctcctcctggagtaaaaggccagcttagtgagttttgatgtccctgcccagaagtggcttcaacactgtgggtggccatcctctggagagtgtttccccaagtagctgcctggtccacccagacctgccacctggagtctccatatggaagagttcaaaatgttctgacaagcacctcagagcacctgctttgagaacactaggggggagtggcagctctggcaaattaaaatccccatccagccagccctgcgctggcaggtgggggccctgggcggccagcacccggcaaccctctctgtgtctggttgcagggaacattgagtacagctgcccggccaccaacgagtgcgagatcaccaaacggaggcgcaagtcctgccaggcctgccgcttcatgaaatgcctcaaagtggggatgctgaaggaaggtaagagaccccaccgagtcggggttcactgtgaggctctgcttgctggggagtttttgtcccctgtgagacacccacaagctgtggacctgtgtcccagggtgagacccagtctgagcgcccatctcctcccacaccctgccagcctgccacggcgcccgcatggctctcctcctttagggaggtgggaattggaatttcttcattaaggatccttccgaacccctgaccccacttgggccccagtgggcctggcactctgggaaggccctcctttaggggcaaatcccacgtctaccctaggaggggtaggcttaagaggctgttatatcacctagcaccctcaagggcttgggggtgaaaaggacagacacattaagtccgggaatgataaataatgttcccttcacctgtgaagaatggcatttgttttctggtgggtggacaggacatggctcttgccttgggaatgctgctcccttccttgttccctctcttcccatcctctcccttccctctcctttctctccctgcgtcctctgtctctagagctgtgctgtctaatatggcaaccaccagccacacgtggctcccgagtgctggtccaaacagaggtgtgctgagtgtacaacacatgcctgctttagaggacttaataggaccataaaaggcagtgtaaagtctggtggtgatccttttaaaaatgtgattgcatgcagaaaggctaatcttctggacatgttaaataaaacatattgtgaaattagcatcacatgcttctttgttttttttttttttttttggagacggagtcttgctctgtcacccaggctggagtgcagtggcgcaatctcggctcactgcaagctctgcctcctgggttcacgccattctcatgcctcagcctcccgagtagctgggactacaggcgcccgccacctcgcccggctaatttttttgtatttttagtagagacggggtttcacggtgttagccaggatggtctcgatttcctgacctcgtgatctgcccgtctcagcctcccaaagtgctgggattacaggtgtaagccaccgcacccggcctctttttatctattcgttaatgtgactactagaaaatttgaaatgacacgtagctctcattgggacaactgctccaggtctcctcttcctcactttctctactgatttgctcctttttttatattaaaatattattgatagaggcaaggtcttgccatgttgctcaggttggtctccaactcctgggctcaggcagtcctcccacctcagcctcctaaagtgctgggattacaggcatgagccactatgcccagccgatgttttcagtttgaggaaccttgttcagtaccattttggggatgggtcgtgagtgtatgtgtttccctgcttctccagcttccaaggggagccagtgaaaattcttagagatcaacttttaagctccgggcctggaatccttctagaagtgggaggaaacaggaaaagaggtgtgtgggggtgatcagaaggggctacagagagaacgaagggacaggtttggaatccagacccttcctggagggggaaggctaggagtgggcttctggaagcccagcccagccttgggagccccagggcactcctgctaccccctctcccagggccctctgaagataagggcccagacctaagacgctttgtcaatacaacttggaccatcatgtgctatagaaattggaccttccacttccgtttaccatttccaggtcccccacttcacctcagctcagcccagcacctgtatccataaaacagaagctcttgaagcaggccctcggcggcctttgtgtcgacatggcacactggcttttaaaatgctcctcattcggggcttcatttaacccctttgtgatggagtggaccactcagctcttagacaggccagctgcttcgttaggggctcaaccgaaaaaacagtctcctttccagattaaaaatgggctacatcgagcccgcagaaaggctgtctgttggttcatttttgactctatataattttggtcttgctcctggataggatgacccaaactagtggctgaactgggtcccctgactcctatgttgggccctttctgctccttcagagcctcctggtattcacagatgggaaaattgaggcaaaaggcccatagaagcatgcctgagtgctggtctcttgactttctctccgtgtggtgctgggaatctgagggtttctaagctttggagactcattcattcctcttaagcccaagagacagagctgcttgacctgttgttctcacatacagagctggatgtgagaacagcaggtcaagcagggggccaggggccacttggtcacagcgtgcagcctccctgcctacttgacagtatccgcggcacttagagcagccagaagcctcattgttttcaatatagccctgaattttacaggtgacaaaatggagccctacaggggctggggtgagatgactcctaccctcagtcacacattcatctgaggggagctgggcccagaggctggaactttccttgccctgttcagtgcctgctccccatggcacagcacagggatgggggaggtcgagagggaacctcccactcaattcctggaccatcttgtaacactgagcagagtctctttaggggctatgcagtgctgggaagagagaagggcactttctagtggcttcccagaaagcaggagatggtgaaggggtgcactgatggcagggagggaggtggtgaggcccacaattgaccggtggccactcagacatccagactggcacttgtcagagaaacgaggtggacactgtgtgtcccaggatgatggtatcgggggtgctgggaggacaggggcatgagacccctgctgcctcaagtggggaggatgttcaggggaagcctcagtgttgacacccctgccccgctgcaaatatagccctttggttgatggtctttacccagggtggcagctggggcctcccaggcagacatgctcggctcgaaaaggccctttaaggagttctgcctgaaggaggaagggacagccactagaacgctccctcccccactccccgccagtgctggcaggtccagatccaagagcggggagatgacacaaaggctcctgagtacggacaaagcagggagccacgtttagtttctgtcccctgcagggccttggagagatcctgggatctgaagctccgtggggaccgacccccttgggaggagcatcctccttcaacagcctgggcccctgccaggtgggggctcttggcagctgcctggcttggcttttgtttgggtgtccctcctggctctgcaggcaaggcccaggccccccaagaccagcgtgggctcatcgcccacctcagactctgacgggactctaaaaggcaaacttcaccttccccagggctgctctccgctttagggtcccatagtgggcctctgttgcttggggggctttgggggtccaggggcttggggagggctgcagacggagagatgtgggtgcctccgccctctctgctcccctcgcctgcacgtctgaacaccaccctcccgccctcatccagccacattctccttgtgttttatgatttttcctttcttaggtaaaataatcagagatcgtttcccagtttgggggcccagcaacagccacagaagaaatcagacttggggcttcctctggctctccctctctcttaagactgtggccagctcagggatctaagcttttcagattcctcacgtggctggggacagatcctatggccacgtccctgtgactttctccctggaacatccagagcagaccatggaaaacaggagctgtccaaaggcctatcttgctttaagcaaatctagtacataaaaatctgtattttcagagaaaaggtaatttttctcttttaaaaactgaacacaaaatctgggttaggagttgatggcctgtgttctgcccctggttattaggtatttttgcccgtgtaattttttttttttcttttgagaaagacaaaaaaaagcctcactctgtcgccaggctggagtgcagtggcgcgatctaggctcaccacaccctccacctcccgggttcaagcaattctcctgcttcagtctcctgggtagctgagactacaagtgtgcaacaccacgcccagctaatttttgtatttttagtagagatggggtttcaccatgttggccaggatggtctcagtctcaaccttgtgatctgcccgcctcagcctcccaaagtgctgggattacaggcgtgagccactgcccccagctgctgtttaatattattactcacgcccacctgcttccatttcttcactgtaaaacggggatgttgatacctgctttccttcaccaggtcaaagtggggacctgggacagatgggacagctcctcttggcagaatccactatgggattgctttgcaatgtcagctcccttgatgcgttaaaatactccagtgttggattcaggctgggtgcggtggctcatgcctgtaatcccagcacttggggaggccaaggtgggcagatcacctgaggtcaggagttcgagaccagcctggccaacatggtaaaatgccttctctactaaaaatacaaaaattagctgggcgtggtggcacgcgcatgtaatcccagctactctggaaactgaggcaggagcattgcttgaacccaggaggcagaggttgcagtgagctgagattgtgtcactgcattccagcctgggcgacagtgcaagcctctgtctcaaaaaaaaaaaaaaaaaaaaaattctagtgtttgattcaaagacaacctcatttacactcagcttttcatcagtctgccccttgtgtttggggaggcagactggtgtctggccaccctgattttcttcctagatttgttggtgggaatcttaaaagacggccttgtcttgggctggtccccactgtgggttctagaatcaggatgggcagctcccctggtagtcagcctttgcagcctggctagggtgtggactgactctggaaaaccactagctgcatttcctaaggggctccccgaggcctcagtacagctctgggatatcagcaattctctctagacagcctgtccccgccaacttcacctcctcctcacctcacctccctcacgcgaccggcctcccaagcccgctccatttctcccccactcagcccctgcctgcctttccccaagtgttttctaaaagatatttgatttcagtgaaagctgggccgacatccatgcaatatgctctcacttgctttgtgcttgttgggaaggtggagggctcctccggggattctgggtaattgtgttagtggccagctcatgtcaggaaattaaaaggaggccctgatcaggttcccactgcatgggatttaatggccttgtatttatagagtattctgcctctagcccatgccagaaatatcactttttttctggccctgtgaatgaagaaagagcaagagagatgacttgcctttaaaaattctttttcttttccaaaatatattagtgttttgaaacaaaccaactctttaccactttatagaatggtattgagctacagcctgagaatgccaatgtgtgttgcatccctttcgagccactttacattctacacacactgccccccccccaacaccaccaccccccaaacacgcacacacacacatacctgacagctcacaggatcttcccaggcaccctgaagcctttgggccactcagccacaatgacctctggttggagaagtgttgattgaatgaagacgaaggagatgatcttgtctgtgctaaatcgttcttactgttccctgcaggcttttggataacggtacggtggtcacgtaggcctggttaaacctcatcttcaccacttatcgactccttgggccagttacttaaacccctgtaagcctccctttcctcctccataaaatgggaatcataatagtgcctatcttcatcttgctcccaatcttcagggaaagctcctagagttatactgtgaagtctgattgttgattggagatagatattcttcatgtacaaaatggatattcttctgtgatccagaggcaattttgaatctcctgtagcctcactccctactcttgtaatcttgcttcacattttcatgaaaaaatagaaagtcaaatgggacacatcttaccctcctaccattgaatccacaaacctaccagtttgtgcacctgttttctgccttcttcttggtagaatagaggtattcccaatcctgacaaacgctggtccccctcctgcccttctgtgctctgaatcgctctcttctttaccaaggacttcattcctttatttatttttttttctgagatggagtctcgctctgttgccctggctggactgcagtggtgccatctctgttcactgcaacctctgcctcccaggttcaagcgattctcctgcctcaacttcccaagtagctgagattataggcatgcgccaccatgcccagctaagtttttgtatttttagtagagacagggtttcaccatgttggtcaggctgttcgtgaactcctgacctcaaatgatctgcccgcctcagcctccccaagtgctgggattgcaggagtgagctaccatgcccaaccccttaccaaggacttcattcctatagtatcttctctgcttccagcatcatcgaattctctctcactactggatcatttcattagcacacaagtacacttctgttctcccattatgaagacaaaattaaatttattttttaacttttaaaaaatgttaaaaaaattttttttcacattaaaaaaagagacaggctggtctcaaactcttgggctcaagcaatcaacccaccttagcccctcaaaatgctgggatgacaggggtgggtcaccacgcccagccaaaaacaaaattaaatttaaaaaaatccacaactatattttgtcccttcatctccatctagatattgctacctgatcccactgtctttctcaacaaaacctcctaaaggaattgacagcacttgctatgttcattttcttgtcccattcacccctttctttaaaaaaacttctttaaaaagtaaacattgaatagatccagaaatacacttataatatagtacattaggtaaagactaggctgtgttttttgttgttttttttttttttctttttttttttttttttttttgagacagagtcttgctctgtcacccaggctggagtgcaatggcacaatcttggctcactgcaacccctgcctcccaggttcaagagattctcctgcctcagcctcctgagtagctgctattacaggcatgcatcaccacgcctggttaattttttgtaattttagtagagatggggtttcaccatgttggcccaggctagtcttgaactcctgacctcaggtgatccacctgccttggcctcccaaagtgttgggattataggcatgagctactgctccaggccacgctaggcttctaaaagaaggagactccctttttccctccacaaaccaaaccaaaccccaaaaccacccagaagcctaagcaggatagcagtttcattcccgctcatttcttacataacagtcagaaggtcacaggcaatcccagactggctggcagctctgccaagcttagcatgtggcttgcccttgtggaccccagttcttcccatctcacagacatctagaaggaggaaaagctccatgtgaagggctggaccctaagtagcacacatctgttcttcccactcacagcccagggccacacttttctgccagggagtcttggaattgtagccattatctgggacgctgtgtacccagctaaaacgttgttggtatggaaaaagggaatgacatattttcaaatacaagtattgtttttttgtggggattttgttattgttgctgtttttaaagagacaaggtattgctctgtggcccaggctggagtgcagtgacatgatcatagctcactgtaacctcaaactattgggctcaagagatcctccccacctcagcctcctaagtagctggtctacaggcatgtgccaacatgtggggctaatttaaaaaattttttttgtagagacaaaggtcttgcttatattgcccaggctggtctcgaacccctggcataaagcaaccctcctgcttcagcctcccaaattcttccctagatattttagacctgaatatctaaccacactattggcattgccacttgtgtcctttatgagacatcacagattaaacatgtctagagaggaactctaggtttgaaccattcctccttctattgcttccagtctttcccatctcaggaatggtgatgctagtcacctattgctcaaaagaaacctggaggtcatccttgactcctcccaggtcaatgtccaaaatgtatttcagattctcctacttttcttcatctccatggtcatgaccctggtccaaggaagcattgttttttcctggaccactgtggcagtttcctaactggacttctgattccactcttagtcctgtttaatccccctagcagtgatcttgttaaagcactggtaagattctgtcattttgctttacatcactcagtggctctccatagcacttaaaatacaatccaaacactttgctttggtcttcaagaccttgcatggtctacccactccctacctcttcagtatcatctcataccattcctttcctgtctgttcactcctacccactctgctccagcctccctggcttatttttgaccctcaagcatgacaaactgtttcccatcttaggactttcagggccttccctctgcctggaatcctctccccaaagctggctccttcttatccttccgacctcaagttaaatgttatcttctcagaaaggcctccctatccactctattacttgctgtcatatccccttgtatgcttcttcattgaacttctttcagtctgacattatcttatttatttatttatttgcagacgtgtttgcactggctgcctctaacacagttgttcttaattcaggctccaggatggcaagttgcctttagttgcactcagctggagtgcatgattgaaaggcttcttaggcagtgtctgggatcagcaggtaagagtgccatgattgattagcaatgtctgccacagactaagaaatggaaggcaggggcacaggtgataagtctttgccatgcctgatctggtcaactgagtttcagcgatttgaccaaggccagacagctagttaatgacagagctgggtggaatctagtctccttggctatgtggaattccttctaagaagcctattcgaacctcacggttgatgccttggccagtagtgaagcctgtagccctttctcaaaggggaaaaaagaaaggaacggaaagggaagctgggctgaaataacttctctgtgtcaggcgtacagttttggagacttcttggcagttgggaatgcaggcgtaacacagttttgtcaaaatgcccttggggacatggtggcatggtaagaagtgtctagaggagcccagcatgatagcagacactcctttaataggcagaattctgagagctcatcactcactaacacttatccaccacagtgcccggagcccacagagcagctggcaaaagccctggaatattaggtgtcatgtatgtctgtttagctacaaggctctctctcttagcttttaggaagtcaggtgtgaggcactctgcctttacggtgtgtcactggggtaagaggcagcccaaatgagccattgtgtctgaggcagcaaggcaagcttgcctgtcacccagaaacccgcacaggacaggtggctgaaggaagtccagtgtatacaagggttgtggctgagagttcagggcattgcactgggctggaatgcccatcagcatgcccacacaacttccagaacctcaggggctcatgatacccacatcaccttctgggtggttttctcctcctcctggagatgggtcagctatagtttggtagaacctacaggcagggagttcacccccaagtttcctgggaagaacactggccacataaaagtattgaaaaaacgggtttagcacagtgctccccagacctggcacataattagaattagtagaggagctttggaaaaatactcattcctcgacatctccctagacctactgactcagagcctctaaatgagtaagtcctcaaagtctgtgccgttcaaaggcttcctagggcattctgaggttatatgggactggcgtcacaagtttagggcaaagaagataggacttggagatctgaaaatcaaggttcaaaatttccctgtgacgtttcttggatgtgtgatcctgaacgagtcgcctgacctttctgagcttcagatcttgcatggaactaatcataatcatgtatattcttcctcctcaacattgttgggcagcttaaatgagatacgggtatgaaatagatttgtaaaccatgaagctgcttatttcgttaataaaccagggatgttgaatttggtgatgggggaaagttctggataaggggaagagaagggtgttggtcatgaaaaccttgcaatgccagtggggatcttgacctcagacctggatagtagctgatgggagggcagaggcctttccctcgcctgccctgtctgaacctttcctgttggaagagaaatatgatgtgggaagcgcctgggacaggcttagggccaggtgcagggccacgctttgcagagctttagccggctatttttagtgcccgggtgtaaaagaaagaagcttaaagtggccccgctgcggctgaccctgcacactcggctatttttacttccgaaagactgggatcttgtccagcttaggcagggaagatgagaagaaaggagggaggtggagggaagaaggaattattttacttccattaagaaaaatgtcagaaacctgatcttatcaagtcagcaagtgggtatccaatcccggatgtgtaaggtgccggctgtggacgctgtgacgtgcctgcagtggattggagaggccagcagagggggagccccgctcccctcctctcaaggagtttctgtcccagagtggccccgaagcttctttgctattttttgtgccctgagctgggaagtgggcttggcccccacaggcacgaggggcaccagcctggtgacgaggccggtggaggtgggagcagttatgactgcagccaagggtggaacctctgttctcaagttggacaaaggcagccatcagacccactggcatattccagagagtcccagtgttggggctgtgtgccctgggcacaatatttaacctctctgaaccttaatttcttcagggattttgtttaatacatctgactgacagtagttacaactgtggggatgtgtttctctcttccatgaggaaggcagttcaagccagactctatgaccttcaacaggcagatgaaaggcaagaagttactactgagtgcctactgtgtaccaagcactctgttacgtttcaatattttatgttgttaattccactaacctgagaaaggatacatatttttaaaaaattttaacagctttattgaaatatagttcacccatttaaagtatacagtttgatagcgttttgtattcctatatttgtaaattgtggcaaaatatacgtcaagtacaacttggcattttagaaattaagtgtacaattcagtgacatcaaacacattcacaatattatgcaatcaccggccatgtactgtggctcatgcctgtaatcccagtatttcgggaggctgaagagggtggattgcttaagctcaggagtttgagactagcctggccaacatggtgaaaccctatctctacaaaatatacaaaaattagccaggtgtggtggcatgtacccataatcccggctattcaggaggccgaggcaggaggatcacttgagtccaggatcgtgccactgcactctagcctgggtgacaaactgcgaccctgtctcaaacaaaacaaaacaaaacaaaacaaaacaaaacaaaccattatgtaatcaccatcagaccaggagttcaagtccagcctgggcaacatagtgagatcccccatctaccaaaaaaaaaaagaaaggagggggccaggcacagtggttcatacctgtaatcccagcactttgggaggctgaggcagaaggatcgcttgaggtcaggagttcgagaccagcctgggcaacatagtgagacccccatctttgcaaaaaaatttttaaaaaattatctgggtgtcatggcatgtgcctatggtcccagctacgtgggaggctgaggtggaaagatctcttgaggctgggaggtcaaggatgcagagagccagcctggcctatagagtgagaccctgtctcttaaaaaaaaatggggtgtggtggtgtacacttgtagtcccagctcctggagaggctgaggcaggaggatcactggagcccagtagtttgaggttgcagcgagctgtgatggactcactgcactgcagcctgggcaacagaggaagaccttgcctcgaaaaaaaaaaaaaagaaagaaagaaaaagtggaatcacataatatttgtcctttggtgtccttttggtttattttccttagcgtagtgtttttaaagtgcattcatgttatagcatatatcagaactttattcctttctatgactaagtaacatttcatgtatataccacatttgcttctccactcatctatccacggacacttgggttgtttccaccttttggccattgtgattatgctgcagtgaacattgtcctacaggcgtctgttcaaattccttctttttattttttaaaaatttgcttcttttccccacactacacagatgtatgttcagatttctcttttcagtttttttgggggtgtatacctaagagtgggattgctgaatcatatggtaattctgtctagctttttgaggaaccatcaaactatgttctacatggttacaccattttacttttccagcagcattgttttttaagtttttaattaaacttcttattttgagataattgcagattcacatgcagttgtaagaaataatacagagagatgccatgcatcgcttacccagtttcccctaatggtaacatcttaaaaaactacagtacaatatcacaaccaggatattgacattgatacagtcaattgacattgatatggtcaagatgcagaaaatctttaagagtgaagtgggtttttttttttattaattttttttttagatggagtctcactctgttgcccaggctggagtgaaatggtgtgatctcaactcaagatctccgtctgcacagggtcatgtattccagggattatcaatttttttctattcatggagcactcagaaatattaaaattttgacctgtacacattaagggattaaacggtgttaatggtggttaaaacaaaggatctgtatttattgcagtatttggaaatatgtgacactttacatttgagcattattaatgcttttttgcattcagaaaattatcaataagatgataaaatctaataatcctagacagtaattgtaagttaattagtattttaatgtgtttcctgagtctacttttagatattttactaatgtaaggacacaaacaataaggcaactctcatttcaagttcaagtcttcttgtttatttccagttagtgtttgtaagtcttaagcatcctaattttaaaagtaattgcccattgtatcagtcagtgaaaattgctttctgctgcaagttacggagaacctgatagctagcagcgtaagcatggataaatgaagttggtttttccaccttacaagaagcctggagatgcgcagctgctgtattgcacaaagttctcagccatggcggcaggggcgctccagctctttctttcttctctggtgttctttggtgtcctcagacagccatgtcatggctgcaaggtcgttgccacacctgtaggcttcaccttccaggctggggcaagagaaaggcaaaagagctgcactgaacatggctgtcccttttctcagaaaagcaaaaccgttccagaagtcctgccatggacttaacctgacatcccattgccgtggtggcacgcacctgtggtcccagctactcgagaggctgaggcatgagaatggcttgaacctgggaggcggaggttgcagtgagccgagatcacaccactgcagtccggcctgggccacagagtgagagtctgtctcaaaaacagtaaaaaaaggagaaggccgcttcactttggtggggttccatcttccccaaccccaggctaggggtgcacaggtctgtgtcacaggaccctcccactctaaatggccctagcaagtcctgagtgtgaggcagtgccagagcaggggagaaatagagcaagccagggtcctgtcctctaagaacccatcgaatcgaagagctgatgggtataaagggaaaccagcatgaggtggcctgtgaggtatcagatgaatgttgaagtgctatgggttggcaggagggtggtagaagagatggcctcacccagcctactggaactgctttccagcttaccaagcattttctcatcattaagtcatacaattgtcacaaaagccatctaccttgagcagagttggttttaccatcgcctccttccccagacctgaagatgcagctgaagcccacttgtccaaggccaaataacctgaaataacccgtaagggacagagatgggcatgggaccttcattatcgagcccatgggctgcagtgattgtgggctgtgcttagggcaggctcagaagagcagacaggaagcaaggggaacagacacatttcacatcaggtgtcagtttgtgcataattaaacccaacaggctactgtttttttaacagcgtaatctgataattgatacacgtattgattggagccattgaccactatgctgtaaagatcaggaggagaaaatttagaggagaatttaacatttgctgtgcgctgggaggtcataccatggaatggcaaaaagcttgggtcttttattggggaaatcactgaatctctctgagcctcagtttttcttatttgtaaaatgaggataatagcacctgccttatatttttgtgggttaagtagggtaatacatacagagagtcctttacaaattatgctgttatcattatcattattcatgtgatttaccaaaaacttggatgcaatgctggggaacagtaataataaggatgatgataataaccataataatcccattttctaagcacatgctgcatcttgggtaccatgacagactttggggcaggactgtgagccgcccctggccttaacgggtgcctagtcagtaggggaagcccagtgtgctctgggagcccatgaagaagcccccagcctggcatggggatgaggaggacagaggtacatccacccctgtattcatcaagtctttcctgaacatccatgaaaggtcaggccctatatcaggacacagaacatcccagatggagacatcggcagaggtggcagctgcccatctccttgccttgccgagggacagacacctctttttattttgtgttgagcatgcctcactctgattgacagctgcttgccgggaagcaggctggatgggaagcgagagttcattccagtggtatctaggagagaaggtcagtaaagtggggaaggggcttgtcctggactcaaggagagtatatgtttaagatcctggcatatagtaggtgctcagtaagtgggggcccttactgtctcttatggatgaggtggaccgttttcactttcggtcctgtcaccattccaaggggaagcagaacttggtggagggtttggtttggcctgggtatagtgaacagaggaggcttctatgtagacatgtcacaggatagagtcagaaagcttttctagacagggaacttttcccaaaagacttttacaggaagaatcatccttcctgtgtttgtgtctgctccttatgctgtcactgaaggggcttgcagggggtgagggagcaaatgtgagccaaagtgctagcagcacataggttcaggtctggagctggatggcatctagctgtccctttagggtccaaggtacaggcagaagttgatggtacagctgcgtttgctaggatgccttagtgcagtgctcctcaaactctgttgtccgtgcaaatcaccttgtctgattcctctgtggccaggcctgagattttgaggcatctaacaagcctcaaatgatggtgatgatgctggcctgcagaccacacttgaggaggaagacagcggagactgctcctgcccacacctactcagcactgtctgtttgtgtgtgtgtgtgtgtacgtgtgcatgcgtgcgtgtgtgtgtgtgtgctgatctgacgcctaggctttctttggccaccagagtctgctcagcctggacctgggaggcaggcaagaagcgccaaagcagccggtagctgggagcctcagttgcccacagcagtactgtcctcaggaacacatttgttattggctttcttccctccttggaaactgctcgcatgcacagccttgtctcagattctgctcctggagaagtcaacaacaaatgtcagttacaaaacctgaccttctaggcagaaggggagtttattggaagcctatcaggaggttcaaagagtacatttagaaaccagacaagaaccaggagaatccctggagagcccaggagcaggaaacccagtagccaggacatactggccaggggctgcctacactctgctggggaggcgctgctggtctgatcagtcctcaccttcgctctgtccttgtgcctccgtttgatggtgcacttggctgagcctgtgtcacgggtccatgccttgacctccagagagcagagagaaggagaacatgtacttctcagatatccattgaggggtgggacacagacttccaacagtttccgtattcccaataggggaattacattttttaaattttcttttgagatggagtctcactctgttactcaggctggagtgcagtggtgcaatctcagctcactgcaacctccacctcctgggttcaagcgatccttgtgcctcagccacccgagtagctggaattacaggcacgtgccaccacacctggctaatttttgtatttttggtagagatggggtttcgccatggtagctaggctgatcttgaactcctgacctcaagggctacggcctcccaaagtgctgggattacaggggtgagccaccgcacctgaccaggggaattacctttaaacaggaagcctgggtgggctgctgagtagactccccctctccccgactaaaaaacgtttagcaccaggtacaaatacaccaggttgtggggttgaaaaagacattgctgacaaaaatgaggagttgtgggctcactcagtgaactcacagcatccttgccctccagggctggagtcctgaactgaaaacacctggggcagcagaggggtggggggtagtgtccttagcatcccaaagttcctttagggcaatgtgcacttaaaggagttttctccactcattcagtaaacaaagtaattttgctttcagttgctctaggaaacttccttcttctcagggactgaaatttagtagctgaacatcctaacaaagaaacagccagaaaatagccccaggcatgaatgggctctaaatcatcattccattaagtaaccattgttctgacttccccttgcctgttctggagaaaggcctgaatccgggggactggcagccaacactctggggctgaaggatggacaaggctgggacaggaaggaagattctgtttcttctgctccccatctaggaagtaccagagtttattagaaaagggaaagggccctgaaggtcaactgactggggctctgtgagggtgatactcactgcctttggggaaaagaacagaagttgaacctggcctgtcgcagcagaggctgaggtggcaacccagctttcttctctgaggactctggtctccgtgtctgacttcttgtgtgtttcagtcaaggcccatttcatgatcaggaaaagggagctgttcagtgagctcaaggtaaggactccaagaaggaacgttgtctgaggctggcctggaagagccacagcaagaaggcagaagtggcttccaggccccacagggccccagcaccatgcttggggcacctgctctctggtgctttttgtgttggttcatactttgtaaccaatttgttgggattcatccttgcaggccaggccacatcagtgggtagccagtctgagctgtgtgtccacctgaggccctgtgccttcgatctgctggtggggggcatgaaatggtaccaatgtgtctgtccaggcagcaggagctgtgggtgaggcaggcttccggaaggcaagttggattcagtgacaatgacagatctctccagggtaaactctcactcctggaagtggctgtctacgtggagtagccacagctgcttttgaacctactttcaagatatttccaggcactgattttccagtccagaggtggccagcccaactgttgcattcccatcccctggggacttgtgtaaagacagactctagagctttatgctagaacctcagagagtggggtctagaaattgacatttgtaatgagcgcctcctcagatgcttcttgtgtgaaaagtctgaaaacccttgaagtgcctgtgaatgaccgggattcctttcttttgttggcaagttaaccctccctggattcaaagcagatctaacataatgtgacttcttccgccaacacttggtagagtgcctttgttgacataaggagaaccaagggctgagggttgcttgggatgaatttcagaaggatgctgaatccagagagacaggaccaggcctggggcaacgggatgcgccattactgttagacaattattttaggattgtccagccacctggcctgaggctggccgtggggcagctgtcgaaggtcatccgagcaaggccctgaaggacccagccagtgctgaaattccaaagtcagtgcttctaccctggtgatgttgaacaactgctgagatcttttccctttcctccccaataggtgtgcgccttgatcgagtgcgtggaggccgtcagaaatacaagcgacggctggactcagagagcagcccatacctgagcttacaaatttctccacctgctaaaaagccatgtgagtgtcagggcagtccctgccccttttgccagcatctgtacctggaacatcaggcatcccttagggaaacatcatcttcccaccactgggtcatgagacaatgtggatcttggggaggtgacatcagtgcctggcacatttagaatgtggctccaaatgaagcatggtcctgacaagccacgggccccaatgtccagaacatgctccccttgccacccacccaaagttgctctgcaggttcctcctggagaattcgtcaggcaacttcccttggagggatatttctcaacagcccagatcaccactaccagcaacttcatggagccagaacaggaggggagattatagccgctttgaccttcctggagctcttaggaacccaactttgcttcctgacccatctgagcctccaccccggcccctttcctcttttcccagcatttacctttccctctttggttgttgcagtgaccaagattgtctcatacctactggtggctgagccggacaagctctatgccatgcctccccctggtatgcctgagggggacatcaaggccctgaccactctctgtgacctggcagaccgagagcttgtggtcatcattggctgggccaagcacatcccaggtgagcatgtgggaccaggggagagtgtggccagggactctcagccggtatctccgcagcctacccaatggctgtgcttctgatgcccggatcctggaccccagaaggcctgtgaaatcctggcaggcctgtttctctgagctcctcttctctccttgtagcattggagaggaacaggtagttagaagacccagtgaggcttatacactgctgcaggctcttcagaattagttatcattcgaggcggggccatgtttggatctacaatcagtgtaatattcaaagaacaagttccttgagcccttaaagggcaaagagtagggttttcttgtagaccttattggaaggatgccagaaaacaacagaagaaagactgaccctctcttcctattggaggcagcagaatggagcagtgaagagcatggccttgggaatcagatcgggattccaattctgggtctgcagcttactagctgagtaaccctaggtaggccacctgacctctctgtcaaatgggaatacaagagtcccccactttgtgagctttgatgtgagcatgaaatgagatcctgtgtgtgaagtgttcggcacagtgtctggcatgtgctggcatcagttgcatgcccactattgccattcgcctgatctctaagggaggcctgtctctggattggcttctgagattttaagggcctttctggtgcggaaagtgtgtgttccatgtttcaggctgtgtggacttctcttcgctgtgtgtggacccaaaccctgctttcaccctctctaggtctgggcagatggcgggagcttttttatttttgtagacaccaacacccatgtattctacattacatacacattgggggcctttctctgtgcaatttattcctcaactcctttaagactctaataagttgactcagagtgtggtagaaacatccttttatccttctggtaatgacccaccatgaacatgggacaagtcagcttcctgtctgtagatccgtttttggtttgtcatggctctgaaaggtgattacagcagacgatacagcaaaggtgacctagactttagataccaagacccacagttgtttgtttgtttgttttttgagacagagtcttgctctgttacccaggctggagtgtaatggcgcgatctcggctcactgcaaccttcgccccccaggttcaagtgattctcgggcctcagcctccccagtagctgggattacaggtgcctgccaccacacccagctaatttttttgtatttttagtagagacggggttttgccatgttggccaagctggtctcgaactcctgccctcaagtgatttgcgcacctcagcctcccaaagtgctgggattataggcaagagccaccatgtctggcccaaggcccacagttgattgagagaataaaaaatgtccttccatgtgagaccttacatgcccaagttgcaggaaggagccttcctgtggacagggacgcacagagacatcagatggcccagaggctctgctggcagggactgcctggtggcccctgggcattctgaccagggatctgggctggtacgcccttactaaggagctcaacctctcggggattacacactcagtagtttttgaatctgcccagtgctggttcagcacagatgtggggtcaggccactgcttaagacacttcagcctggattgctccactaacccagggccaaattgggtacaggtacccctgcccccgccccacactcctgttccaggttgaacagatcctgcatcctagcaatggctcacgagtggcgcctggtggtcccctgggtcaatgcttccttcttccacaaccccacccctgcaacaccacggaggaagtagataagaccaggagaccctgtctcccctgcactcatttttctctgtgcctttccacctcccagctccatctcccatctgtgaccaaccaagagggcatggctagagcagagtgagtgctaaaggcatagactttggaatcaggcagcctgggctttcatctcagctctgtccttactggccttatgcaagatactgaatttttcggagcttcagtgtccttgtctgtaaaatgggaatcacgatagagccccttcacgggattgctgtgaggatgtagcgcgcttagtgtgtacaccgggtgaatggcagagacgcttaccagcgctgttgtagttgctaatagtaataaaagcctcctttcatggcttcatttatccttgtccaaagccggattctttttggtaaaaaaataaaataaaataaaaacgggctcagttgtccatcttaaatgctaatttgcctattttgcataaatctgcatgctgaattctttgcctcctgaccttccagtgtttaaggtaaaattaattagtggagtctcctgccactgcatgtaaactcatactaagggcaatgacacaatcaaatgcctgattttttttttttttttttttttttgagatggagtctccgctctcttgcctaggctggagtgcagtggtgcgatctcggctcactgcaatctcctcccaggttcaagcgattctcttgcctcagcctcccaagtagctgggactacaggcacgtgccaccacccctggctaatttttttttctatctttagtaaagatggggtttcaccatgttggccaggctggtctcaaactcctgacctcaagggatccacccacctcagcctcccaaagtgctgggattataggcgtgagccaccgtgcctggccaggtgcctgatatttttaaactaatcaacttaatcccatctcagattagatggaaaatgcatctgaagatgggctccctatccctgagagagagagagagagagagagagagagagagaaagaaagagagagagagagagagctggttgagtagggaggataaaagctggggcccaccctggggcctgtgttggctccagtccatctagttcctgcacagacagaaagagggggactggccactgcaggctgctcaggagtagagctctgaagaatttaggccagtgtccttaaacgcaaggtaccgcatctcacgagagggcattgcacacttagctttgcatgcacatattgagaagtcactacacatgaggtcccctgataggagttgtggctgagacaaggaatttattttgccccaaggatcccatttggaacaaggctgacatccagggggagcttggttcactcagaatcccagccattgttcaagtcagtctgacattgtcctaccccaaatgcaggttttttaccttgagttgaatgttccaagtattgggttccccatagggcaagcccaagtcttcagagtgtccatttcttattccatgagatcaagagctagctgactttaataggcagtggggaatcacttgatgaattgcagcctcctccaaatgacccgagcctgccatcctgcctccctcggcagcctcatgcctgtgccagccaggaaagcctgcccagggagtttccaccaccctgccctgcccaggctcccatgtgcagggcatccccagaggcctcctcacaaaagtccctcagcggcactgctcccaggtagcccccatctgactcaatgaaatatgagctgccgagtgacagcagctgtgtctgaagtggccccagatcctataattacatctccctttattacctctgctaatggccctccaggtcgacagaaacgatcataaattaacagattatgaactccacttgccacaaattacgtgctttttttttttcccccttcaattctaggagcttgtggtgccaaatcacggatggggggatggggagcttggggagagcctgaatgttattagatgagttggtgcagataaaacaattttcctggggcagcagagctccaagtgggagcatgaggagccagaagctctgggcaggcccgagagccttgatgaggcagtgctgcctgcagtgagcccggcacagggacacccctgcactcccaggggcacggggcacccccagaccctcccggtagcctcttcaggggcctcttggtcccagagttactaataacttgagaatgagacccagcccagctgagagaggcaggggtggaagcgctttactgaagggcagggaggagtgcctgggctccttctgggttttaaataaaagaatctgtggttttagtaaagatatcagatgggacagatgggtcgaaattaagagttccaaattccccatcctaaccttccttctgggaatttcctgggcagatacaaccactgtgtgaggtgtgtgtgtgggtgggggttgtgtatgtcccccagtccatgggcttataccataacactgctttacacctgctttttccatttaattatacaaaatagtagcacttacctggcaaagcagggttctaagtgttccacatgtcagctcatgtaatctgaacaaccccatgaggtgagtgctgttatgatttccattttacagaagaggaaaccgaggcactgagaggcagacttgccagggtcacagctagtgaacagcagagttaggaagctgatctctgtgctcatacgattacaccctttttgcccccttggctgtctttccacgtccacacagagttctaacttatttggcacattcatttaactaaaaattacatctatgtaataatcacatgtattacattagttacctttttttttttctattttgaatcatttcaagcagtgatctaatacccttttacatttatctctatgtctttattcatacttttctttctaggataaatttctttttttttctttttgagccaggatctcgctttgtcacccaggctggaatgcagtggcatgatcttggctcactggagctttgaccacctgggttcaagcgatcctcctgctgtagcctcccaagtagcagagatcacaggcatgcaccaccatgtccggctaatttttaaattatttgtagagatggtgttttgccatgttgcccaggctggcattacactcctgggctcatgtgatcctcccacctcagcccccaaagttctgggattacaggcgtgagccaccgtgcctggccactaggagaaatttctagcagtagaattgctaggttgaagggagcatgccttttattttatttttaatttaattatatttatgacttacttttatttttaagcatcttaagcactgactgggttcagaagccaaatgtagacacaaatgtatgtaacagaagtctcacctctatccctgtcccctcccattccgacctcctaaaagtcaccactttttctttctcaattttccttctggtgtttctttttgcaaatactagaaaagattcagatgttaaaagatgtcaaatatctccccctcccttccttgcacaaaatgaagaaggctgtatcaccaattcagcgccttggagtatacctttggattatcaaagctattttcagggctttttgaaaatgttcagggaggaagagagtgatcaggggctgagtccagaactcgaagcagcctatcagaggtttgggaacaggcctcccgggtacatcctcccatggcagcacaaaactttccaagtccagtctccctcccaccacccaagggcagggcctgactcctacaagataggcaaaggcagctaaccctgaacctgagtccaaagatcttagagggtctaaccaagtactgtgggcacattttcttgtctcctgggagtcaaagcctgtggcatttgtccattctctctctccttttagctgcaaagttttgtcgggcagcttctttgctgtgcccagtcgtgggggtggggaaggaacagctcagtgtctgtgcaccctgggaactcagagctgggatgggccatccaggggcacctgggcatgtgcctcatcaaaggtgccctcaccaccctgcttgacagctcagccctcaaggctccccttccacaaagcctccccagactcttgtttggcccaccttccccagtgcgtgctctcagggccctgcatttgctgtagctcttcttatattgcaactttgtgctgacttgtgccccttggtgtgtgtcttccccttcactgtaaaccgttgaaggcagggagcagttctggactgagcacaccattctgtccccggtgcctagcacaggcctggcacttagtaggtgctctgtaagtttttgctgaatgtctcaaagggcagaaaagcattctagtaacatcctaatgattgtacctgcaggattcactgcacaggggacttttcccctgcgtttccagaagcctagtccttacctcatcctctctctccaccaccttccaattcagttgtctgctaatttcacccctgccctcctcctccatctcccctccagtctgtctgcttttagaccccctccctagagctgtccaacactccccccaacacactctccggtgctggctgattggtatctgttaattaatgttgcccaaggcctctctcctactcaaagacctgataagggaaattggatgtccatttctatctatcttttattacctcccagctcccccggccaccacaggcagccacacaccctctcccatgcagggaatctggacaaccacacacacacacacacacacacacacacacacaccctgatcccctgtcacagcctctcccctgagaaggtgcatcaatcaaagctcccccgtgtcagtcggtgtaatcactcctgctcttttgttgatcacccatggattccattagccagtggtgatctgaggcccaagttgtatagatcagtcttgggaactgtgataattcacttggagaatgctcacagggtaagggtggtctgcctggtcagggaccttcagctccaggagtgacccctaaggttcaactgccatgccctgtgtggaagccagggaagaagtggcatttggagacaggacagcagatggatgggggagaccacacaagccaaagagctgggtggtccagaagctcaggaccacccaggcctccaggcaagtccagagaggagaagtgagtgatgccaatggtgtgccaacaacaacaacaatatttagtaacaacagccacagccatgaccagcaccctagcatgttgagtgctgatggcgccgggagaggtgcccagcactgtacatgcatcttctcttttcgcccccacagcaccccacatcagaaagtggcttccagccaaggatggggtctaagtcagcaaatgaagtagaaagtccttcctaggcaaaattacccctgaaaaaaatcccttcatgtcagttacccatagtgcatggtgcaaacaactttgtggatgcccttccttctttgaataaatccagcatgtccgtgttagaaccaatcactgagtttctgtttgaatctccagtgaagttactgccttgtgtttggtggttaagatgcttgaaaatcagctgacttatttatttacttactctctcttactctcctataaatcaagatgttaattgactttgcctaatttaagtgcatgtataatgcaattccagtacattatcattgttctgcagtgagaactttcatctcatcattagtaataatagctcagtaaatactttgtatattctggaatcatcgtctcatttagacctcacagcaactctctgaagtagaccctactattatactatttcctagatgaggaagctaaggtttggagaagttgcatggttttcacaagttcagcctacagctagtaagcgggagtcagggttcaacccaggcaatccccacagttcactgggcaagacagtgtcacagttctggagccttctccatgcccaactttattttcactgtggaatcagcctcctcaaatagcagggaggggggaactagcatgattccaagctcccggaacaggcctgctgggtcatcgttaagcagagagttatggcccgggaagaggggctccgaccctgggagagcaggctgtcctgtgagaaagtgcccctgaccccgggggctcttgatctcttagcagccccaggctatggtcactggggccttcccctgtggctttgaacagctgcgtcctcgttcttggtcaggcccgtgggtctctgcacagctgagactgcatcaaggatcaggtgtcattttcaaataccaaagcctcccctggtttgagcagagagtgggccctggaaactccccagagtggccgagagcacgtactgctgcctcctggttccagtatgtactcagtcactcctttaactacaaatgcattgaattaaacaaaaagcctctacagacgtttggaaaataccatagagctaacaatcataatgataacaacaactgtcaacattgactgagctctcattttgtaagtcttttccgtgaattccaagtctgaggcattccccaaggggaggacagtgagtcttacgctacacagggaaagcctgggggcaggatccaggggtgccagggacaccccgcaaccagccacgccctgcaacctctgcccccagcgagccccagggaggcccctggtccgccctcctgacctgctgctgccctctgtgccccctcttcctgcaggcttctcaagcctctccctgggggaccagatgagcctgctgcagagtgcctggatggaaatcctcatcctgggcatcgtgtaccgctcgctgccctatgacgacaagctggtgtacgctgaggactacatcatggatgaggagcactcccgcctcgcggggctgctggagctctaccgggccatcctgcagctggtacgcaggtacaagaagctcaaggtggagaaggaggagtttgtgacgctcaaggccctggccctcgccaactccggtaagggcggcggcggggcctggaaggggagcttctagggctctgcatgggcctaatgagcccatccctggggcctgtgggcagggctggctgccatggatagagatgaaaggaaaacactgaaactttttattactgaagattgtccaaggggtggcctgcagataaaaagctggtgatgaaggctgacactggctgagcatttcctaagcctcagacatccagactggcacactggctaaggacatgggttctgaggccacattgctaaggagcaaatcccacgtctaccaactgggcaagttgcttcactctgtgcctcagtttcttcatcagtaaaaggagggcagccaaacagtccctactctacaaggctattgacaggatttctttatacataattatattgcttgcaacatgcttggcacataaaaagcactcaattatttatttatttgtttattatagacggggtcttgttctgtcgcccaggtaggagtgctgtggcttgatcctagctcactgcagtctcaaacttttgggctcaagccatcctcccacctcagcctcctgagtagctggaactacaggcatgtgccattattccggccaattcttatttctattttttatggagatagggtctcactatgttgcccaggttggtcccaaactcctgggctcaagcaatcctctcacctcagcctcccaaagtgttggcactacaggtatgagccaccacgctcagcgtcaacttattaaattagctaggagtttattgaattcttacaaacaacccaagagtaaaattcttattgttgcaaccccattttacagatgtggaaactgagacctgaaaaagtaaagaaaatcacccagggtcacacagttaaaaagtgtcagagttaagagtcaaaccaaggtcctctgattccaaaatcaacctgaacctatacccactccttgaatctttcagtcaaatttcttgaacacaggaggataaaaccttcccaactgagtggtttaagctggagttacaaaggaggactcactccatttcattagcatccaccaacttctggctagattatctgaggagagaggcaggcgttgggtaatgccagtaagtgaacttgaatgtaaccaacatccacacttagagagcttccacactattcagggaatggtgctgggtgccagggggctgcaggagaaggataaatacagggtaccctccctaaagagaacacatgccaggaatcacacacataattctgttgcagagcagtgtgtggcagagttaactgcccaggtctgggtcagatagacccaagttcaaattctatctctgacacttcctagcagtatgaccttgggtaactcagtgtccttgtgtgttcagtggggatattctgagcacctcttccaagcactttattttattttatttttttttgagacagagtctcactctgtggcctgggctggcgtgcagcgatgcaatctcggctcactgcaacctctgcctcccgggttcaagcgattctcgtgtctcagccttccgagtagctgggactacatgcgtgcaccgccacactcagctaatttttgtatttttagtagagacggggtttcgctatgttgcccaggctggtctcaaactcctggcctcaagtgatccacccgccttggcatcccaaagtgaggggattacaggtgtgagccaccacgcccagccccaagtgcttttgtgagtattaaagattgactgacaataaagcactcagcctggtgcctggcctagaggaaatgttcaataaatattaattattatcattactattaatgatagaggatacaaagtgttattagcatatggaaaagggagaactggctcccagatgcagacagtacacacagggtaaccaactggtttgctcaatactgtcctgcttttactgaaagtcccatatcccaggaaactcgtcagtccctggcaaactgggacagttggttgccctagcacatggcttcatggtgcatgcagggggtgctgttgatgacccacttggatcccttttactgggttagtgcatccatcccctagctgctaacagttcagaggtacccctttgcagggcctaccctcctctgccttgcccagagggttatgtggccctttccttggcaccaccaggcaatggtggacccacatgggtacaaaagttcggatcagagccctgcatgggatcaggctgaagccgaggtcccatctttgccttgctttctccttccctgtgcttcctgcctccccacttcctttctcctgaacacatgccccccgtaaatgtctgtacctaaacccttgcctcaggctctgctcccagggaacctgatctaacacagaaaaggatgccacttttttagttcaaatcttttattaacaataaatgaatgcaaaataatattaaaaattttacatacgtccacagagaatatttacacattgaattccaaaattgtagtgcattctttgttagagaatcctaatgctgtttttttaaagtatagttttagatttacagaataacttttttttttttttttgagacagaattttgctcttgttgcccaggctggaatgcagtggtgcaatctcggcccactgcaacctccgcctcctgggttcaagcgattctcttgcctcagcctccttagtagctgggattacaggcgcctgccaccacgcccggctaatttttgtatttttagtagagacatggtttcaccatgttggccaggctggtctcaaactcccgacctcaggtgatccacccacctcagcctctcacagtgctgggattgcgggcgtgagtcactgcacccggccgactgtgttgtattgttctataggttttgacaaatgcataatgacatgtttctacaatgacgtatcatacaaaatagcatcaaggccctgtgcttcacctacacagaggggagcatttgaaccaggcattgcagagggcttcgaggttctgtcaggtggaggaggagcaaaagcagttaaagcagaggaagccaggtgcacaaagccaggtgcaggaaggctggccaggccttggaggtcaagccctctattctgggctctcctaacttacaccagacacagagctcaatcttgcctgtgttgggagaggagagtaaagaggtagtgtctcctccactcttacttggtcctcagtaccggaccacaccacaccagctttcagctgctcttcccttgatctcacatggacccgcacacatacacacatgcacatgtatacatacaaacacatgcacatacatacacacccacacatacacacacatgtgaacacacatatgtgcatgcacatacccacatatgcagccacatccatgtgtatatagacatacacacacacccccacctgaggacccgtggaggtttgtcaatatgaatccatatcgaacttctgttggcatcaacagaacttctgttgacatcagactttgcctgagtgcactttgtcgcatggtatgaggtttcaggtctccggacttcttgccccagcaacatgtagagagccatcctgcagttggtgcacaggataagaagctggaggtggaggaggagtttgtgatgttcagggccttggctgacccccaagagggaacacacgttgcttattccagagagccgcagtccttgatgaggggaatgcttccttcccagcacggaggggttgagcatgaggccctcttgctatcaagtagatgctcagaaagcaggctggctagtctttttttttttttttttttaagtaatggttttccagcctaggcaacagagtgagaccctttctcagaaataaataaataaataaaataaagtaatgatttaaaggagtgcttgccaaagtacctgtgatgaaggacccatttttaaatgtttcaaaatgttcaatccattacggacagatcattttgtaaaatacaacaaaaataaattattaaaaaaatgaaattaaaaaccagatgtacaaaacatgagccaaatttttaaatttttatatataacagacataaatataaatcatccttccaaagtgctataaagtttctaaatgcttactctcagtttcttatcacagaccagtaacctccagagggcaggcaggaaccagtctgtgtaccatgctttgagcaggctgggtttaaagcgtgtacttcagggtcagtgagacctgggttcaaatcctgcctctgccacctgctggctgagtgtctggcaacctgacctttgtgagtctcagtttcctcatctgtgaaatagggagaacagcagctcattgtgaagaatgtgcagtgacgcacataaggctgtggccaccgtgcttggcacagatccctcctagctcattgtgtttctgttgggctctgtggggtatagtgggtggcctggggaagaggagccagttggatgtagctcctgcttccaagggagataagacatgagcctggatgtggcagaaagagccagtgattcctgacatgagagaggatcatgtaaagggctcaaggagggaagagtaaattgttttcagctggggaggtagactctgagtggggtcttaaagcaagagacggttcggtaggatgggaagagggagtgtaaacttctgtagtggggccatcagctccaggcaggaaatggggaaagaacaggccagtttcagggagaggctagaaaagcaggctggggtcagaccagaagctcaagggctgtgaagggattggattgtgatggggtcagtacagggaggcaggaagggttgtgcgggagtgacctgcctcagccttgagggagaaagatcacccaggcatcatagagaaaatgtgttggctggaggagggatgggtgccaggagaccattgaggtgtcctagcagcagccctcagggcgaccatgggtgccactgctgaggctcagtgcacgggatgactcaggtgtggctccagtggctcagggggctgacgctgggcagaagtgcccaagcacatcagaggcagactgtgaccccacaccatggccccctgggagcctgctggctgcggtttaccccacatcccagccatccccaaagctccctgacagcaggaaaaattcatagccattgattttgtaattaacagtttatcaatgccatcgatacagaccggctgatggattgcaaagaaattaatcttgcaatgttattttatttcatttttggtcgaaggcagctgccaattttgtcctccttggggagagtcgggggaggatggagagggcggggagagggagctggcaggagtcaggagcccacatggcaatgcccagccatgttaggtacacactctgtaagtggccgagagtgtaggattagggccttgcttcatctcccacctgatgacgaaggagtgctcactgccttggtagcagggagcagaaaaatgtggaggaggcttgggtgtggggccagtgaagactcagccctgcaaggacactcacccccagcctgagtccccacaggaataacactacctgacattgaccaggtgctgatcacgctctgggtaatgtgctgcttcagtcaccctcaccaccaccctgtgagtcctcactcctgtgttttacagccggcttagacccagctgtaacgtggccgtcagcaggtgcctccctgccgtgctgggatgtaggtaaattttgtttgaacccctaggtcatggcctaagttcaaaacctttcccaagattttagagaactccctatagctccctccatcaccgtgcctcatgccgccaccttgacacagtgctcagcccctatatctgtgcctgtattctgtgtcctataaccagaattttgtcaggttagcgattgcactgaagacttggggagctggtgcctggcagcggcagctgcagtggttgtcatggtgatagtagtgatggggctaggggcggtggtaggggtgataccgctaccagggcactgacttgtgacaagttctgttataaacccttgacctgtttaactcctttaagcccttgaggtaggcatggctattatcccattttacaagtgaggaaaatgaggctcagagaagttaataacttgcccaaaatcacacagcctgcaagtaagggacacaggattccaagtctggctccagggtctctgctgccaccccctggtgacctcttgagaaatgtcccctgtagacgccagtctctccctgggtttgagtcccagctctgtcattagcttctgtgacctctctgggcctcagattggctctctgtgaagagagggttctgaagatacccctgcctgcctccatgctgcctcctggaccccaagatggcccccacaccaggcagcactccctggccaagcctgctaatgctcgtccttgtgcctgcagattccatgtacatcgaggatctagaggctgtccagaagctgcaggacctgctgcacgaggcactgcaggactacgagctgagccagcgccatgaggagccctggaggacgggcaagctgctgctgacactgccgctgctgcggcagacggccgccaaggccgtgcagcacttctatagcgtcaaactgcagggcaaagtgcccatgcacaaactcttcctggagatgctggaggccaaggtgtgatggccccgcacacggaccaatgcccacctacagacagacaaacggacagaccgaggtggagacctccacagccaccagcctccaccttcaacccctgtatcatggctctgagctgtcccagaggcgggggtttctcacctcctggctgtgtgcagactcccgggtgcagtggggtgggggacggggatgggggggcaggggtgtggggctcgactgtaactggctttttctttggtatgtctttccttctccatggacggtgcggaggcctgggccagggctgactcccttcaggagtggaggccactggagcaagtgccctctcccctccaccgagccaccaagaggcagcatgtgcatttcctaactcccttgccccctcccccatctgtggcctgggtgggcactgctcaggctggataccacctggaggttttccttccgcagagggcaggtacgcaagggacaacagtatctttcttccagaggtcctacctgctctgagatcctctggggccggtcaagaggccccataccttccacagtttccactcagctttcagccagggggtacccacaggagagcagcggctagagctcaagtgcttcctgggcaccccacccctcggggcctacccccctgcctgtcacccaccgcgccggtgtccacctgtcctcctcctcttctcctccccccgggagtcccccgctacttcctgaccctacctcagagctcactcacccagtgggttcagccagccacagcgactccaggggctgtagacaggaacgcgctggcacagagaagagcggggaccacaccatcctcccaagaaccctctccctcttcctgccttccccctctccctgaagggcaggtccaggccaagtgagcctgtgagaagctcaggagcctggctccatccaagagcaccccggggggaggatcaggacaggatggacagaggcccagactcatctttgccaagcacagaaaggccgagcagctgagataagtaggcaggggagccccaaagggagggaactcagcggggtggcctgcctcatccttcctggcttcccttccctgcactcagcatcatgccacagggctagtgtaccagtgccacaggaggggtgccctcctaccacacttgggctaccagaggtttggtgtagctcccctgggcaccgcgagcacgccagctctctggcaggacccctgcagtccccctggctgtgccaggtaaccaaccgtcttggtttgtccaggacgtttctttatcccaggaaactcctctaccccaggcacacggggacagtgggtcactctatttctgtggatggccgtgaaagttttcactaactcaaggggcagccctgaacacccatttgtgctcacaggttggccaagagcagcttagaggatctcccaaggatgaaagaatgtcaagccatgatggaaaatgccccttccaatcagctgccttcacaagcagggatcagagcaactccccggggatccccaatccacgcccttctagtccaacccccctcaatgagagaggcaggcagatctcacccagcactaggacaccaggaggccaggtaactttctgcagcttttccatagaagccctggtcccacctccttggctctaccccaggaacctcccggcctgggcttctgggctgggacgtgctgaggtcatcccagacaggagggagggctggctgaaatccacaaactgcagagcagctctctgatggtgtcccacacagaaaatgttaaggatttcaagagccctcccagaccagtgatgtgtccctccggctccccttgcctgtggggaatcgggtctgagtcacttgatgagtaggcactggagccgttacccaggatgctgcggccctagccctccatgcagcccatcttccctcatttgggtggaggcacacatttggggcaaaggccccttcttggcatcaaggaacaccagctacaaaccaagtctagcacagtgtttagaggctctgccctgaggttctgctccggagaaaccttcacagtagagaccttggggtgtgtgctttgggactccctcagtctctcactgtgctgtgtccttgcagcggggccgaggtagcaccctgctctgtcacttcctgctcaagctggaggacccaggcggcagggcatcatgcccagctggcatctgctgtctgtcttttctagggaaagcatctctggctcaccatgtaacatctggcttggagcaagtgggtgttctgcacaccaggcagctgcacctcactggatctagtgttgctgcgagtgacctcacttcagagcccctctagcagagtggggcggaagtcctgatggttggtgtccatgaggtggaagctgcttttatacttaaaactcagatcacaacaggaaatgtgtcagtaacaatggaactccatccaatgggaaagttcctggtactgaaggggtccattggacactcagaaaagaagttcaggggccaacttcttagctggaatcctggccagatgaggaccctctccggggaagggagaggactgacttagtggaaggtggtgaagtgaggagagtttaggggaaccttcccccagtggaacagatctcaagtttaccctaaacctgccatttctggaaaatctgtaaagaggaaacagcctgtctcagctgtactctcatgatacaggtcatttgaaatgaaccaagaaataaaacatgaaaatccaaccatggagaaggtggtatggctgggttttgtttggtccccttgtccttatacgttctaaagtttccagactggctttgtcactttgtgaactcgtcatgtgtgaaaaccaatctttgcatatagggaacttcctcgggccacactttaagaaccaagtaagaggctctcaagactccagcagagtcgggaggccatggcagcgccttagaggagctggaacctgcacccacctgtgtcggtggggggggcctcctttccccatagactctgccctccctctgtgcagatggaagtggcaggggagggtgaccagcttgtgacaagaagactgaagggtccagagtccatgctcacggaacagcaccaaagaaaagcactatgtggaaagattgttttattttctaataatgataatatggctggaatggcttcttaagatgtatatattttttaaaatggcagttccccattgcagcatcacctacttgtatgtctttctgcctctgtatatgttctcccagaaacccccatgtaaatcaaatgccctaggatgcttccatcctggtcccatgtatctggaatctaataaataaggaaaggaact

SEQ ID NO: 51 - DNA, 126838 bp, Pan troglodytes
  variation 66284..66496: note = n is a, c, g, or t
  variation 79177..79260: note = n is a, c, g, or t
  variation 80541..81419: note = n is a, c, g, or t
  source 1..126838: mol_type = genomic DNA
ggatgagtggagcgctgggctgtgcgcgcacggctctctgcctccctctcccccgccgcggccgcctcctcccactctgcgttctcgcgctcactgtgccctgcccgggctcgcaccttgcccgtgcccttcactcgctcttccgcgtgatttccccgccgcctttctctaccaactgggaatgctaaaacgggactgatggacgtgtccgaactctgcatcccggaccccctcggctaccacaaccagtaggtgccctgcttctcggtctgtctgtccttctgcccgtctggcagtctctgtcctggggatcgcagttccttttctgcacattcttgtgtaaaagtggaagggacttcgggggggcacttgggggacgaaggaggggaaaagccgcacacttctgggtttctttctagggcataaacccgcctctaactttttcccgcacccctttttacaaatccacactttcaggcaagagtggcgctttctcatgcactttctccctttctttctcctctctgatcttgctccggggtgagaaaatatttgagtttttgtggaatggagcaagaagggaggcagaagcccagaacaggtgcagggatgtggttgcaaggatgtcctgtcctgtcagagaaagcctttcccgcgggcgctttgttttattatttccatcctggggaccaaaaatgatcccggcaagagagagaaaatcgaacgtgccgcggcggtttggaaactgcaggcggccagtgccgctctcgcctcgcggtctccgtggggcgccccgagggtgcgcacgtggcgcggcggatccagggcacccgggggatgcgggcccggcgctgcgtcgtaggcaaagttcgttctcggctttgggggaggctgtgcccagcggaacagaagggcacgatttccctgctccgaggcggctttgcgctcgcggtgccagaacctggggttatctgagcggcgtgggcgcgggcggcagccggcgccgcgagaagcgactctcagaaaccgcgggtctccagcccaggggcagcgcgccaagagcgcagagtgggaaagtgaactgatcgcccaagcagcgggtggtcaacccgcgtgtcatgtccgggctctcggggatcccactctatccacctacggtttccctcccgacaccctccacggtcgccgctccacctgctcgggtacctgcccgggtctccccttgggcgctgcgcaccccacggcgcccccggcgggtgtcccggaggcaggttgtgtgcgcgtgcaaagtggtcccttggaaggcttaataataataatacataaaactctaggttcttacggacagctttcctgcttaactttgtgctcatcttcctcttttttttctgacgcaaactaaactctccaagtcagcgtttctccagttccaccgtgctttcatttgtgtaccactcgctctccccctccccccaagaaccacgactacatctctaaaataaatactctggatcatgtggggtcccaggaagtacctaacccctctcctggctgcacgaagcacctccaccacggtgcaccccgcttgagagagagggcagctgtccacagcatggcttgtgttgttgaccagactgttcctgcttctagtttggggattttccccactccaccctggggcagagggccttttagatgccaccagaatgtcggcagaaggcgctggtctgggataggaatccttaataataatggattccgatttccatcagcttgaaaagtggctttcattccttttaaaggttagattctagctggggtggggatggggtgggagcacctgaggttagtgaggctgtggacagtatttggtgcttgtggaggatttccttacataaaatgatcaagtatgacaaatattggatatttaaattattaaggctccctctctccagaggtgacttctttagttgagcatgaaatacttatgtatttgttcctggctcaagtcatagtcaataaatatgaaaatttgtatgaaggaagtacattctttgcttatgcttaccaggaaagcaaggagtgagatggaggctttaacagctgggtaattcatcgagttgacggcagccctgactggagtttgaggagaaatatgggcaaaaaggcaatgtcagggaagcagcagaaggaagtcagggagctgaggtcctgggggtctgggaaaggtttgagatagaaatcatttataaactaagcctgacagaggtttagatccccaaccctttccgttttttgttttttgttatttgtatttttgcaaagaattagcttgtccctccatggggcacaggaaaagccaaaaatatacctgctgtctccactgaggaattgagcacccctgtgagatgtcatttctcaaagcccaggacccactgggcagcagcccaggcattgatgagctggcctcttatacatatatgtgctgcctggggagggtctgcgtgtgctgtggcgcagaggggcatcatttcaaggacgagcttgtggaggtctggggctggtgtctggggagacatctttctgacctctaccccacggctttgtgacacagctttagagccatgggtagtaaagtaacagagcgggggactggattctttggtttggtagaaggatagtaggacaaagccattcattatagtgctggcatttcccagggaacatacagtaagtgggttcgtgtatgctctgctcacagttttgacccctgtggattggctgacattcccagacttgagaaaacccaagggcacagggactagagttgagggaggaggaactctctggtcctcccttttgcttctaacacatagagagcatttgttaatgctgtagaatcattctcactttcccaggtgagaaatgaacacacacagagagaaacatacgtaccttcctacctcgctctccttcattttcattttcctgtagccaatcctgtaggtgactccattacccattctaatcaatattttatgtacatatataatcacccagagtgggaggcagcgtgctcgcctgtgtgtgcctgtgtacaaatgggtccatgactggaccagctggagacccacggcaaacagtccagagagcaaggggggctatcttccccactgtccgatgaccactttgctgttgttaaagaaataaagaacaaattgtcctgaaggtaaaatatgtgggttcacacgtaggaaaaatgccacatggtaattcagagtcagtgacccggagaaaaacaaagggggaaattaatttttaatggtacatttaaaaataaatcagagtgaggacattagtctcggttttccaagggaggggctctaggaaataaacctttatgtgcctgtcagccttctggaggtgtgcgctgccatggaagaggatgggtgataggaggtgggaggtgttcaggcctgaaggcgatgaactgggaggagacagtaggtcaacgctggagggccccggtcccgggtaaggccctttccagctcagtgagatcctgacatcactggaaatttcctcttggagtttgttacttcccccaacccttttcattttagaaacaatcctttattttgctgataatgaggacatatgaaaaagatctgttccaaaaaaaaaaaaaaagcacagagaaacaacctggccacaaaacaggaacctttttattctattgatttggagtaatcaataaatattccatttagtctgggagaggaggggcagaggggactttcggggaaagcacttcaaaggaggtggcggtgacagagatttcatgtcacaccctgccttctcagagcacccctggccctagctcgggggcccttataactttgtcctgcgtgtgctccattcatattcctgataactggacattttgccaagtggtttttaaagataatctaaactcattgagaaagtttgtccccttcctcagccctctgctgaatgccttgtttcttttgagcaaagatctgcctacttctgatgggccggaggaaggatgcgtgtgacagagagacactgagggagcatgtacattggggagggcggtggagttggccatgaatgcgtaggattcagaaggagacagaattcgaagacagtagacaagcaagaaacaggatgcttttggcctgactctgcagcgcccttctctagaacttgtctccccaagtcctttaagcgacttcttaaaaatgattaaaattctttttggttccaaatttaagggaagagatggcagatatttagaccataatgtcctccttccaagtaaagcccacaccacaccttgattgcctccattctggtgttccccaacacctaccggccatcgtcaagtctctgtccatttctttctgaagtgagaccctcgtaatgctcttcctgctgagcaggagctctgcccagaattagcgaggatgccgcacagctcccctgggagcttctgtcgtagagtctggtggctcttgactgaatgttactggggtggggagccccagcttgacttgaatgctcaacctctggggtcctccagtgacactacagcccctagaggtgctgccagtgcagggtctaaggaaggaccccaggaagccaggagagtacaaattaagaatgggctggaactagccaaatctggcccggaatcttcctgaacatcctgcctgtttgcccttgaaggcttttgccgatttctagagataaatcaaagacctttttagcatgtatgcgctggtgacccctgattggtctctgtctctggtgagtttccccttcctcagccccagcagccttagacctctggggacagtcacagacatggtcttccctcagaggaggggcccataggctttgggtggccctggtgtcccctgtcccctggcatgggtggggtgggattatatccttttagccccgtcagctggtatggcttcgtccctgcgcggggaggttgtggtgtttattataattgcaaatgtaattagcagaccagctctgggggactgggaggctcaacttctctgcacatcacggtgacccctgtaatggctggcccagcagattaaccctcaccgggccagcctgcctcctgccactggtgaggctgctgaccttttctaataatggcagggctgtcctgggaccagacaccttccgtggaggggttgtcagggcaatgactggagagatccgtagttgggaggattttttcttccccagggcactgggctagtgacctttgcctcttgagacactgtcaccctgggcagcaggctgtgctgggccatttcttctctcgtgttcctggccatactggaaggatgtgacggaaggactgtgagtgcatgctggtcagttctgtggctctaaagggactcattgtgacttccatctggtgctcctgggctcagcgggcagtagcttgtattcacccatctcatcagcttcttctcagagccagctttggggaggtgactgttcgctggctcctggactctgagcaggtgttccacagagctggactgcttcgggtagggaggctggtcataggagagcacaggctcaatttgtttctgagaacagagacctccccagttaaccatccaacaaaaggacaccaaaacaccagacaagtggggaacatggagctgcacagtcttttccctccctcctatgagtgtacttgtatttgcctctctagggtgcccttctgtactgatcaggattaaaatcatcaagggtcctaacaggacctttctttataagtcattgcttaacagagtgtcaagcccttctgtgctgccagtaaagcccctgttgtagaggatgtttctgaaccttgaaacatcaaaagccgtgtccacccctaagagagtttccaccgtgggaaacctgtgtgtgcacatgtgtgagtgtgttccggtgggtagtcccctttaagatggggtgacagtggacaggggtctctgctatttaaacatgttcctgctgactgctataccccttggctgggctgaggtctggctgtgaccacattccagcaggggctgccatgccttgggattggttcgtccatggtgcaaaggggactgcaggggcacctgctaggtggctgtccctctggtttgcccagaggatttcagtcttaagagcctctctgcaattttctggcctgggtagggctggggcagaccccagagagggagagaaggaagtcctgcccttctccaggataacagatggccacactcagaggagcatttgggccattctgttccaggttcccgacttccccttctctccctggaaatagccattgacaggttgtggcttaaagagtcaactgttttcttaaatcaaggaaaatcatactggttaatcagcccatgggatgttcactatggagttggactaggtggaaaaaaattattggccaaatgttttaaattcagaattgtctgagtttgagttaaaattgtataaatctaaaacaaaagttttcctggggctcagagatagaattttttcatttcattttgctgtgcttttaaacctatacacattttggtctgaaagtttctttttttaaaaaaaaatgtctttcctttgttccttaggactttaaaatactctattcaatattgtcattcagcatccccgggactgaaccttttcagggaatggttttctggaaaattttattttatttctcaatgtcatttcattcagaggtcaaaaggcagttaaacaaactccaacaagcctttgtttttatcttctgatttcaaatgtgatcaatttttatttaaaatcgtatcagagacctctcctaccaattatagtggcagtcagcctcgtgcctgaccattggtgtttaccaaaatcctgcatttaaaactgtacgaatgtgaagtgtcaaattgaattcaatcttttctatcaaggaaacgatgagttaaaaaaccccaaataccaaatgtggttttaacttggttcttttatttttaatggcttgaattggcttgagttcataaattagtttttatgttttattctttttgttaattcattttgaaatttttattggttttttttttggcattttcatctggcttatgctttaaaaatgatgcctgataaagggtttttgagaatcattggccttttgatgtgttcttggtttctgaagggcaaagaacaaggaaatacaggtgtaaggaaatgctataggagaggatggaaggggtgaagaagtgtgatcttttagatgagatttctctcgtgttttacaatttagcattttcttttgtcttcattttttcccctctatttttattccaacttgctgtagtttgcccttgtccttttgtccctccttgactgttttggaggaaggagtgtaggtgtgtggtctgcctgtgtgtgagtgtgtgtgtgtctgtatggctggctgagctgttcagaggtgctgagcatgattagttgggtaaagtcccaaagcagaatgcctataattggcccccctgttctgattcagccatcaatacctttattcatggtcgctggctggctcatgttttggtgaaaaaaacaagaagggtgtagacctgctgtttacagacaaatttcgggtggtctgtttgttatctgaggagcgtggtgataggggctgcaggtatgggtgaggatatgaagaagcactaaactttatgcaaaaccaatttttaaatccctcccctcatctcaccgcctatgcttggaaccctagtttgggatcttggtgatgcacagtaaatgagctgttgtatgcttttgtttttgtcttcctaatcgatcagcagaaaacatttccttttgatggtgaaacaggacttcagcatgcagagcgcagtatttatcctcttacttttagcttcactctttgtcatttgtctcttgggtttgttgacattgtctacctaagcagtcaagctaacaagctttggcagaaagaacactgcttttacagaaatagtagcaattttaatgtgatggttataataattgtgattacagtaatcacagcttgtacctttttcttcccaaaaagcacaaagcaattctcgtaaccatttttctcatagtagctggatgagggtggccgtttcttgctcccaaacataaatatcttcatgcaaacataaacatgcaaaggctgcaggtttgcgtgtctgaattcacccaggagcaaaaactgcctggtctctgaatacgaacaggcaggtagaggagaatacggtgttaaccacctggcccccctgagaaaagctgggtgctttgcctttgaacgaagatgggagaagtgtttcttgtaagtgatgctgtgccaagtttgaccccactaccgccggcttctatgccccgtgccatgctctgcctcccagtttccccttgctccttggttcctctggctgcattctcatgacaggtttgcagaccaaaggcacagagaggacaagggggggttatgacttggcgcatgtgaatatctgggagaagaactgtgtgaagagagaggcaaagtcatctctccacccttgatcgccttcttggccatttggcttctatgaggccgttgtccctgctcctgagtacctcaacctgcactatggaggcgattagagggaggtcatcagggaactgacctctctgaatttccgtgacccttcttgtgatgcttcatggcgactcccagacctgaagcctgctcacctacagaccatgctcatctgtgcgttactttagaatccatcaatgcttttgttatttcctctctcatttccttttttgtatatgtatcgtggaacgaagaagcagctctgcttcacctaatattccagggtcccatagctgtctgtattttttttccatctcaatattcttactcatgttcttactcatagtttcttttcctcaggaaaaaaaaaaaaaaacaaccaaacctcaaagctttggattattaattgattattaactgattttacaaacaaaacattccacccccaaggaatgcaagcaagactctggctgtgctgctcaggttgagatctgctttccccctcaatcggtgagaaattttatatcttcaattcccttgttggaccctgagtaaaaaattaattcatgaataataaaaaccaatcagtcttgttgagtttaagaaggattaggagaaagggtgttttttcttacagagaacatttggaatctgtgtgtcactgtcaccgagtgtttgggggtggcttgagcgaagcctttattcacggcaaatgagctgttgattatcctgagtataacacatcttcctcagttgttaaggccagcttactgctgactgttacggggttcctactcactgctctcccaccatcccgtactccaagccagtgataattcactgaaattaagacagtttcctgtgtaagtggcatataaccaaatagcaaccgacctggcctttgcattatgaataagcccatttgctgatgggatggagtccttcttggttttcctcccctttctttctcaggaaataattgaccagaaatttacatgcttttcccagaactacagaaattagatgtgtagattctcttttcagtttccactaatagtatctacctcccagggttgttttgaagatttagtcagaggacaagcaccaggcatatagtaggtgtgcattaaatgtccagtgttattaattttttgatgttatctttggggcattactttttattcctttgacataatctcacaattatagtcttccctacagtgagactggggtgcttgaactgactactttgtttaatgtgatcaatatggcttgcatgtcaatatataacacaaggggattaaagaaggaattacagtttgggatggagaggatgaataggaaattttcctctgaacgaatccctatattttcggtagggctgtccagtaaaatacaggatacccagttaaatgtgaattttacataaatgtgagtatctttttttgtataagtaaatcctatgcaatgcttgttaaatctggcaaccctatctacccatgactgtttttcttaaaatagtctgataagaaacacattgcccttattttttttctgcttttgaccaagcccgaaagattaattctaggttcggttttttaatttttttttttttttttttttttttttttcgacggagtctcactctgtcacccaggctggagtgcagtgacacgatctcggctcactgtaacctctgcctcccgggttcaagcgattctcctgcctcagcctcctgagtagctgggactacaggtgtgtgccaccacacctggctactaattattttgtatttttagtaaaaacggggtttcaccatgttggccaggttggtctcaaactcctgacttcaggtgatctgcctgcctctgcctccaaatgaccatctttaacattttaccaatatgaatgtgttaggctggccgtgcccttagataaggcagtgggtaagttccatcgaccagatatattgatagagttacaattaagtaaataaatctgctgaatgaggtctcctaacagcacccagggctactgaattttgccttagggaggaacagggtaagtcaagtctttttgggaacctgtctgtgcctgatgtttccctgacaaacgggttggggtgctggactgccagaacctgagaccccagaaactggaagttacccttgccccaccctggaggccaaagcagcagctctccctacctccccacataaggacaggaggctgacccttgggagggtctcccaggaggctgaggggaagcagcccaaatcagtgttaggtggtggagcagggagggttaggactccaaacctgaagcagagctagttgagagcatggatgaaccggggctcgccaacagggtaccagcggaccccagcttcccctcattcacctctcggaacagcacagtcgcacagccttggtaaacacaaccattgttttaagcctgatgccctcacagcccagggtacggggaatggaagagctctagagccccctacaggcactcactggcactgcaccccatgggtgacagttctgcaacagagccttcccttggtggggtgtatggagaatcccagggggtgagccttcagaagctcaggggtgagctcaggaccctggctttagaaagcagctctggttttcacctttcccagccctactccatgcaatttagcactgcagctgccttgtagtgtggtattcctcccaagccccaccatgcatgcaggcacacctacacaccacacactcactgcctccgtggcttgcctgacctccagacgggctggaaagtgctctggtctgattcagtttgaggaatgccctccagctgctgaatatgcagaagccgtgcagccagcaccattttcagagccagatactggtgttcagatgctcttctccaagccacctaattctctggggaatcattttaggatttgatgtaagaaaagtgtctgaggggggataggagagctaaatataaagtgtaaggccagagatgggtgattgtaatagtaatagttgtagtaattgacatttattgagcatttactgtgtgtcaggctttgtcctaagaatatttcatgtatgaaatcatcacttcctcacaacagtcctaggaagtaggtattattatcatcccccatttcacaggtaaagaaactgaggtacagagacgttaagtcatttgcccaaggtcacacagctgacaaagctaggatttgcacagaggcagtctgggtgtgtgcctgcactcctcaccccgatgttatgtgtttctcattgcatctagaatttcagctttctttcattctttttttttttttttttttttttttgagatggagtctcactctgtggcccaggctggactgcagtggcgcaatctcggctcactgcaagctctgcctcccaggttcacgccattctcctgcctcagcctcccgagtagctgggactataggcgcctgccaccatgcctggctaattttttgtatttttagtaaagaaggggcttcactattcatcctgttagccaggatggttctgatctcctgacctcgtgatccatctgcctcagcctcccaaagtgctgggattacaggtgtgagccactgcacccggcctagaatttcagctttctaactcctgccttcagaacaccttgtgtggatctaacacttgggcaaaatttaaggtggtggtggagggggaaaagaccaagacccatgtcttggttctgaaaaaaataaggtggaagaattgctgcacagagtcagacctctcatcccccaggtcagcttccatccttgtcctcggcacaggagaaagctgtaggaaggaacttttggtcttcctgacatcatcgtccaagggcccatgcccagcctctggaggccacttagtggtttgaccccctccatgcctctcctggagtctatcataaacatattttgaagccaacttccctcttctcagcttgcattttctcctgttccttgccttcccatcattctcttatcgcccattctccaacagctcccaagtctgagtctcagtgccctaccttggtgcccgtcttggattcccgcaggcaccacacagcagcacatgcaaaatcaaagacagcatcacactctaaacctgcttctcctcatgtctctttaggcagggaccccccaccaagccaagatatggagcgtatcttcagttcttccctcctgctcttcattgttgagtcccctcctacatctggaaaacttttacctatgtatacacctcagatctagtcattcttgtattgcttcccccaaccctggtctgcttggcgaacttctatttatcctttaaaaccctgctcaggtatccccctctgtgtggagacatccctgacttctccctgggggaattagtctttctccttgcagctgttctctgtctcatgcccctgactgggttacaatctgttggatttgaatatttgcttattttttctcctagatcatgaggtcctagagtccaaggtcatctctgtgtccccagtgacacagagtgggtgtttaataaatgttggttgagctaacctgaggggattggaagtagttaaaggggagcccttgggggaaaagagggagaaagaagggcctgggaagaggtaaccaggagagcactggttctgccacatcttttgccctggttgagccatggaggcagctctggcttggggagcattatatccttctgggaggcaatgcagtgttggggttaagagggaaaagcctagctccagactaactgaattgaaatcctggtcccaatggtgtgctggaaccagctcaaaccagctcaggagagctcactgttaaatattcagcagttttgtgggctgatggtcaaacacaatcattattaaaaattaaatggtataaacttataattaaatacattgtattaaaaacaaaggtaatagataccactcctcacttcctcatatcttagtacatttcactttacgttcttgccatcaatttacacctaatgtatggtggaaaaaaccatgcgatgctgagctgctgcctgtctcttcccaagcctgcattccatgatgacacactggtagtttgagaacagccatgatgggagtatttacaccacggaaattggcaaatgctacagatccgccgtcccccagctggccgttaaacatttattaccacaccactgcactggctccgtcacatcccagctctgtgaccccagataaatgactcaatctctctgtatctcagattcctcttctgctgtgatcttccacgttagattgctgtaaagattaaaagttgataaacatggctgagtgtggtggctcacgcctgtaatcccagcactttgggaggctgaggtgggcagatcatttgaggtcagcagtttgagaccagcctggccaacatggtgaaaccccatctctattaaaaatacaaaagttagccaggcgtggtggtgggcatctgtaatcccacctccttgggaggctgaggcaggaggatcacttgaacccaggaggtggagattgcaatgagccaagattgcgccactgcactccagcctggaaaataaagcaagactcagtctcaaaaaaacaaaaacaaacaaacaagaaaagataaatataaggtacttatagcagaaactagtacacagtaggtgctcaataaatattagttctttttagtatttcttctcattgctccagtgatgcccctatccaaattctacagaaacagatgacgtgccaggtagaggaatgtaagttttatttctagagcataaggttcatgtcctttccctacaggacccctgtgtgtagggtttaacttgaggagctaagtgcgggaagtaaaaaccatgaattttccaaggggaaaggcgctgatggagaggtatgctgaagcctccaggccatgagaggattgtgccccaggccctttgaggaaatgaggccacagcagcacatggttgaacaggtgaggcaggcacaggtgaggtcaggagaggaatgaagcagatgccaagaacagccaagctgcagcatgaagggaggctctgtgtgtggctgcagcggggccccaggaccttgcgaggaggcagctgccctctctggaaatgctgggctgtgcggtcatgcccatgaaggcaagggctcctctggctttgaaagtggagaaaatattcctggccaatcccgagttggatcacacagttgaggttacattggctgcgttgtggtttcttgggatgctacaggaaagtgggaaggtaagaagatttggtctgcagcctccaggacagcagaggccaggaaagagcaagagtgcgtttgggcttttctagactcctccgtggcaggtttcctgggtcccagccaacccaggcccctggaatgaggattcacacttaatctctctgttacctggaaattgcttcaggttcagacctttgccatcaggaggggcagttcagtgactcagatacacacagttcccagcccagcccttttccgatggtaagtgcactacaagcccacagacccctggcaatgcgtacatctgcgtgctgtacaggccagaagctgcagctcattgctggggtctgcttctgttctttgaatccctggtctgtagacaaatgccctttggagcggccttgccgaggagaaggcagcgttgagagtgaagcccttccttcccgcctcactgtgggagtctttcactttaccctgagctcctcaagggcccatctggctctgattcgtctgcagcacagggtcactcatggaggagccttcagtaaacgtgaggtagaagtttagatacattttgagaaaatttgtgctttggggtgcaccactagtgggttacctgttccgttgtacaggttgttcactgtccaagagtgcctggttgaggaggtgggtggggtctgaacttagtttttctaattcacaacaagccacacatagctggggcatgggagtgagtatccaaggggttgagggcctagagggggctgaggaaccacctcaccaggctccaactcattcattgggagcaacttcctgtctaacctgtgtctggattctctgaagaactctgtgtttctttctgctggcaacatccctgcagcctgcatttagagccggatagctcttcgaaggctttctgttctgcgtaactgcagtacttagcgggtcccccatggctctcagcaggccccggggcagggaggggcctccaggccctgccctggctgctgatatttcaagatgccagtggaaacagagacactgtggccctgtgttcccagagtcgaggtgcagggtggtgtgtgggtgtgagtaagccagcggccctggcaggcaggggcatatccgagaaacagtgtcacagggttcctgggctctaagggcttctgtgagtagattttggggagtgctagaatttatcaacttggagggaaaggaagctgccgttttagcatttgatgcctttaatcttcacagtaatacctaagtagggagtcctgtcccccgtttacagaggtccagaggagctgagtgactgcccaaggtggcgcagtggatccacttgaagagccaggatgcacgtccaagtctgtctgcctgaaatagctcagaattccaggggcccagaaaacccactgtttctatcacagatctctgtcttgccaggcccaccctcctgatgttttccccaacacattaatgtggtctcaggctgaactactcagctgaccctgggctcaggaaaggggagcgcagaccctgagacgggcatgtggctcgggggctgccaccagggcctcatcccagtatggctgtggagagggtcaggacatctggaagagccagtgttgggatctgttcatgctgtgccgagagaagtgcttccatttgccaagaaagaatgaggaagagggaagggcaggcccacctccttgctgctcgctgggtcagtagccctgggtggccactggccttcacagagaagagccacttgggggtggtccacatgtgtgagctggaacccagggcctgtggccagccctgggagggcctctgtgcgggcatgtggggcagggaggcactggaggccagtttcctgtgcaaagcctttggggcatagcggatttggggcatagcagagaaggaggcctgctttggtctgtaaggtgctgtagccaggatctaacacacctgggcttgggtttgtgggtttatctcccttgtgtattctttgaccacccagctccatgcctggccagcagagttctcgcaggagaccctgcaggcttgatgtgaggccatagttggaaacctgatgggccctccctagagacctattgcctggagaagtgctccctccgtagctccggtagacgcccctacgtgcagtcttgcccaccaccttgctctcaacgctcctctccatgccctgcagcctcccaagtctttcctctgtgccagctatttttgcatggcaacaatagtaataaaaatagttacatatggtcaggcaatggatctgttttttggtctgtaagtgtattttatgttaaaaattttacattttatgacttcaagactttgcatgaaatacctttactgcaaagaaaaaaaacattacctgggatcagagcagtcacagaacacagaggcccctggcagtcaggagagaggtcccctggtcggtgcccaggtggagagtgtagccaggtgccggcaactgcaagtgtttccaagcaggtgcccatgtccagcagatgcctgcaagacttgaatcagaggcactgttatgagggcggaaggacctggggtccccaggctggccgaggcaagggactccacggctgctgtcttctcagtaacaacaccttggattcttttttttgagacagagtctcgttctgtcacccaggctggagtgcagtggcacgagctcagcacactgcaaccttcgcctcccaggttcaagtgaatctcctgcctcagcctcccaagtagctgggattacaggcatgcaccaacatgcctggctaatttttttttttgtattttttggtatttttagtagagtttcaccatactggccaggctggtctgacctcaggtgatctaccctcctcagcctcccaaaatgctagtattacaggcgtgagccaccgtgcccagcctagaacactttggattctaattttagtacttccagctcctggccatgtggatgagatcagagattgtgcccgtgtcaggtagacttggccactccagacaaaaccagcttctctttgatgctgggctcttttcttttcccccatccttctttctttctagccctgtttccctgcctctgtcgttctaggccagtttccctctatttttctctttgctgatgctcacgacaatagtaatatttgctaacatcttctgactgcccactatgagccaggcgctgtgcaaagtgcatcttgtggctactcatattttttgcctccttccctctttctgggccttttgtactgaagattcacctggtatcccttgagcacctcatgtggctggtactctcctccccaaagaggatgcagccttgtgggggctgggagggagcctcattagctccagcgccctcattttacagaagagaaaactgagggcttgagctgatgagggccttggctacagttctgcagcttgggtgcagaaggaaagccagggcttggcctcttgacctttacccagagctgtcttgcatcttgtggatgcaaattgtttgctgtcagctgcgttgagggtctctttgaccttggggttctgagtacctaaatggtgagccttgggccaggcagtgcagatcactgatgtcactgtgccagtgtcactgcatacccaactcaggctgggcagggcgaggagactgcaggagccacgcagagccagaggagggctggatggactgacacgaaccattcccatgtaagaaaattaaaagataaaaataattttgatagagggaaactggtaggagggaagatgagctggccgtctgggcgaggtggcctccttcacaggttttgctgccatcatctccctatgtgggcccacttctctccccgggccatccctgtaggctgttctttgcccttggtgacctcagtaggagctctctgtttccgacagtcagcccctcgcccagtgggaggaggagatggagaggtaagagctacctgagaattaagccatgtgcactatctggctcatgctggtcttcccggggcctcattccatggctggtatagaaatatgaatgcatcatcccgctgtcaggcagcatcccagctactccagcctgtgtccaaggtcagtacctaactggccatccctgctccgaggtcagttgagggtctggcaatattaccatggatctgaacaccactggctccccgggggctgcagcggggcgtgtggaggaaggagtccctccggactcacggcccacactagaagaacataaaggaatagacagcccctgtgtggtgcagcacagcaagcaggacctttgatgtcagacaggtatgaattcagctgacaactcaactctcccttggtgtgtaccctggggcaagtcacctaacctccctgtgcacgctggcctcatctgaaaagtgggaataagaatccttctcttacagggttgcagaagaatttaataaaataatgcttgcaaaatgcttttatgcagggtactgtcagcctcacaaagccagagatgccccaagcattctctgtaaacacggctatgaccattcaaaagaaaattataaattcattttaaagtattacttaattaggagttattatatatttttccacctaataaagactaaaagtaccaagtttatgatacttggtacttggggtgaggggcagggttgagaaatgctttggcattaaaaagaggccttcagccgggcatggtggctgacgcctgtaatctcagcactttgggaagctgaggcaagtggaccacaaagccaagagttcgatacaattctggccaacatggtgaaagcccgtctttactaaaaatacaaaaactagctgggcatggtggtgcgtgcctgtagtcccagctactcgggaggctgaggcaggagaatcgcttgaacccaggaggcggaggttgcagtgaaccgagatcacgccactgcactccaacctggtgacagagtgagactccgtatcaaaaaaaaaagaccaaaaaacaaaacaaaacaaaaaacaaaaaaacagccttcacaggttcatgtggactgagatgagaatacaggcaacatagagttgagtaaaaataaaaatcaagtagctggacagtggatagagtaaaatcacatgtatggctttttaagctctaaatgctgggtatatgcttttgaaacttggggaaagagatataaaaaaaaaccatcctttgagttagctgtagggaatgggcttaagaatcctggtattgggagagatttttacctttaactttgactcttttgattgtatgtacatattctataatgaaaacaattttaatgtgtaagttaagggaaccaagtgtgagcaaacaagccagcaaactaataaaccttcctaagaaaaacattgaaatacaaaggatccttatgaaaacttggaagtcagctctctggacacacagtcctctagaaaccaggttctgtccctgctccaggtccctgcccacctgctcccctggtcccctgcagtgcacatgctaccaagcctgtgcctctgcctgcagcaggacaaacccagacagaggcttagcctggaggctcaactcccagagccagcgctggcggtagatgcagcagccaggctcggcctgggttggcaagggttggcctcaccactagattcgtctctccacttcacgcctcatggagccaggccgagggagtcgctggaggatcgtgactgcccgagtgggtggttgctcacctgcccaggaagccattaatcttgtgtctctgcggcctctcctcccacgccagccgcccgggcacggactgactcgggaaaggacatgaaaggggccctgggcttcactccatggtggaccatgaccctggaaaataccatctggcttttctatgtgtcttctgacaccaattcccctggtcaggacacatcaaagagagtgagtctggtgacatttctcattgttattcctttggcagggccttcagattcaggtcacagatagactcgcacctccagaggctgcctgtggggcctgagccccccatcttacagatgcctcaggaggggcttgtagaggtgacccaggaccccctagcggccaagaccccagtcaacggcacccagcaggccagtcccccagggccagtctgggcagcagaacctcctggagtgaccactctgactttcgttctctgtcctctgatgctacccacgcaaaacagccaaagcgccaggtaccccatccagggtgtcagtaatgtgtggagtttgacctgaccctgggaatcccagcttcagtcacagagtcatattttctttacggaggctgggcttgctggctttaaagtaattccaaaatagatttattggacaaaatttgggcaaaaattgggacaaaataatttggggcaggccaggcatggtggctcatgcttctaatcccagcactttgggaggccaaggcaggaggattgtttgagaccaggagttcgagaccagcctgggcaatgtagcaagaccttgtctctatttttcaaaaagaataaaacatgtaaaagaataataacttggggcaaaaagggggcttctgaataaccgcgaggtttgatactcagaaatgcactacctcctgagcagaaagtcgcctgtggcaggaggtatgtgcatgcaaagttgacctttttggaaggttatagaagatacaacagcagccaggggcttgcactttctgttgcacactttccccttttgaataaacccctttgtttcatatcagtggggaacagaggatgggcacgtgcagggcctcattggatatcctctcacttttttatgtctagctgtttaaacatggggcctcctatgccagcttgtgctttgttggaaaattggttcaatagccctgctagctggcacgcattgaagtatttcctatatgccaggcacagtgtatcgtgcattacccagttagtacttttgaatctcacaactgtcctgcaaagtaggcacttgcattttcctcatattccagatgaggaaataggagctcagagaggttgagtagcacccccaaagtcacagatctaacacaaggcaaagctggcatttaaacatagacccacctccaaagtccactgtgctggacacatctgcagaagacaaatagttcccccatatttcaatctctctctctgttggaaactgagtccgctttttgttattgcttcccccatcagagttcaaaggcagccaggaaatggggtggtctctgctttgctgcttaccaccttgtcacctttcatttgtatttccctagagtagggaggcagtgccctttcttggcagggtgcagtgggtggaaggagggtagggctgtgggggaaggggtcagaagagaggattgcctctctctaggtagtcaagggggcatacgtatggggtaagaggctggttggcattgggcattgcattcagggtcaaccattccagttcccagatatacatgctgatagaatccttgtgacaaccctgtgaggtagaagctcttctgctcctccttttacaagtgttgaaactgaggctgtgtgccttgctcaggttgctgagctagcacacggtggagtctgactccagcctaggtctgcctgcctcctaagtcccaactcaccaccaccatcctgcatttgatttggttcagcctctcggtctgttgaggggactgtaggaggtgacagaaaggatgcatttgcataggtgggttagggatttttttaatcctcattttcctgatggagaccgtgagacccaagtgtcttgctgaactcagtacgttggggactgaaattaccacctgtcccctggctgcagcctgccttttttgcagatgggtccaaacagcagatgtggatggtctgggagggaaggttcctgtggctgtgtgaagagggagactggggtggcttcctggccagccgtgtgttttaaccagcgcgtatatatctttatttaaaggagtcctatgcttttgacaatccatcaggaagctccctgtgacggagtccaaggggttccctggtattgctctgtgatctttagacaagccacttagcctctgaacctctatgttctcatctgcctgatgaggataagagaatcccaactccctgggtcaatgctaggctaggtgaaatctagcagccaacacaggttggatgtgcactccaggaggcttcctagcaatgtccccgccgctcattcctcctcattatgccctcagagcccacatcatcccctttgaatatgctcgctgatggcaagtctccttccattccgggtggatttaatgttgaatacagccaaggtcatttggaggcaagtctagggaattagctgggtgacagagctgagcaaagagatttttgattacaaagaacgtgaggatgtgactctatttctcagataatctggcctgaaaggcagctcccaagaggaactccaaaaatggtttgacgaaagccagcatcactgggaacttggaagagatgcccagggtgaccatgaggaaggggacagcgctcactagggtgtataaataccagttggtcacaatgggtctcctgacttcacagtcacaccctgctgctcctgactagatgctgccgtttcaaggagcaaactcggtgggaggtcacataggtgtccagtggaactggggtaattgtggccgtctcaggtcaggctcagtccctgatctatgcggaataaataatggcccagcaagatgcctatacctttctcatcttaccagccaaacctgcaaattacccaacagaacccacgctgctttggctgggagggccgaatgagccagagcttgcaagagtctagctgggggcagaagggaggaaggatacacacccctcctgctcctggtacctcatctgctcttgagaattagcctggcagcgggagcccttcaactgggtacttcgtgtactgccgtcctttgacattttccttctgggaaaacttctagagaagccattctgggaaaggtagagatttagaagttttgaataagaaaatagcaagctgagaacataatctggggagaaagagcacagggcagagaactctgaatagtggcagatggacttcaatctgaagactgttgcagatttgaacaaaatgagggaaatcacaagagccgggagccttccaaaaggaaccgcttccgttgaagtctgtccctgattctcaggttagggtcttcctcatttgggatgtgaaaatggtttttcttttataatgtgatgcttgtactaggttgccttttcccacgttttatgttctcacttgacaaatagcgtcaaccttgtattggtcccagtttgggtggtagtgaacgggagtgggaattatcttgtgtggttggaagatgggaaccactggcctagaacccagaaactggaaactagctgtcctcaagctgggccttaagtctctgtagggaacctggggacagaaagtgaagacacacgaacaactgtttatatccgtcatcctccaacgggcaggctcctatgggtggggctccattcagcccaggaattctcctcttcccgttggtgctctgctcttctgctctgtgcagagggcagctggttctaaggtccagagatataagatttcttctctggtttaagcagcaccgagagcatggtcctctcgctcttcctgattgtgctctgagctctggcctcttgcagggagttgccagacacatgtgtgagaagaagggctccttttaccgttatactctgggtgtgatcacagctccggcccaggccactactgagccctacactgtccaatattcacatgggagggttgagaggagaaaaggcactaaacatcctgtgtcataggaaaagggaacaaaagaggaagcctcgaaacagactgggagttgtcattcatgaaagagtgagccttccaaatcccccacgctggctggtctttacagcctggaagacttcagattaaagagaccatgaggaatggggaccatggggatagattacttcaggtaacaccacagtgtcacccagctgatggtggccccaatttctgggcagtgggtggggagtggaggcctccagccctcttcgattctgaccttcagctgcagcattccttgagcattcgtggaactttagtactgcaagatactctcaggggaaacagcttcctggggagttcgccaaagaaacagaaccaatacgatgtatagtcatgtgccacataatgacatttcagttaacgatgggctgcatatatgatggggtctcataagattataacactgcattttttacaccttttctttgtatagatatacacataccattgtgttacaattacctacagtatttagtacagtaacatgctgtacaggtttatagcctaggagcaataggctttaccatacagcctaggggtgtagtaggctatgccatctaggcttgtgcaagtacactctatgatgttcacacaatgatgacatctcccaacaatgcatttcattattaagcaatggatgactgtgtgtgtgtatatcctttatttatgtatataaagaggtttattataaggaattagcttacatgattatggaagccgacaagtcccaaaatctgcagggtaagtcagcaagctggagacccaggagagctgacagtgtaattctagtccaaaggcaggcagacttgagacccaggaagagccaatatttcagtctgagtccaaaggcgggagaaggctgatgtcccaatttgaaggccattgggcaggaaggattttctttctcttgggagagggtcagtctttttgttttattcaggcctctagctgattggatgattgcacagggcaacctgctttacttaatttgctgatttcaatgctaatctcatccaaaaacaccctcatggaaatacccagaataatatttggccaaatatctggagactccatggcccggtcaagttgacactcaaaattaaccatcatagcagtcacatgagtttgggagattcttgtaaaccatggccctgtctttggccttccagggcattttagtgtagtaaaggttctgagaatgcagtcaagaaacctatttgacttgttcactcaagtgttttccttatttatttggccatggtactttgtggggactggggaggagggaaggaggaaagggccatgatgcctgttgaatcccatgactctgggaactatccattgggaaacaccgccctggtgatgtaacattagaaagacactgctgtgccagctgcaagaaagcggcctgtccatgactggggctgtggtgcattttgaggcttccaggcactgtcatggtcaagctgcatcccaaagtgaaaggactcaagagagaactttctgggaattctctttcttttcttttatttttttgaaatgcgggtcttgctatgttgcccaggctggcctcgaactcctggcctcaagctaccctcctgcctcagccttctaagtagctgggactacaggcatgacatcccactcagctctgggaattctttctttttctttctttttttctttttcctggagacagggtcttgctctgtcacctaggctggagggctggagtccagtgatgtggccacaggcatacaccatcacacctggctaacttttgtgttttttgtagagacagggtctccccatattggccaggcagctctcaaactcctgggctcaagcaatcttcctgccttggcttcccaaagtgctggaattacaggtgtaagccaccacacccagccagaattcgtaattcggctgcacttagagggtgtttactcggtactggctgagtgctaagtgctttgtatgcatgatctcatttaatcttttcaaccactttttgcattaggaactagtgtctcattttacagataaagaaatacgcacagagttgtgtgactttctcacaagtgggaaatcaggatttgaacctagtcctgtctgactctagaacaatgcccttaaccactctaccctgattcccactgtgtggctgggaaatctataggcaaaaacaaaacagaggcctcaccaggcatatggtttgaaatcaaacagtttatctgaaagtccttaactgataggatgccttttgatggcaaaagggaaaatgaagagatgagggaatgggaggaagtgtaatactgttagggaagacagactttgcatgagggtaagatgtggtcatgtcaaagagggaaaggcagagcatagttcagggtgttctgagccatcatctgccttgttgatgacagacagaccctgctcagctctacatttccttgctgcacgaggccccggtgccctcagaggtggtccctgagagtgcaagagaggtggaggtggtgacaggtggtaagaccctgctgagcaggaccatctttttttttttgaggcagagtttcactcttgttgcccaggttggagtgcaatggcacaatctcagttcactgcaacctccgcctcctgggttcaaacaattctcctgcctcagcctcctgggattacaggcaccctccaccacgcccggctaatttttgtagttttagtagagatggggtttcaccacattggccaggctggtcccgaactcctgacttcaggtgatccacccgcctcggcctcccaaagtgctgggattacaggcgtgagccaccatgcccggccgggagcaggaccttcttgtgctccaatcattggtgtgacttggacaagtctacatactctcaaatatctggtatgttttctatctgctgtgcaaacaaggttgttgcatcctatttttgcattagggtgttccagaaaggaagagtctcgtgtgtatgtgtgtgtgtgtgcgtgcgtgcacgtgcgtgtgtcttcagcaaccagtactcaccagggacctagccataggagtgcccacaagcagtgtgtctgcatatgtgtgtgtagatacataccacacataaatgtattcctgtatcacaaagtacttttaaattctttatatatattatttatataatattatataatacaattaattatctgtctctcccaccagaataaaagtttcctgaggtcaaggacttccttttccctgccaaaatggtgtccagaactttgaggtatctaacaaatattgtgaatgaatgaatggccagaccatgggctgtgatctcttagctaatgtcctagaatttacaccttcagcagagccccttgggaaatggcagtcggcgttgcagccaccttcacctcttcctccaccgtctcctcttcctttattgtttctgcctccttttctccctccccttcccagtgcttagaatcatctctggcaacagctccagcccagccttttgaaaatacacttaatgatggttttgactttttttctaaaagcaacaaaatcatttggaaccaagaagattagctgtttttttggccactgaggtccttaactcagagatgataaatagggcacggtaatcagatgagtattttgttgtgggcagtaaactacctctaatggtcattccccttatagaggagggctcagtatgaaagaacagggacagagagacccaggaagcccctcagaaggggacagacccagctggatgttgacattctggttgcatcgttttctaaagcaatttcctgagtttttgccctcctgtgtgtatttacatagacacgaactttaagcctgacacctcagaagctgtttgggaaggacgggctcgcagattttgtttttgtctttgtttgtttgattgttttttagatagggcctctctctgtcactgaggctggagtgcagtggcgtgatcagagctcactgcagacttgaaactcctcggctcaggcaatcctcccacctcagcctcccaagtagctgggactacaggcacacaccactgcaccactaccactacacccggctaattttttttttgtagagacaggttcttgctgtgttggccaggctggtctcaaactcctgccctctagcaatacgcctgcttcggcctcccaaactgctggggttacaggtgtgagccactgtgcccatctggttcccagaactgaagaaggcccggaacctagagggtggatgaactgataatgggagtgtttccttgtaagttgccttgggaagtagtgtgggtggtttatcttgggcatttaagtccatgagcgtgatcagaagaggtagaatgcttccagggtgcttgttggtgagacctcaggaaaatggacaaaggaaaagacagaaggaaaatggacaaagctcgggatttgcacatggcctgctgtagccaaactacccttaggatttagcccttctccctgccaagcctctctgaggtcgcgccactgcactccagcctggcaacagagcgagactctgtctcaaaaaaaaaaaaaaggtgtggtggcatgcacctgtagtcttagctactagggaggctgaggcaagagtcacttgagccaaggaatatgaggctcaggagtttcaggttacagtgagctatgattgtgccacttcactccagcctgggtgacagagtgagaccctgtctcagaaaaagggaaagaaaatctaacctataaattattttccaacataatgaaatgtttacgaatataccgttaatgaagcaagttgacattaggttgtgctttgtggacatttaattacacatttaaacattttgatcttgcatttttccttttcatatttggggattaaaaatgtatttgcatatttcaagcatgttgaaggtctttggaaaaactcaaaggccagaggctctgtgcctacagggctgagtggacaaaccgcccctgctgcggccctgagaaattacagaataaggaagaggcaagggaggaagctggagaaaaatgaagcattgactggagatgtgtctgagggtggtaggtggggttggggctgggagttagggcttggttctcaatggttctctgatatctagttcatttaatccccattgcctggggagctcttcccctaactctccagatacccattagctcccttcctctcttcattaaggattctactcaaatgtcacattggttaaaacagtgccccggccgggtgcagcggctcacacctgtaatcccagcactttgggagactgaggcaggtggatcatgaggtcaggagttagagaccagcctagacaacatagtgaaaccccatctctactaaaaatacaaaaaactagccaggtatgatggcaggcacctgtaatcccagctacttgggaggctgaagcaggagaattgcttgaacccagaggcggaggttgcagtgagccaagatcatgccattgcactccagcctgggcaacaagagcaagacttcgtcaaaaaacaaacaaacaaacaaaaaaccagtgccccatccttgcccatccttgtctaatacaagatgtagtgctaagaagccattaatgccatgtggacaaataaacagactaattgggtagggagagtcctctgttgtcgattagtctgtttacttgtgcgtgctctgtcttgatccgcctcctgcgggcagggaatgtgttgtattcaccagtgtctggcacctaaagcctccacaataaatgcgtggttgttggcacaacaaatgaacaaatgaataaatgaatcttggccctccctgcctccagtggctgttgggagaatcaggtgagagaaaatgcagtcttcaaaggataagctgatgtgccatcggccccaggagccacagcacattttctctttctaggagtccttaaaatgcaggcagaagctcatcctcagaaattctgagtcagtcggttgggggcagagaccagcgatctgaatttaacaaactctgggtgatactgatgctgctggtcatcagcctatgctgggaggagcctttgctgacaactagctgtcactttttagtcattttgctgagcgggacacaaatgtagagccacaatgcaatgtgaccgtagagcccatggttccagagtcgggggttgcccctctccatgtttgagggccgaagagcctgcatcgagcagagccaccaggctaaatcctctgaccttgactttggtttagggaccagagtctggtatctaagtgcgatcttactctagctttcccatctgttctgtttaggccagaggtgatccagtgatttgggagctgcaggtcacacaggctgctcagagggtaagttgggtccagtcgggccagcagggccacatggccgattcacactcagtccaaaaccctcgtggctgagcattgatgcagaccatgctgtcttgtgggagtggtctgggtgcctctaggagggcagaaataccacattactgccgggtgaccttggaaaggggcacagaggtgctggcactgggatgctgagcagccgaagccagcgagacccacgtggagagagacagctagcttgcttgcttcctgaaagccagacagagcctctcagcctaatttgcttgtgccaggcagcctgtgaattcttatagccaaaccacctggtgggtgactgttgacatgggactgcagggtcctggcagcccagccctagcacagacaccaggcagcacacagacctcaggtcacataggcactggccagtctttgaggacacagtgtctggctgcagttatttctacctgcagtacagtctcgggcccctgagtcaacaggcaggtttgagaggacttcaggtcttggccccaaaaaagtgcacacgaccaggttcacggtcacctcaggctatgtggccccactcattgattcatacttatgttcattctacagaaattattcagcaccttctacgaagacacaaagaaggaaaggagttcccatctgtccttaaagaacttaactgttaaatgatgtcccaggctgggctcagtggctcacgcctgtaatcccaacatcttgagaggccgaggcaaaagggtcacttgaacccaggagtttgagaccagcctaagcaacacggcaagactctgtctctacaaaaaatttttaaaaattaaccaggtgcaggtgcatgggggtgcatgcctgtggtcccagctcctccggaggctaaggtgatggggcgattgcttgagcctgggaggtcaaggctgcagtgaaccaagatcacaccactgcactccagcctgggtgacagagtgagaccctgtctcaaaaaaaaaaaaaagataagcactacatagagcagtgggcagcccccaaatgcatagagctggcatgcagcaggcactcagtatatcttggttgaatgagcaaggtgctggaggagctaggaggagagagtgagaaactggccggggaaagctcctgcatgaaggaaaaggaaaaggcattctacatgaaaggtgtgaatgttacaaaatatatgaggagtaatgtggccacgtggagaagtaagagctcacttccattgagcgcttcatttcaaccaggcattgctctgaacatattacacatatcatctctttaacctttgagatagggcctattgttgtcactcccattttacaattgcacagcctgaggcccagagaggctgagcttaaggccatgcaggtagtgagtggcagagtcaggtgttaatccactcaccaatgggcacttaacccaacctgagcctccacttctccatctgtaaaatgggaacacccgggcttcccctgacagtttcttggacagattaagaaagctgtgcatgagtgcacatggaatgtctgtgaaaaggttacaagattcacagaaaacttgctaacaatggttacctttggggaggctgcctagaggaccaaggattagagaaagtatgtatcagtttttggatctctttttgggcctctagcgggtgaaagttaaaatgacaagcagcctaaatgggaaggagttggagggtgggttaagtttgaaaggagaaagagcagttgaggctggagaaaggatgttatttgactgtagcgaacactctgcctgcaccccccagtccctctctctttgaggggaaggatgccgtggcgacggtcttcctccttaatatagtatgtacattttatctctgcagacttcttgcagacttggtttaaagatctcagctcaataccattagtgtatatctgcagagggccctttgtaaaattgattagaaagtgggcttttgcatgtggggtgggggcgggggtgggacctaatcggatttgagcatgagatggtatctaattccctgcatctagcaactggcttggggacctccctgggagccagggcccccctaatttggtttgcgaatacattagccaaacaagctaagggggctccttcggggagagggtttttgggggatggggatgggagatggtgggaaggctgaggaaatgaagaagggaagggttttctgtgcaggtcctggagtataaaccgtacatgcgattgccaaggctgtgcatgtctcatggttttaccccattcgggagaatgaagcaaacttttaagaggaccaggctgggcctggtggctcagtcctgtaatgccagcactttgagaggctgagggggggtggatcacctgaggtcaggagtttgagaccaccctggccaacatggtgaaactccgtctctactaaaaatacaaaaactagccaggcatggtggcacacgcctgtattcccagctactcaggaggctgaggcaggagaatcacttgaatccaagaggtggaggttgcagtgagctgagttcatgccactgcaatccagcctgggcgacagagcaagacaggtctcaaaacaaacaaacaaaaaaagacttggtgtattgcttaccatttattgagccgttatatatacattttgtttcattttttcagtcttttaaaaaaaagtaatacattcacatgtgtaacaaaaatgtcaaacactatgagagtgcaggcagtgactggtagggtatttttcctcccctaatccttggtcccctagacagaatccctaaaagtagccacagttaccaagttttctgtgaaccttacaatattttcaaaaattgtccatgtgcactcatacacagctttcttaatccctccaagaaacctgcagaggaaacctggtgttcccattttacagatggagaatggaggcacaggttggttaagtgcccactggtgagtggcagagccaggatccaaattgtgaatgatctggtggtctggctttatatcccggggtctttctgtgaaatcatatgctctcttatatgcctttcccagaaagagagggggctgttcagagctataaacacagcaaatatttgagttttcacttctccaactcttttcttcttattttttttatttttttattttttgagacagagtctctctgtcacccagactggagggcagtggtgtaatctcagctcactgcaacctcccccttctgggttcaagtgattcttgtgcctcagcctcccgagtagctgagattacaggcaagtgccaccaagcccggctaatttttgtatttttcgcagagacggggttttgccttgttgaccagtctggtctcaaactcctgatctcaagtgatctgcctgcttcagcctcccaaagtgctgggattacaggcaagagccaccgcgcctggcccattcatttcttcttgggtccatccatatgctatcgttttgtccacttatacccaagcatcctaaaaacaggatgcaaggctgggcatggtggctcatgcctgtaatcaatcccagcactatgggaggccaaggcaggcagatcacctgaggtcaggagttcaagaccagcctgatcaacatggtgaaaccccatctctactaaaaatacaaaaattagccgggcgtggtggcaggcacctgtaatcccagctactcgggaggccaaggcaggagaatcacttgaatctgggagaaagaggatgcagtgagctgagattgcgccaccgaactccagcctggacaacaaagcaagactccatcttccaaaaaaaaaacaggaggtgaacttgcaagggcatctttactagggtctccttcagtttagtacccctttatgagagtgaggggtggagtgtgttgagtgaatccttgcctgctttatctggatcttgagttctgcccacttcctactagacactgtgtgtgttgcaggaaggaggatgctggtggcagcacgtgctgcaaattgtgtggcagcatccagcttcataacagataatcacagtatcaacctcggagggttctttggagggtggaataataccatggcatggtacctggtacatggtaatctctcaataaatattagtggttagtagtatcactagctagagaagctttcgtacattgctcatctgttctgtgcaatttgcctcaactataagaatagtattctgttatcatcacactattatttaatatttaatatttttaaacaatctgtgtaataagctggtatcattttaaatacaattagcgtagtgtcaggtatacaaaagatgctcaataaatatgatttcccactttattcccgtctctttaccagttttaaatcaagatcttgattcttctttatccttgttgtgaatctaatttctgtaaagtgagtccatttgtattcccactcacatttattgagaacctgctgtttacttggcattctgctctgcgctgcggggcacacaaagaagaacagacctcggactccgccctcacaggatgaaaaatcaaatcaggaagactgagaacagaggcatcaattgcagcccaagctgttcgcagggtttggggcatgctcctggggtacaggaatagatggagtggcttcatgttcttcagtacctcagtttccccttctgaggagtggaggtagttccctttcttgtttattggtatttggaagatgtggaacaacctggctgatgtggtttcagtcttgtgggaaccagtgggctgagcccctttctttacccctctacctctccctcaccaccaagtaccctatacctctctcccaccctaccctggctggaagctgctcctccgctgggctgtcgacctgggagcctccatcctcctcctccttgcaaaccacaccttttcaccagatcgtcatgccaaccccatcctcccccaacaaagaaggttttgtagggaccagaatacctcagctttggatgctgtactataaaatccagaattatataactgctggattatggagtgattattagctttgctgaaagattttccatttacataaggattagctgcggggttcctttaaatagctggctttgctaatgcatttgtattgcaaagaaaggtgggtgggggaaataaggacaggattgtgaagcagaaggcccgagctgcagtggctcaggcctctaatccaaatgactcaggaggccggggcaggaggatcgcttgaacccaggagttcaacaccagtctgggcaacatagggagaccctatctctacaataaattaaattaaattaactagggatggtggcttgtgcctttagaaaaataaagaaaagaaggctcgagttctaagccagctgagtaactggtcattttacctcttgaagccttgggtttctttgatgaggaaagtgagcggtgaccaccctacccagacccagcattgcaggagaggactgtgcaggcagtttccaaagagctgggcgcaggcggtcaggtgaggcaaacctgcaccgcagtgctgttggtgtgatgagcctgcccctcaaagggtgatgtcgaaacccctggtgttgaatcttctagctggcctctgcccacctgtccatgctggtctcctgacagacccccacctggcttcttcctgtgccccggcgccggccacacacctgtgtcccggacttcccatgccaactccagttccttggctgtatactgctgttccctatctctgtgacttgcacatactggtcccagtgcccagaacaccattccccaccctcttcccttcttggcctggcaaacacctacttgtccttcaagacatagcctaaacttctcctccaggaagccttccctgactcccttacactaaggagggttagacactcctctgcactcgcaggtcccatgaatatgtgtgtgtgaccctatcgtattgctttgagatccttcattgtccagtgactttatggtcattgatcacttatttgtatctgccatgagctactgagcttaggggcagggtccctgttgtgtttgacttagtagatgtgtagtaaatgaaataagtaagcgaatagtaacaacttctcatgtgcagcaggtgtttcatccccagccacatgcagcagaggcggcccccgcaccgtcccccaccccgtaccatcctcacccctgcaccatccccacccctgcaccgtcccccgcccctgcaccgtcccctgcccctgcaccgtctcccgcccctgcaccatcccccgcccctgcaccatcctccgcccctgcaccgtccccgcccctgcaccgtctcccgcccctgcaccgtctcccgcccctgcaccgtccccccgcccctgcagcgtccccccgcccctgcatactgcatgccctgaagcacaaaaaccctggtgttagaccacaggggttcaaataaatcctagctccaccccagctgtgaccttaaccaaattattttgctcccgagtttcttcatctataaaacaagatcataatagttctgaccccttagggttgctgtgaacaggaagtgagttaatctgtgttctgtacttagagcagtgcctgggcgcagtaccttctgcgtctgatggcggttttcatttcggagggccctgagttgtgcccctgtggttcctccccagctcagtcccctgtgttgctgagcttgcagtctctgcctctgcctctttcttcgcttgctctagtgacctgtctcagatccccactcccccaaccagtcagcacagaaataatcaaattttacttgattattagtcattactttctgctgctgtttttgtttgttccttaaaaaaaaaaaaaaaaaaaaaaaaactattctagatttaattgagttgattgattagcacaatcgctgattggaaggagatactctgtaaccctctcctcctccggtgccttttcccagagaggcaccaggtggactgcccgtggcctggaggtgcagtggcttgtggtggctgtgtgggctgggagcctggtcctcccaggcctagtgacctgaggcaagtccccggccctctcagggcctcatctgtaagaaggggattgaagtaaatgagcctctgaatcccctcacctttaaattctatgaaaactctacacctgagtgcccctagccttggtttgtgagtcgcccatccattcaatatcacagctacctctgggccagcacttctcagggtgctgtgggggcccagatgtgagcaagtcaagagccctgccctctaggagctagtagggtggggttggggactggcaagacgctaactccagcatttttaacttagtgtgttccaagctcagtggagtttcagaggggagtgcctaattcgaacagttgtagaggggtgatatttggattcagtctaagacaaaacaccttgtacaaactttaggggtgtggagagtgaactttatagaagccacctctatgtgctgagtacagtggtaagcacttaaattgttttaaaactttttatatcaaatagagataggatcgccgggcacagtggctcaatcctgtaatcccagcactttgggaggccgagatgggcagatcacgaggtaaggagtttgagaccagcctggccaacgtggtaaaaccctgtctctactaaaaatacaaaaattagccgggcgtggtggtttgcacctgtaatcccagctactcaggaggctgagacagaagaatcgcttgaacctggaaggtagagtttacagtgagctgagatcgtgctactgcactccagactgggcgaaagagtgagactccatctcaaaaatcaataaaaaattggtaaataaatagagatgggggtctcactgtgttgcccaggctggtctcaaactcttgggctcaaatgttgctcctgtttcagcctcccaaagtgccaggattacaagcatgagccacggcgcctgacaagcactttcttttcattttctttttaatccccacatcaaccctctaagtaaaaggatatgatatcacttttatagacaaaacacccaaagctcagagaggataagtggcttgcctacagtcaacagcaagcgagggagaagtagactttgaatgatgtcaaaccttatcctctttacacagtttcataccatattacagtattaaataatttgaaggtaaaataatcagctaatttcccaaatgtcacttctatgtccattttggaacatgatcttccatacataccctttttacattacataattagagtgatgtaccattttccctttttttttttttttgagacatggtcttggctctgtcacacaggctagagtgcagtggtgtgatcatagctcactgcaacctcctggctcctgggatcaagggatcctcctgcctcagccctccaagtagctgggctataggcgcccaccaccacacccagctaattttgtatttttgtagagatgggtttttgccatgttggccaagctggtctcaaactccagttcagactgcctttgtctcccaaagtgctgggattacaggcatgaacctgcgccccgcctctatttttttacttatagcattcctccccccgtctctgcttttttttttctctctctctctttttttgagatggagtttcactcttgtcgcccgggctagagtgcaatggcgtgatcgtggttcactgcaacctccaccttctgggttcaagcaattctcctgccccagcctcctgagtagctaggattacagataccctccaccacacctggctaattttgtatttttagtagagatggtgtttcaccatgttggccaggttggtctcgaactcctgacctcaggtgatccacccgcctcggcctcccaaagtgctgggatttcaggtgtgagccactattcctggcccatctctgggttttgttcattgactcatatatttaccgagcacctactatgtgtcttgattctgagataaaacaattagtccaagaccctgccttcagggaacttaaacttaggtggacagatgataaacggagaagcaataaaacaaataatagaatgtcagatattaagaatggctgtgaagaaagtaaagcaggataagatgtagagtatatgaaattagccgggcatggtggcgggcacctgtaatcccagctgctcaggaggctgagacaggagaatcgcttgaacccaggaggtggaggctgtagtgagctgagatcatgccacaacaatccaagctggccaatagagtgagactccacctcaaaaacaaagaaagaaagaaagaaagaaaaagatgtagagtattgataggggtcagggtgtcttccctgaaacatgacatctcagcagagacctgactaatgatgaggtgagctgtgtgggtatctgggtactccaggtagggggagcagtcagtgcaaaggccctgggatggtgatgcccttggcacacttggggaagagcaggagaccagtgtgggtggaatgtgggaaggtgggatgtgaagttggaaaggtggccagggtcaggtcacaggctttgcaggctatggaagagactggcttttgttcctagtgtgtttctctggtgtcttctagttcccattattccataattcaacccagtggatgtggtgttattaatcaacatcgatgttgtttcctgcagcgtctatgtgtgcctgtgtgcgcgcatatgtgtgtgcttgcagcgaacacacatttcaagcgtatttcaagcatgtgacttttgactatgttggggtaattctgtagcagcgaaataactggttggaagtgtttgctcatctttttggctcttgacaggtaaaactatagtgtgacttctggtgacaagagctgaaggcatggcaggcagtggatctgcggtgcaaaggtgcagaggcagaaagaacaagccttcccagaggcccgaggcatcacacagatagtccctggccataagggaggagccactggagaagcaggtgcctcgtgaggacaggtgggcggtgggccaagtgagcgcctcctctctcctccaagaggcagagccaggtggggcttttacatacttttattttttggtgggggatggagtctggctctgtcacccaggctggagtgcagagacacaatcttggctcactgcaacctctgcctcccaggttcaagtgattctcctgcctcagcctcctgagtagctgggattacagacgcccgccaccatgcctggctaatttttgtatttttagtaagacagggtttcaccatgtttgtcaggctggtcttgaacccctgacctcaggtgatccacccacctcagcctcccaaagtgctgagattacaggcgtgagccactgcgcctgacctttttccacttttgaaaaaactttttaatgaaattgttttttggctttacagaaaaattgtcaagatagtgcagaggactcctgtataacccttatctggttttcacttttgttagcttcctatgttaccatgatagatttgtcacaactaagaaacttaccttggtacgttactatgaactaacctccatactttattgagatttcatttatttttccattgatgtcctttttctcttccaggatcccatgcagaatcccacactgcatttaattgtcatgtctgtttagtctccccttgtctgtgacagtttctcagactttccataattttcataaccttgacagtttttgtttgattgtttgtttgcttgttttgagatggagtcttgctctgttgcccaggctggagtgcagtggagcgatctcggctcactataacctcccacctcctgggttcaagtgattctcgtgcctcagcctccctagtagctaggattacgggtgcctgccaccatgcctggctaatttttctatttttagtagaaacagtgttttgccatgttggccaggctggtctcaaactcctggcctcaagtgatccgcccaccttggcctccaaactaactgctgggattacaggtgtgagccaccgcatccagcctaaccttgagagtttttagaagtgctggccaggtactttgcttttccatttttcaactatctatttttatttggaatcgtgatgttgagagtctgtaaacttttttttttttttgagacgaggtttcactctgtcaccctgcctggagtgtgatggcacgatctcggctcactacaaccttcgcctctcaggttcaaacgattctcctgtgtcagcctcctgagtagctgggactatgggcatgtgccactatgcctggctaatttttacatttttagtagagatggggtttcaccatgttggccaggctgatctcgaactcctgacctcaggtgatcttcctgcctcggtctcccaaactgctgggattacaggagtgagccaccgcacacggctgagagtctgcaaaatgttgagatcgagcttagaactcaggaatcaagggtgggggacacggtgctgggttcagtcctggccttgccccctacccactaagtgacattgaacaaggaaatcttccatgcttcattcttatcctgggggtgagaatattcacccccaagcctcatgagggttagctgggataagacatggaaattctcatgaacttggggttccttctcagtttcattgctgggtaagcccctggtgagactgattacctgaagacattcacttcctctcacaggagctggggctgtgaaatgccagagtgaggatggcggggaggttgtgacaacttggcaggaagcactttgaaggtcgtattctatattgatcctcacaataactccatgagttatggtagtaaaatgggttactgtaggctcatagaaggtcaagaacctgctgaaggtcatggaggaaagaagggcaaagttaagacttgcacatgggccatgagaccctgtgctctttccagtttaggctggcctgagctgcccggcagagggggcaggcagctctggggtggatgtgggcaggaaagcccagagccctggatcctgggatggagagggtctgtctcatgggtcaggaggactggggttcggctaggggtctgactcacggggcaagaggctagagttatggattctcagtctttacacaccatattggtctcaggccattgcattacagcaagtgtttcattttgtaatgtagattttttttctctaggtaatttcatttttaacccttgagttacctgtgaaaccagcatgagcaaatgagcaaaaggctcatgactagcgggcagcttcccaggtaaatctcaggaccaatggtccagcttcctgccagagagccaactgtcttacctcctgtttcatgtatcttcaggcccccccagcagatggtgagggctctctgttttccaggaagggacaaagaatgactgaagccagacagggcaagtggctgtctctaggacacacagcttcagagcagacaccatatcagtcactgggctctttctaccaaacgtaataagaactcagaagacactcgtgctatttattatattttaaaacttgaaatgtaaactacaaagttgcagttccgacattaatgggagagttgggaggccacagttctaagtgcatgagctaataggtcttctcctacagggtgtgagtgtgtgtgtgtgtgtgtgtgtgtgtgtatgagagagagagagacagagagcaacacatttaggtcagtgcactgtgaggacaaaggacaaagcaattttggcacttgggccaaatggccaaaaattactttcaattcaaccaaaacacacagaggttggagggatggacggtccttttcaaaaaggggtcccctggaaccggtggccaccatgccctttgtatcaggggttcccatttcatccacctcaaagtttctaaattcagagcttgcagaccaccctcacacaccccacctgtgcacatggatgacatggccctgctgattcctctggctctaaatgatacctcttctgcctgtcccctgcagtgaggtgtgcccaggtattcagacccctgcagtgtctcactgagcaccctaagcactcacccgtcatcctctggttccttggggcccggtgctggccttggaacactggtcccagtactcaggcagtccaggaaatagtctgtttggcctgccagctgtcagcagccttgcccctcctcctagcctggatccagccggaggaggacagagcccgtttctcttctgcccacctttaaaggctaggctggccaggatagggaagaagtagccctgtctggagtcacccctccagagatgtgtaaccccagagtggttaaaatcccatacattagcatcaggatggcttagagggcaaatctttgcctttccatgtgcatggaaggtgtggggcccacctgacaatgtctggtgcctcgattgattttcccatgtataaattaggatgaaaaatccagagttattttgagaagtaaataagcttatatatgtaaagcgctttgcacatagcaagtgcttaaaaagaaaggaaatgtagtattgttattcggttatataatatagcagcatttgtgtctctttttcttccaaagagcttgcacatctgtttactccatgtacccttacaacaaccaagtggagtagggcagtttttcttggatccagtttactgatgcagcagctaagatgcagtgaagcgtaatgacatgcccaaggccactccacaaagcagcaggggcactgaggtccctggagggcacaggctaggttaggtgtgtcccagtctggctcacctgcagccagaattcctgcctgccacagctgcccctccagtccccctgtcactcctccctcccctccctgagaactgctgtcttccacaaggacccctcactacccagggagggagggtgtggttgggcactggtagggggtggctctacctcttcagccagtggcagggctctgccattgccagcagcatcttgcaggatgaaggttgcatcagtgagcagtaattgaaatgcaaaataacattttgatcgagccagcaggctgtttatttatcagatcaatagtcaaaatgccccgtctggagaagctagtgtgataagtgacagtcttgccaagggcagtcctggtggctacagtcccctccctcaaaggcctggattagaaggccaaggagcctgggagtgacacctacctctgcttctcccttacagaatgtgggcatgcacacgcacagcccttgccacatttccttcttttttttttttttttttttttttttttttgagatggagtctcactctgttgccaggctggagtacagtggcgcaatctcagctcactgcaacctccgcctaccgggttcaagcgattctcctgcctcagcctcccaagtagctgggactacaggcacgtgccaccacacccagctaatttttttttgtattttagtagagacaaggtttcaccatgttggccaggatggtctcgatctcctgacctcatgatctgcctgcctcggcctcccaaagtgctgggattacaggcatgagccaccacacccggccgacatttccttcttatactcagtttacagaggagacgactgagaactatgtgggcagggaccacccttgctgtggctgccaggacctgtacccaagattgctgagataacagcacatattttcgagcacttacaatatacaggtgcccaatgcttcacattattgggtcatttactcctcagaataattctgtgaggtacatatgtctatattacccattttgcagatgaggaaaccaagtcctagagaggtcaggcaacagttgcacagcgagtcagtgacaggccgggattctgacccaggcgagctgggcccagagccctcatgcccaggccctgtcagttccctctctcaagggcagggggccgtgaaacatttttgtttacacagtggggttgtggctctgaagtcaagcaacccctttccagccccacttcccacagtttctttacgaattacattgattttgtgttaaaatttagtttttagcattttgaaagcagatgtctcaatgagtggctctcagactagcctctctaagttgccagcccaacacattaagtggcttggggtacttacacaaaagcaaccaaaaccagaaaataagaaaaatgcatatatctttcataacctttttttttttttttttgagagagtctcactctgtcacccaggctggagtatagtggcgcaatctcggctcactgcatcctctgcctcccgcgctcaagcaattctcacgcctcagcctcctgagtagctgggattacagatgtgtgccaccacacctggctaatttttgtatttttagtagagacagggtttcaccatgttggccaggctggtctcgaacttctgacctcaagtgatctgctcactttggcttcccaaattgctgggattacaggcgtgagccaccgcgccatcctttcatagactctttaaaccaggatgatcagaattcgatcgaaactgatggcaaggtggatcctttaagaactttcgtgggctccactggaccccaggggctctgtgggttctgctcctggggcgctggtggactccttttctcggaccttgatcctgtcctgtgactcagaccggtgactgtcacatcctgagggagtgcaggcctctggaaactgtaatggttgtttgactgaggtcctcagatcccacctaaccctccttactcattcaacaaatatttattctgcacctactgtgtgtctattctagacactggagtaggacaggaaagaaaacagacagcctctgccatcatatacggggagcaaagaccctgaggtgggagcgtgattggtgtagtcaagaaccagccaggaggccagtgtggctgggatggagtgacctggggggagagtgggcaggagatagcatgacagaggttggggggcagatcctgaggccttctgagctgtggaaaggactcctgcttcactggagcccctggctgtcttcagcagaggaatgttgtgacttacaccccttcatgatgtaactcatgacagcactttctggctgtgtggtccctgccgagatatttagcgcctctgggcctcagtttgctcctctgcaaaatgggggaaatgatagtacttcaactagttgttgcaaggaatcagtgatttactaaccattgtcccgagcatagagcaagccctccatatgtgagcactgttgttgttacagagatcagaacagggttctcagctggctacagtggccagtctccatctgtccacctgagttaagatgcctctttgtcatctgcccaggctgcccatttgcacaaagactgaaaaattgagtcaggatgagccctaagcttcctatgtgggttctgctcctggggcgctggctgatcccctttcttggaccctgatcctgtcctggtgtgcacaaggctatgtagaaagggccatggccatgaccagggagtggatagaagtgtcgtccccttcgttgtgtgggcctgcacactgtcctttgggaatgcacagggggcagcagtgaggctcagtcacatgtgtgatcagagtggaggtcagcaacataagccaagcaccttaaacgccgattccatcctgggttgtataagcagaagtatagtgtctaggatgagggaggtgtcagtactgctctgcactgcactgggcagagctcacctggagagctgtgctcagttctaatgctcttttttgtttgtttgtttgtttgtttgagatagagcgtcactctgttgcccagactggagtgcagtggcacaatcttggctcactgcaacctccacctcccaggttcaagtgattctcctgcctctgcctctgaagtagctgggattacaggcatgcaccaccacgcccggctaatttttatatttttagtagagatggggtttcaccatcttggccaggctggtctcaaactcctgacctcaagcgatctgcccgcctcagcctccctgaggctcacacctgtaaatcccattataggtgtgagccactgcgcctggcctgatgctcttctttaagaagagaagacagagcagatgggttattctcagaagtgcaggggatgttgaccctggtgaggagaggggaggatccacagggagcaggagctgccttccgcagtctggagggctatctcatggaagggcttagacttgttctgtaggtcatgaggggtggggttgtataaactgtaactggaagctcagagggaagaaatacttttacttttcgcaaaaaaaccttttatttttatttttatttttagcattctgagcaagatgtaaatatttgcctcctgaactagtgatctccctatcactggggtctttataaggcaggtagccacatggctgggattcagggaaagggactcaagcatcggatgggggtgggttggatgccctttgaggtcctggcctgcctgagcgcccctggctgtgcgggggttctgcctgcccctccctcctcacctccttcctccccctcctcctcccttccagcaacagatttccctgctgtccctccaacatagagctttccctgtgcggcccctccctcttttcttcaggtatctgcttaaatgtcacttcctcagagaagccctctctggcagctctatctggacactcccctgacccaccacgctgtgtcctccctgctggttttttgtttgttttttgagacagggtctcactctgttgcccaggctggagtgcagtggtgtgatctctgcaacctccgcctcagctcactgcaacctctaccacctgggttcaagtgattctcctacctcagcctcctgagtagctgggattacaggtgcccaccaccacgcccagctaattttgggagcctcagcctcccaaagtgctgggattacaggtgtgagccaccacacccagccctccctgctgtttctcatagcactcaccactaactgcattgatactatttggctgtttacttatcatgttaggggggatgacacttgtcattatttcatacaatcccagtgtttcagttgcttaacacggcagaagcaggtcttgcccagaggacattttggtgagggcgtttggcagttggcctttcacaaggtgttcaggggcccaggctcctgctaatttgtggctctgctatcccccagggtcttggagccccctggcctgaagatgggggaagagagaggaataggagacaggaggggagggagtggagtggggaaggagggcaggagtctgtgggagatttttatgggccagataagggagtggcttatattactttgcccacatcccattggccaagacccagtcatatggccatagccaactgccagggtgactgggaaatgtagtcctcctggtgtctagcaagaaaattaattaacttttggtgaactcatagcagtctcagctacacttatttatcacatgtcattgaatttatgacatcatctattgcaagggacaccatgatttctggaaccactaattaaattaaattaagacatgccattgatttcaggtgaattctgattgccaagatggtaaaatgtggaaaaatggtacagctctgagtcaatgaaccatggtattgtctctccttgaggacagggacccattcaccttgctcaccaacgtattcccagagctgcaagagtgtcaagcatgcagtagatattcaaagaacaatagttgaggccaggcacactggatcacacctgtaatcccagcaatttgggaggctgaagtgggaggattttctaagcccaggagttcaagaccagtctgggcaacatggggagaccatgtctctacaaacaaacaaacaaacaaacaaaaaattgtttaaagacaatagtagttgaatgagtgacagtgtgtgagctactcttttgtttaagtgtgagaagcccccttgagtaaactacagtgtcagggaatcaggccatgctcgttcacctgagcagagatgctgcaggggcatgggaggaattgccaacagtaactggggcttctaggactctctgcctcaaccgttccttctctctgctgccagcttcgatattcttctctctcactgcacatgggagggaagaatgaccttgctcagctcttgagctgtccatcttactgcctctgtccctggagaggcagccctgacaccaaaaatctaatgggagagactcactggcccagcttggatcaggagcataccctgggtcaataagctgagccaggaaggcagatataggatgtctctaagaatatggcaatttctgcaggagctgtgtgtgtgtgtgtgtgtgtgtgtgtgtgtgtgtgtgtgtgtgtacgtgtacatgcatgtgcacagaaagacaggcaatgtatgttggggtcagacgtccttcacaggagagaagctagtgcttggcagtcagttctagcagtgcctgaatatgggacccctttgcctgaaaagggactgtgtcagtgaaagtaacaggcatgcaaatacataatgaaatgggtgggtgggaagatgcatggatggatgaatgacagaaggagagagggagcaagacagtcttacttgctttaggattaaacattttaaagaatctaaatggaagctgtctcctcattaccaaatagggatgctaaaaacaactcttaatatttattaagtacttcctgtatgccaggcattgttctaagctcttttctgcattaactcactaattcccaagaccatcttgtgagatgaatactacgatgaatactataattcacatccccattttacagatgacaaaactgaagcatctagaggttaaataaccccattcataaggggcagagctaggattcaaacccaaacagtccagctctaaccacaaagctctctggcccagcgccatggctactatgaggattaaagccatctggaggctactgagtgtgttcaatgacagtaattgggttatatatatgtttgagatggagttttgatcctgttgcccaggctggagtgcaatggcgcaatcttggctcaccacaacctctgcctcctgggttcaagtgattctcctgcctcagcctccggagtagccaggattacaggcatgcaccaccatgcctggctaattttgtatttttcgtagagacggggtttctccatgttggtcaggctggtctcgaactcccgacctccggtgatccgcccaccttggcctcccaaagcgctgggattacaggtgtgagccactgcacccagccatgagataggatatttatgccacatcactgcttgatatagagtgaaaataaaaacagatttaagaaaagttaagctaaatttacagatgtcagaactccaatagctactgaaaagaaggatactagaggtgagtttgggggcatattctgaattttcgatgtccttccctcaaacacacccctttgtggtggtcagagcccagagctggccaaggctaggtggactaaagtgagagctaccaggtaccattgggccctgcataaggacacttgactgacaggacccaagggagggctgaagtttcaaaaagccagcagcggccactctccgtgagcctgagctcatgtgtgctgggcttggccagtgaactgggatctcccagctgtcccagggcagccactctgcctccaattgtctcttcctgccttggtagagcctttcttttctcactgtgatgcctgcagcctggaaaatcatggataaaaagccctgattgaaaggcactaattacccatcattattttccatgccgcaatttgtgcggaatgagatttcaatcagttgtcggggatcagcctggttttgactaatctttctaacgacaagatgcttaattacagatttttacctgagctccagagcgtgcagagggaggcaactctcgctgaagccaccatgctcttgggtcatcctgcagccctgggtcccagagggcccccaaggggagaaagagaaagaaatcattaggaaaatattcccaaggaggccaaataaaatggcaccaccacagagagggggctgtgttagcaacatggacatagagggtatcggggggctgctttctaagtcaactcatcctccagaacaggtcaccacttgctgtgtctctattgcccccatcagccccagcctcccccaaagcagcctggcattctagttagtaagtttgagcaagtcattagtttcttagggctgttctattatctgaaagtcaccagggtagtcagaaaaatctctgagaacttatgattcagtgactccagctgtgctgaagtgtgtgtccagaaaagtgttacctattgttgaaagctgaaagatacacatacccaagattcaatcacacaggagtgattaaaaaaaaacaccatctattaataaaataggcagttcaggccaggcgcagtggctcatgcctgtaatcccagcactttgggaggccaagacgggtagatcacctgaggttgggagttccagaccagcctgaccaacatggagaaaccccgtctctactaaaaatacaaaattaactgggtgtggtggctcatgcctgtaatcccagctactcaggaggctgaggcaagagaatcgcttgaacccgggaggtagtggttgtggtgagccgagatagtgccattgcactccagcctgggcaacaagagtaaaactctgtctcaaaaaaataataaaaataaaaataaaataaaataggcagttcagattactcagagggaaggtcaatttgaattgatgaaaaatctgagcttaagttttgtgtgtgtgtgtgtgtgtgtgtgtgtaattaatggatctcagtgcacagaattggattcttcattatcgctggttcgtaacacttaaccattggcctacttgccccttccttccttccttcctgcctgccttcctgccttcctccattccttcctttcttccttccctaccctccctcccatgtaataagtgcccatgaatccatattcaacaggaaaactggaaccttgacagtaattcgcatctagccacatggtcctccccatcctaccctcctgttaggggcattctgcaactttaatactattttaaaggaaatttagttacagtatagtagttctaggtgcctgaggggctgatttgtgactcataaagccttgctggagggtctgaggatctgctttaatggatagctcttgatggcccctggttagcaaattaattattgaaatgtacataagaatctctcaagtgttcagaaaccatttttcttctgtggagtggattcccatgtcagtcttgtttatcctcttaatttgcccagctggcttctttccctcctggtctatggcaagttccttgaagaatcatcctcaattctaggtctgggggccttggatgagggaaggggtttgctgggtttaaccacaggcctgcccactgctggactttctcagaagaatcacagcctcaggcaacatccactgagtgcctgcttgtcacctgcgctgttctaagcattgtgccttcattggctcttgctcaactctgtgaaggaggtgctgtgattgagcccattttacagatgaggaccctgaggtccagagaggatgacctgattactcaaagtcagcagcaattagggatagaactggcacgtctgctaccagcatgcaggcttgtagccattaagtggcccagctgcttgttccagttcttaaatgcatggccccagcagggatgaggctctgggggccgtccttcagcctgacccagattcttgggtgtggtgggtagattctaccccatagaggaaagcaagctggacgcttatcaggccagtccattcctctgcctgctgccctctgaccagcagcaggccacctagtgtgggaaagatccttgagattccagtgtaaaaaacaatgagaggccgggcatgatggctcatgcctgtaatcccacgctttggaaggctgaggagggcaaattacccaaggtcaggagttcaataccagcctatccaacatggtgaaacccgtctttactaaaaatacaaaaattagccaggcatgggggcacacgcctgtagttccagctactcaggaggctgaggcaggagaatcacttaaagctgagaggtggaggttgcagtgagccgagatggagctactgcactccagcctggatgacagaacaagactccatctcaaacaaaacaaaaacaaaacaaaacaccaatgatgatctcttgttgataccctgaaatctgtcttcctctggaagtctaaggcaaaatagttcagcaatttgagtttcattcagaacttttaagattcccctggtctctgcattaggaaaatcttcaacctgctttgtagtccagcagagcaatgtccagccaaggcaggaagagccccccagcaagctcggtgtcccctggggatcaggctgcgaagggaacagggtcccacgctggctactgagaaggcccggggcagagctgagttggggcacgagggaggccacgtttaatcagatgggggtgaaattgaggccagggcagcgcttgctaagctccagttaggagatgaatcaaagggaaaatgatgccccaaggggcttcgaccactgactactgccctttaaaaggctgcttggatgggcgtctgttccctccccatgaagagtcaatagttatcgatccagtggggaactgggtcccagccaaccacagatgatggacttgacactccccgctcctccccagaacacaagggtcagctgcctcctgcctcatcctgcagcagctactcctcctagacaccggcttggccaccaccccatggccacctctgaaatctgaagtgccagtctcaggcctagacgccgtctcccaaccttccagctttcttgcttcttcctcctgctggacctcagcctcagcctccccaagaccaccatcgccgcctctccattttctcccaatcccgtcctttctgacatcactcccttgtccaccctcttccctcatacttctaagtcagtggttctcagcagttttgctcccagggagacatttggcaatgtctgtaggttttggctcacatacttgggggcagggtgctacgggcattgagtgggtagaggccgggggtgctcctgagcatccagcagtgctgggacagccccatcacatggaatcactcagccccagatgttagtagtgccgaggatggagacctaggtctcagctgctggagatggggcccgcttgcattgttgcaccagcatcatgagttaagaggcctggagaacctttgtgtcccagatttctgctcccgctttgtcccacagttactattgcaaacttccctccttctcctagtcctcctgccctccggcccttgccttcactccctgtccctcctacttcacagagtcactgcaggctgagtggaggtggtgtgggtgggtttggggggtaaagagggcctcactcaatgcccccctctgccacctacaaacttctcatctgtacagccaaccttccctctcactcttactgaataagctatttctctctcttttttttttttttttctgagacggtgtctcgccctgtcacccaggctggagtgcagtggcacagtctcagctcactgcaacctccgcctcccgggttcaagtgattctcctgcttcagcctcccagtagctaggactacaggcgcatgccaccatacccagctaatttttgtatttgtagtagagatgggtttttgccatgttgaccaggctggtcttgaactcctggcctcaagtcatctgcccaccttagcctcccaaagtgctgagattacaggcatgagctaccacacccggctggattccttgcaaactcttacaagatcctctcatgatggcatcacttcttccagtaggaccccacccttaagaatcacacccttaagaatcaacacccttaagaatcacagctgcaccaccaaaaccaaaccaaacctccctgtagatttcttgggccctgcctgcagagacgcttcttcaaaatatgacgtcagtgggatcaggtctaggaagccacctgttcaccaagcccctcagctgcctccgatgaagattgaagtacagtttgcaaaaagctgacacgtattttgtgtcttcagcctttaaatgttgattttgccctctaccactaatatttaacatcgggtagccatacgattcatgatctacttcagggagagaagtgggggcggtgatggtaatgacactgggccagcagtaggaccgagattgctcagggccaactgggaggtatggatacctaatttttaaatgtcttaaattccttacattctcaacacgcccgcttctcatcaaagaagctgacaattagtactgaaaacagtaataaaacattccttccccacgtcacagcctccaagtccaggagggcatgctttgtttacaaggtagctggtgctgcctgaatgtgttcatgaaggcacccctgctccgcccagtcctctacccttcacggccaattttcctgaaagaattgtctgcattcactactttcagccattgcaatgaggcttctgcccccaccatgcagtaacccggctgtgatgaatgtccccagccacttcctgactgctaagtgcagggatacttgccccttctcactccacctgaccttataggatggaatctgctgcccaccgcccttctagatggctctgctcatccaatttccatgacatgctctattttttccttttcccacacctctggttacatcttctctgtcttcttggacttctttccctctgtcctgcctttacatttttttttttttttttttttgagacggggtctctgtcacccaggctggagtgcagtggcataatctcggctcactgcagcctctgcttcctgtgttcaagcaattcgcctacctcagcctccccagtagctgggattacaggcacgtgccaccaagcctggcgtgagccactgcacctggcctgcctttaaatttttcattcgaatgaattaacacatgaggtcctgggggataaggacagatggagggagtgggcaggtctcccagagggtctggcctctccagcaactttcttccccctgcctggtgcatcaggaaccaggcagcccagagagcactgtgcctctctccccctctgcttccagagagttctctattctgacactttataggttaagaaataacagcgaagctgggggtggtggcctatcctgtaatcccagcactttgggaggtaaagacgggggatcacttgaggtcaggaattcaaaaccagtctggctagcatagcgaacccctgtctctaccaaaaaaaaaacagaatacaaaaattagccaggcgtggagtcacgcgcctgtaatcccagcctctcgggaggctgaggcaagaaaatcgcttcaaaccaagaggcgaaggttgcagtgagccaagatcgcacacctgcactccagcctgggcgacagagccagactctgtctcaaaaaaaaagaaaagaaaaaaagaaaaagaaaaagaaagagcagtgacaggattccagggtttggaactctaggtggcagtcagacattgtctgcattttggggggttggaaagatgaggtccctgcctggagcagctcttgcccaggcctggtagcagagaggcagagtgctgtgaagcaaggaacgtggacctgcggtcaggttcggactgcagcttctcccaggactcaagtgaatgggacaggctccgagctccagccttttccttctcccaggactcaagtgaatgggacaggctccgagctccagccttttccttctcccaggactcaagtgaatgggacaggctctgagctccagccttttccttctgtaaggtggggataggagggcagagcggacaggctgtgaggattaaataagatggcacggaagaaggtgtctcacatgcagctggggcctgatgggcagccgctagtatcgcccagcctctgagaggggaagctgggcagctcctgagagtgaggaaaacatgcagaagagcctggaaggaatttcaacccagaaaagaagcggtggccttctgggggtcttcatatagtgtgaaaatatgacgaatgagagaatgaatgaagcaagaccagaggcaccgcagcagtgcccccatcagcatggcacccgcagggccctttctggcgctctgtgcacttgtgttggcttagtgtctgttgttcctacgaaagtatgagcgtcttgagatcgtgagctgtgcctgttgtgttcccattatctggccagcacttggcacatagtaggtgcaaaaaatacacattgacagttcctggaaaaggcatgctgaggaggccaaaataatagttatggaaatgaggcggggtgtggtggctcacgcctgtaatcccagcactttgggaggccaaggcaggcggatcacctgaagtcaggagttcgagaccagcctggccaacatggtgaaaccccgtctctactaaaaatacaaaaattagtcagtcctggtggcgggagcctgtaattccagcttctcaggaggctgaggcaggagaatcacttgaacccaggaagcagaggttgcagtgagccgagatcacgccattgcattctaggctgggtgacacagtgagactccgtctcaaaaacaaaaaaaaagaaaaaacatggaaatgagaaagctggaggactaaaattactagatcctcctgagttgggactcaggctctaaattaatagcgggcttcctgtaccaaccctgatagttaatagcgggcttcccgcaccaaccctgatagagttaatagcgggtttccctcaccaaccctgatagaggccagcatctgctttgcttccctctcagccctgagggtcttcatccagggcctggaggtggggcccagacactgcaggatgcaggatgctttgcacccttctgaatcaaggaggggagcagaagaggaaaccaaggcttggggagcaaaccgccgcctgctctggtgtccttcagggttgtccagccgtgagacgggtgcagggaggcagttgggaaaactgtggcctgccctctcctaggaggggctgggagctttccatttactttccttggggcaaatgcctcttatccatcaaggcacagatctgaaacaggtgacacagagtacttggtcactacatcatcactgctgtaattactgtttatgtcaagtgtatctcctgagatctctggagccctctgcagcctggggaaggtttgggctgaaggcccctgggatctgggagctgtgttgctcagcagggtttttcacagtgccctagggtcttcctgtgaaaagcaaaacctaaagcagccatcaggaaagcaggaggggattaaaagttaggatgtggtcagctctattctgcctgcctcgtggaagggtgcctgaggagcaaggtgcgcccctgttggctcatcacatgcccctgcagctgatggcctgccaggctgatggtctttcctggggactccactggtggttgggaagaaggtgtgtggcagtgcccagggagatgatcacagagatgtagaagggcctggaggagattctcaaccaggggactggggcttataggagggtgtctccgaggactcagggacattccacaggaaacagaagagacccaggagtctctgtcttcacacactgcattttgggagttggtgaacttctggaaagtaggagctttatgttatcttttatctttgtgtccgtagcttccagcttctggtctacgggaaagtgagttccttgactccagccatagtcaatggcagcccctcaggaggggctaattaattaattaatcaatttttgagacagagtcttgctctgtctcccaggctagagtgcagtagcccgatctcggctcactgcaacttctgcctcttaagttcaagtgattctcgtgcttcagcctcccgagtagctgagactacaggccggcgccaccatgcccggataatttttgtattttttgtagagacgggctttcaccatgttggccaggctggtcttgaactcctgacctcaagtgatccacccacctcagcctcccaaagttctgggattgcaggcatgagccaccacgcccagccaggagggcttaatttgtattaatcattaatgagaccagggacagtggaggcctctccccatcataaggttgcacagacacattttgtggcattgctatttggccatgggttgcaagatgcgagtgggctctgtgggtgtgataagagggagagacagaccctctgtgccacccaagagtcgtctttccattggcaggctgtcctatgacctccctatcctttgctcctctgcaagatctttcctttttcctttcacctgctccaggcataagcatgagcctcctctctacctccatagggggaggctcagggagtgaggcagcctgtcaaggacagggacagatcaacaccacccaggccaccctcagacccaatcctggctggaatgtgacccacagctgggtttccctgaacacacaccttaatctcccaagtgtgagctcagctgtctttcttgtccacgttgagagaaggacaagtcctctcccttcatcctgggagctgggatatgggaggggaacacccttgcccgccttctcctccaccagcatggccggggtggaggggcttggtttacaggaaacattctgttatcccacacagtaatcttgccatactggtaattcacctggactttgtgggtgggtggggaggctcagtgggtagaaatagctgggggatgctcagggttggggttagaatgctccctcaagctttccaatggagacatgtctcttgggggacaggtaggctgggtagaagctggctactcagggtctaggaagggaaatgagagagggagggtttgggagccaccttccagacatgccttctggtaccaagcctggaccagtggcaaaacccaaagggcagccaatctggctggtacctttgccacaggattccttcttgaatcagccaaataacctgttgcctctggttccgatcttagtgaaggtaggggtcccagggaagctccaagccaggtcactgtacttaaagtctctgggccaaagctgtactgccaagactgttacattgtagccattggctgggtgcagtggctcacacctgtaatcccaacagtttgggagccgaggcgggtggatcacctaatgtcaggagatcaagaccagactggtcaatatggtgaaatcctatgtctctattaaaaatacaaaaattagctgtgcatgacggcaggtgcctgtaatcccagctacttcggatgccgaggcaggagaatcgtttgaacccaggaggtagaggttgcagtgagccgagattgggccattgcactccagcctaggcgacggagcgagactccatctcaaaaaaaaaaaaaaaaacttgtagcctttgtgtattattgttatgcaggaaggttggccaaacattttggctgactagtttccatcttgtgtcaccctcaaactagaaatttgcaaagcactagggtgcctaatctgaagattttttgtttgtttttgagataaggtgttgctctaccacccatgctggaacgtaggggtgtgatcatagctcactgcagccttaaactcctgggctcaagcaatcctccctcctcagctcctgagtagctgggactacaggcatataccatcatgccaggctaatttttttttttttttttaacagatggggtctccctatgttgcccaggctggtctcaaactcctggcttcaagcgatgatcctccccgctcagcctctcaaagtgctgggatttacaggtgtgagccaccacacctggtccgctgaagtttattgatcaaaataaagtttctttgaggcctccgaaggttttggaggtaatgccagaaacttgctcccggctgtgccgaggggagaccagctgaccttctccaccattgttttatggcaccgaagccttagcatagagcccttcccagccaccctacctgcggggctggacccgcccaccacacccaccgcaccttgctggggctgacttcccgatttgtgtccacaggctgctgaacaggatgtcctcggacgacaggcacctgggctccagctgcggctccttcatcaagactgagccgtccagcccgtcctcgggcatcgatgccctcagccaccacagccccagtggctcgtccgacgccagcggcggctttggcctggccctgggcacccacgccaacggtctggactcgccacccatgtttgcaggcgccgggctgggaggcaccccatgccgcaagagctacgaggactgtgccagcggcatcatggaggactcggccatcaagtgcgagtacatgctcaacgccatccccaagcgcctgtgcctcgtgtgcggggacattgcctctggctaccactacggcgtggcctcctgcgaggcttgcaaggccttcttcaagaggaccatccaaggtgcgtggtgggcctcaaggagactgggcgcagggttgggggtggcagccgtgcctgcgggtccggcagaagccctaggaattcccagagactgccaattctgggcgctgttggagcggtacttctgtggggcgccttttcccttgctcagggcttctcattctggcactggacagctgcaagactgttgttgagatgacatgcgttccccaccccctcagctcccccatgcagagccccagaaaaccaaaagaaaatccacaggaatgccaaaccctgggtgcttctcactggtatggagtacactgtcaaatgtgtgtccctcaaaaagtttattttgtgcgggggaaaaatataacataatttgccctgcgattccagacttacgggacatagaaagcgtccctcaccttgtttttgtcttacttatacaagtaaaacgccagatgtggtgactcatgcctgtaatcccagcactttgggaggccaaggccagaggatagctcaaggccaggagttgagaccagcctggacaacacagtaagaccccatcattattattatttttttttaattaatgcatggtggcacacacctctagtcccagctacttgggatgctgaggctgcagtgacctgtgatggcaccaatgccttccagcctggaagacagagcaagaccctgtctcaaaataataataataataatatgtgagtattttctcattgtagaagactcagacctgttggaatcaggacaggagctcatcctgtctggatcccagtttaacctatttttaagaccgaccttccttccttccttccttccttccttccttccttcctttcttcctttcttcctttcttcctcccttcctctctctctctctctctctctcaacccatcctgtctggatcccagtttgacctatcttttaagacctgtattttctttccttccttccttccttcctttctctctctctctctttctttttctttctctctctctttctttcaatgagagtcttgggccaagcacactggctcaagtctgtaatcccagcactttgggaggccaaggtgggccttgaggtcaggagctcaagactagcctggccaacatggtgaaaccccatctctactaaaaataccaaacaaacaaacaaaaaatcagccgggtgtagtgtcaaatgcctgtaatctcagctactagggaggctgagacaggagaatcgcttgaacccaggaggtggaggttgcagtgagccaagattgggccgctgcactcaggcctgggcgacagagtgagactccatctcaaaaagagagagagataagggtcttgctatgttgcccaggctggagtgcagtggctattcataggcacaattattgcacactgcagccttgaactcctgggttcaagccatcctaccatctcagcttctcaagtagctagaatgacagtcgctgccaccacacccataagctttttatcaatacatttacatatcacctgagtcacattccaatggccatgggggtggcagcctctttctgtgggtactagagtcaatcactctgacaaaggagtgcaagaaccctggtgggtcgctctgtaaagtcaccacgaggtgaattggggagaataaattggggagaatggtgggcctgcccccacagggctgttatcaaattcatggcagagagagaccactgggaccactggtgcacatcaccacacccagttaattttatttttaatagagatggagtctcaccatgttgcccaggctggtcttgaacacctgggctcaaatgatccacttgggcccactttggcctcccaaagtgctgggattacaggcctgagccaccgtgcctcgccgatagttgtgactgttaattgcatcaggccctgggtagagcactttcattcagttagtcaagtatctgttgagcacctacaaagcaccaagccaggctgtaggtgctggtgataggatagaaaaaatccctactcatgcaggtcactgcaatgagctggtgccatccaactggcacagaaactgcagaccagacaggagaacacccaggaaccacccatcctgcccctgcatcagatccctttccagggccctgcctcactgtccccagaatgtacctaccccattcatttcccttttagaagaggcaggctaagcttccccgggatgattctgtttattcaacaaatatttatgtgtttaagtttcttcagatggcaatctatttatgaaaccaattgaagacattaagattggatatatttccacttccacatatgagttgagatggtgtggtgcattggctaaccaccagggctcctggtcagagagttccctcgtccccttatagctgcaccttggacatgctccctgtttctctctgtgcttcagttacttcatctaaaaagtgagatatcagctgggcgtggtggctcacgcctgtaatcccagcatttcaggaagccgaggagggtggatcacttggggtcaggagttccagaccagcctggccaacatggtgaaaccctgtctctactaaaaatacaagaattatccaggcatggtggcaggtgcctgtaatcccagctgcttgggaggctgaggcaggagaatcccttaaacccaggaggcagagggtgcagtgagccgagatggcaccactgcattccagcctgggcaacagagcaagatcccgtctcaaaaataaataataaaactttaaaaaataaaaataaaaagtaagatattgttcctaccttatagagctgttaagaagcttacgtgagttaatatatataaagcacttagaatattgcctagcaccttttaagtgccaacaaatgtttgtaattattattttaactttaacaatgtgatttacgannnnnnnnnnnnnnnnnnnnnnnnnnnnnnnnnnnnnnnnnnnnnnnnnnnnnnnnnnnnnnnnnnnnnnnnnnnnnnnnnnnnnnnnnnnnnnnnnnnnnnnnnnnnnnnnnnnnnnnnnnnnnnnnnnnnnnnnnnnnnnnnnnnnnnnnnnnnnnnnnnnnnnnnnnnnnnnnnnnnnnnnnnnnnnnnnnnnnnnnnnnnnnnnnnnnnagacatattattatgaaaacaacagacacatttatcttatagaataagcttttgtaatctacatatatttaaataaaacaataattgttttgatctaacaggactcagattattttagctattttagttataaatttcttttttcttttcttttttttcttttttttttttttttgagacagagtctcactctgtcacccaggctggagtgcagtggcatgatcttggctcaccgcaacctccacctcctgggttcaagtgattctcctgcctcagcctcccaagtagctgggattacaggtgctggccacaacacccggctaattttttgtatttttagtagagatgtggtttcaccatgttggctaggctggtctcaaactcctgacctcaagtgatccacccgcctcagcctcccaaagtgctgggattacaggcatgagccactgcgcccggtcataaagtgatttatttcttaaatgagcccttttgaaaaaataaacatgataaaaaattctagcagtgcaaaacagtagagcacgttttcctgaaaccccagacctcagttttcttaactatcccagaaggacccctttaccatctttgtcaagcaaatattttttgagcatcgtctttatcaggcactgtgctggcctccaggacataaaaatgaatgcaccctggtctctgcccgctttatacaccctgagtctgagtctgggggaaggccctgggatctctgtatttgaaaagcactgcatggtgatgctgtctcttgcctcagccaagaatgagaacctccagtctgatggtttttacacaaatcatcagatatttgacaaacacaaaatgtttaagtcaactgaagttaccaagataacaacatttttctttctaaattggaaggttgtcttggagaggttgccattattttagactctttgaggtcagtttttgaagaattgcttgttagaagacagtcacattttcttctcaccatgttgttcttagatgggctggagagttttgaatcacattttttgaaagcagaggttaatgtgtgtaaactcagaaatcctactgcatgcttgacagaggcccaggtgtctgcgaatgttctcagcaagttaggagtccacatgaaaggttcgtaaatagtcttaattacttgctaccgcgaataggataatgatctcttcgtagaagtcaaaagacaaacagcagcatttgtgcagttggaactgaactgctgcagcctcttctctttccacaaggagagtttcaagttcgtaaccggaaagaggtttatattcaggacagggaaaagtaaactcaaggctgacagattgctgtggttattttattaactctttggttttgttctaacaaagatttagattttgttgttgtttttttttttgagacagagtcttgctctgttgcccaggctggagtgcagtgatctcactgcaacctccacctcccagctcagcttcccaagaagctgggattacaagcctgtgccaccacacccgactaatttttgtatttttagtagagacggggtttcgtcatgttggccaggctggtctcgaattcctgacctcaagtgatcctcccatcttggcctcccaaagtgctgggattataggcgtgagccaccatacccagccagattttgttgtttctaaacgtagcaactgtagaaaatctggaaaactaggaaaagtacagacaggagaaaaatgacctagaattggacaaccacagagacaaactcagaactcagtgagcattctttgagtccctctctgagtaaggtgcagagggggagcaggagagaaagggacgtggttctgtccctaagaagctggaatctgttgtgggttttttgttttgttttgtttttgtagagatgaggccttgctatgttgcccaggctggtcccaaactcctggcctcaagcaattctcttgcctcagcctctcagagtgcttaggattagagggaggagccactgcgcctggcccaggtagctgcaatctactgcttagtgcccatgagtctacaggcatagcactgtgctccaaaccaggacatagtctcctaagcacctaatattcaggtcattttttttttaagtcctattgtgtggacagagggcttaagtcatggaatgagccattcacgagtgcctgtaaatgcttggaaagctctgaaaattgggccaggtgtggtggctcctgcctgtaatggtagcactttgggaggctgaggcaggaggatcccttgaagccaggagttccagcccagcccagcttgtgtaacaaagtgagaccctcatctctacaataaattttttaaaaattagctgggtatggtggctcgtgcctgtaatcccagcttcttgggaggctgaagtgggaggattgcttgagcccaggagtttggaggctgcagtgagctatgatcctgccactatactccagcctgggcaacagagctggagtttctttaaaaaaaaaaagcggccaggtgcggtggctcacacctgtaatcccagcactttgggaggccaaggcaggtggattacctaagatcaggtgttcaggaccagcatggccaacaggatgaaaccccgtctctactaaaaaatacaaaaattagctgggtgtggtggcgcatgcctgtaatcccagctactcgagaggctgagacaggagaattgcttgaacccgggaggcagaggttgcagtgagatcttgccattgcactccagcctgggcaacaagagcaaaactccatctcaaaaaaaaaaaaaagaaagaaagaaaagaaaagctctgaaaatcatgttaatcgtgttacctcacaccctgcctcttccttagatcacttccttctgcgcaatccaatggttgtactaatatgggaagaaactttgcagaaacaaagatgtcatgatagatttagggagaaagactaagaccgagtcattccttctccaccaatcttttttttttttttttttttttttgagacagagtctcgctctgtcacccaggctggagttcagtggagcgatcctggctcactgcaacctcggcctcccaggcttaagcaattctcctgccacagcctcccaagatagctgggattacaggcgtgtaccaccacacccggctaatttttgtattttcagtaaagacagggtttcaccatgttggccaggctggtctccaactcttgatctcaagtgatccacccacctcagcctcccaaagtgttggaattacaggcgtgggccactgcgtccaatccaccaatctttattgagccctcactatgtgcttggctggtagtacaatggcgggggagggaagagggggaagatgggcaaactatggcctgtaagccagccacccttggttgtataaatcaagttttgttggaacacagccacacctatttgtttgtatattgtctatggctgcttgagcgttacaacagcagagctgagtagttgcaatagtgacggcctgatccacaaaacctgaaacactcctctgcactacattgaactaggcagattcagtcccctggctctcagagacctataatcaactcctagtagtgcatgttagtgtttattccaaccctgcccaattctatgctatgaaagggaggttttttttctgttgttcgttttttttttgttttgtttttgtttttgtcgctgggggctatgatgacactcactgagaatagatgagctcatagacagatgaaggcaccttcctgaaggaacagaatggctccaagtcagaagagatagacctcaacctgattgcatttactcgcatatctaaagaaaaaaaaatgccaattaacaaggattggctagccctggaggcatagaaaaaacagacatacttaggcaaagccaccactcctaggaaaagggagtcttagcctagggacagcctgatgtgattaaacattccgtttatctgattaatatctttctggttaggatctagttcccctgcaggtcttctgcaaggagtgaatttgcaggtcaggcagacagatcaatttctccttgtatgtgtgctctctttgcatggcatccctgagcttatacatcaggttcctgaatttaggcaataggagtgcctctgagagatggagccactttctgtggctggaaaagtcagctgcttctgggacttagggctgagtgacactgactccaccgtaatgaaaacctttgtaataaccttgaccctgtcaccctgtgtctctctcagcaatgactctgcctcctgttttattgagaaactagaactccctcagcttcctgccgccaaaccgacgcactctcttccatgttcgcagctgcttccgttcactgattccgcagctatttcttgcaactcactcactgctggaagagatgtctcctaccccaggctcagctcttctctggctttgaatcctacctccttccctcctcctgagaccctctcgcctattacctcctctcctttgtcttcccctgctcattttctaaagtctccttccttccttccttccttctttccttccttctttccattaacattcaactatctctagtatctccaatcttgtaaaatatatatctcctctaccttcagcttcctggttcttcctctcttcctcctctcagttcttgacccagcttctgcgcccagcatcttccttctcatatccatggcttcagttgtctctgaaatcaggatgaatgctaattccataggtcttgctgtcatcctcttccgcaagctccattcctttcacacctaatgaacatttccacttggatgccccagaagcaccccagttgcacgaagtcttaaacagaagcggttttccttccatcaccatttctccttgtgttcccaatacagtgcctgcatcagccctccatgttcaagccagacacctgggtcttacctttaactctgcttcctgtcccagcgcccaccccctaccaccccgaactaacatcccagtggccaagtcttgttcattctccctccttcagatcacttgacccggcagcttgtcttccttcccctgcttcagcgcaggccaccgctgactcccaccgcttcctacctgttctccctgctgccaggctcggccgttcccagcctgaacacacatctgaccatgtctcccttctttcttgtggggagaatcaaagctccagaacatggccaaggacgccctctgggattgccccacgtctcatgccactctcttttgcatgctgtggtcaccctgattgctctgttttctagttaccagattttattccatgctttcaatttctagattttgcatatactcttctctctgttgcacctactcccaacctctactcccagcttgtgtcccttaggtctccagttagtgggcatttcctccaggaaggcttctctgattctctcctctcattcctcctggatgccctgcaaaggttcgcccatcacgccacccttctcccactgtatggttattgccattttttttgtctgataccccaagaagagtacaagctcctaaggcacagggttacatttacttaccttttttttttttttttttttttctgagaccaagtctccctcttgttgcccaggctggagtgcagtgacgcaatctcggctcactgcaacctccgcctcccaggtccaagtgattcttctgcctcaacctcccaaatagctgggattacaggcacgcaccaccatgcctggctaattttgtattttttttttagtagagatggggtttcaccatgttggccagactgctctcgaactcctggtctcaaatgatctgccagcctcgtcctcccaaagtgctgggattacagacgtgagccaccgcgcccagcccacatttactttgattttcacttaaccccatgtcctctcacagtacctggcatgtagaaggttctcagtgtgtccgaatgcaatgcaatccccaaacaaagtgatctcccatttcccagggaggacaaactgaagaagttgggccagtttgcatatgcgtaaactttaagggatctaggtaaaatagtcagatgtctgcttataacaatatattatttagttacgcttgtatattttaaattaccttatggaaaacaatatattatttttgaaaagttgtttttctacacatattttgtgaaggaagtcttatcaaatgaatctttgatacaaatgtctttgttttccttctctagagttttttgagtcatttaacagtgtttcagtgtgctgccttcatttccatcagttaattgaaattttatgagaatgtatgcgctgctatccctgaagttttttcattttaagccataagtatatgtcctacaccataaggggagttctttttttatttgtgttgacttatgatcaggatatccacaatgtatcaggtacatactgcttttgacacccaacacttgtaagattattttcctgggaataactaaatttgtgttaaatttctttactcccaggccaggcatggtggctcatgcctgtaattccagcactttgggaggccgaggcgggtggatcacttgaggccaggagttgaagaccagctggccaacatggcgaaaccccatctctactaaaaacacaaaacttagcttggcatggtggcacatgcctgtaatcccagctacttgggaggctgaggtacaagaattgtttgaacccgggaggcggaagttgcagtgagccaagatcacacactgcactccagcctgggtgacggagcaagactcagtctcaaaaaaaaaaagaaaaaaaagtttgtttttatttactccctttgtagtgattcactcaggcaaggagcattgattgcggtcttcttaggaccatgtgtcttcccaaattttagattgttgttaggtacaaagtgattgacttaatagcacctctgatgtgagaacttgtaaagactcaaatcataagcaattttctttctttttttctttctttctttttttttttttttttttggttcttgggacagggtcttgctctgttgcccaggctcagtgcagagacatgatcatggcttactgtagcctcaaactcctgggcttctgcctcagccttctgaggagctggaattacaggcatgcaccaccatgcccggctaatttattttttaaaaaaattgtaaagcggagtctctctatgttgcctacactggtcttgaattcctgggctcaagtattcctatggcccccaccctagtgggcttgcattgtagggggaaagctgacaataaatatgataaataatgaagcatggtgacagactgagacaggtgttatgaaggagaaaaaacaatgatgagaccagagagtgactgagaaagggggggggggtctcatttagaaggaggattagggaaggttgtgctaataaggtgacttttaaaggaagctgaagctcatcaaggaatcctgggaccagcgttccaggcagaggaaaaagccagtgtgtttcaggacagcaggagggccaacatggctagtgtcagtgagcaaaggcaaagtggaaggggctggagaggatgggcaaagtctaggggccatggtgaggggtgcacttggatttttttccaggtagagtagcagccgttgactaacatgtgatacatggccatgaggggctgtacggttaggtaaagccagtctgcactcctccttgagttcccagggtagatggccaacttcgcacaggccactgggagtcttttgagcaattcctgggtctctaacttaaaacaagaaggaacaagtaagaaagaggcctggcacagtgcttcctccattcacctggggcccagatgcaggcttggaagaaaactcccctaggagaggggaagggggatgattgatgggttattccaccttgggtcgcctccaggtcttttgtcctggagaatgcagctggcggatctggatcctggatcccaggaggcacaagacaggggtgcagagacaagagcaggagagggcaggagtcaggagctaggtgctggtcccggcccagtcactagtcaactggctgaccttgggcaagcaaggactgagttcctctggcctcagtttcctcatctctacaagaagagtccattaaacccacaaaatgttagctatctgcagggcactggcaaatgacagaacaaatcacaattcctctttttggagacacagccaggatgccagtcagaatgtggtcagcctgtgacttaggtgacacatagagtccagagaaggtttataccttctggagggcagggagggcttcctggaagaagggacactttctcagaagtggaaggtaaacatgcttggcagcaagagaggagggggctcagtggtggatgatgggatgggaaaacagaatggcactggagtgcaccaggcttcacaggtcatggtaaggaacagttaagtaaggagtcatatttaagatttgagggctatttaaccaggcttagaatctcagcttcacaatttcttagttgtatcaccttgggcaagtgacttagctttcctgagccttaatgtccgtatcagtaaaatgtgaatagttcctgcccctacagtgttattgcaaaaatgaaatgagacatgcatgtgagggtgtaactaagtgcctggcacatgaaataaatagtatttgttttgttagttgtgcttggcaatgggaagtcattgaaggcttctgagcagggaattaatcagatctcctttcagcaagataattcaggcaacaataggaacgatgatgtggaagcaggagaggctaggggctgggagcccagtgaggaagcaattttattttatttatttatttttgagacagagtcttgctatgttgcccaggctggagtgcagtggtgcaatctcggttcactgcagattcttctgggttcaagcgattcttctgcctcagcctccccagcagctgggattacaggtgtgggccaccatgcccagctaatttttttttttttttttttttgtatttttagtaaagacagggtttcactgtgttggccaggctgatcttgaactcctgacctcgtgaccctcctgccttggcctcccaaagtgccaaagtgcagggattacaggcgtcagccactgcgcccagcaggaagcaatttttttttttcccccgagatggagtctcactctgtcacccaggctggagtgcaatgtcatggtcttgggtcactgcaacctctgcctgggttcaagtgattctcctgcctcagcctcccgagtagctgggactacaggtacatgccaccacacctggctaatttttgtattttaagtagaaagggggtttcactctgttggccaggctggtcttaaattcctgacctcatgatccacctgccttggcctcccgaagtgctgggattacaggtgtgagccactacatccggccacaggaagcaattttaacagtgcagttagggccgtccaaaccaagatcagggcaaaagggctagaaggagaagttaggcttgaggaactttcaaaagtggattcaggctgggcacagtagctcacgcttgtaatcccagcactatgggaggcagaggcgggtagattacttgaggtcaggagtttgagaccagcctgaccaacatgatgaaaccccatctatactaaaaatacaaaaattagccaggcgtggtggctataatcccagctacttgggaggctgaggctggagaatcgctggaacctgggaggcagaggttgtagtgagccgagatcaggccattgcactccagcctgggcaacagagtgagactctgtctccaaaaaaaaaaaaaaaaaaaaaaaaaggtggattcattattaaaaggatagtgactggattgtggacgctaagggaaggaggactcttagatttctaatttaggctactagggagatggcaaggccattagggggaaaacataaatacccagaaggaacaatttcgtcagctgggagagtcagggtgggaaggagcatgagataatggataaagttttggacatattgagtttgatcagttcacagagaccctggagagtttggaattacagcccagaagcaaaatcttgagtggggttttaagtctaaggagagcctctaagactgtggttctcaaagtgtggccctcaggccagcagcaaaggctacacctgggagcttgttagaaatgcaaattttggaccccaccccagacctactgaatctgagactggggggcaaggcccagcaagctgatttagcctttcaggtgagcttcattcaagctcaaatttgagaactggtgttctagggaaagctctttagaaggagaagggttgagggaccctgccgaacagaaggcgcataggaggggccttgaaaggagattgaggagtgccatatttcatcagttctaagacgcacattttctccaagtaacatctctgaattgggctgcctgtcacagttaccattgaccaggtgacagccgttccctggttgtcactgcactcaaatgcacctcaaaagttgcagagtaggggccagtggcctgagacaacagtgaacactttcttaacaaagcccttgatagtagagaggatgagtctgtgaaaataacatgaaaacaatgactgatcaaaaatgattcagaagagtttgagatgttttagcaatattttaaccaatctgtttttctcatattttctcttatgtatgtgtaagaaggctacgggatcaaatcaaatctgaaaaaaagctcttttttttttttttgagactgggtctcgctctgtcacccaggctgaagtgcagtggcacaatctctgctcactgccgcctcagtctcccttcaacctccctgggctcaagtgatccttccaccttgagcctccaaagtagctggtaccacaggggcatgccaccacactcggctaattttttgtatttttggtagagatggggtttcaccatgttgtccaggctgatcttgaacacctgggctcaagtgatccactggccgtggcctcccaaagtgcctggattacaggtgtgagcctattcagtggattcttttttctttcttgactgatgggtaaaataatggtacatcttaccactgaaagcatcttagttcattacaaaccaggcgactaaaaaaacaaaagaaagcaagtactccagagttgattaaatacacatagaaatagtcagagatgttgcaagagtccctgcagagagaagggagatgaaatctaacaaaacagcctgttttaagagggtggcaatgggtgtctgctgcttcaggaaggaccaggaggagaaagaccaagaggagacaattgcatttggtagctgaaaggtcactgttgtggaattctaggattctctgggtgggggctcttgctttcgattcatttgcattcattatctattcaacagatattaatcgatttccaggattgagatactgtacttgagatacagaaatgaaaaacataataatctccattcccaaaaaagcacgcagttcagaagggaggcccacaggtacacctgtgattatgaaacactaaggtagctgctttgagtgtggggatggggtggtggcgagaaacatgcgagcctatctggggcagaagggaagaaagtgtcaccaaggaggccatgtgagagctgtggctccaaggatgtggaggagctggccaggaggaccaaatgaggagtttcaggtagagggaggtatgggagggctgggggctccatgagatccatgaactattatacttactgacagttcagatctgctggagcctacaaactggaggcctcagtgagaggggattagggtggacaatttggaaatggtcagatcataaaaggcctggtaggctttgccctggagtttagattttgttctctgctctgggtggcaagagttggagaatttcttaaatttatactttaaatttatttctaattcttttcaaaataaggtatacaaatagtttaaagagtataaaagaaacataacttttaggccaggcacagtggctcatgtctataatcccagcaatttgggaggccaaggcaggcggatcaccaggagttcaagatcagcctggccaacatggtgaggagtttgagaccagcctggccaacatggtgaggagtttgagaccagcctggccaacatggtgaaaccccgtcgctaggaggaatacgaaaattatcccggtgtggtggcaggtgcatgtaatcacagcgacttgaggaggctgaggcgagagaattgcttgaacctgggacgcggatgctgccgtgagccgagaatataccgctgtcctcccgcctgggggacaaaacaagactatgtctcatggatctgtagatatgggtgttttataatgaaggatgatagtcggaggggctaccgcttctcctcacactcagagacagaggagtgcatttaaaggaaactcacttcaatggattagaaatattgtaatctcataactgtatttgctgacgacacttagtaccttctnnnnnnnnnnnnnnnnnnnnnnnnnnnnnnnnnnnnnnnnnnnnnnnnnnnnnnnnnnnnnnnnnnnnnnnnnnnnnnnnnnnnattcgctccattaccaacccatccaacacacacacacgatcatcccgctgtcccaatatggtaatatcacaaaattttctattttgcctgttgccatttccttcttgacatgtccttgacttttctcgtgggttgtattcccttttttctggatcctacctcttcctctttttagttctttccttctttggggaaagcatgtagttcatgggcgtccttaaaaggtataggagaggtaaaatcggcaataccttgtatatgtggaaatgcctctattccatcctccaaccttcacattagattcatgtcttggcttggtacagaattctagttgaaaattaattattctcagctgggtgtagtggttcatgcctgtaatcccagcactttgggaagctgaggcgggtggatcacctgaagtcaggagttcgagaccagcctgaccaacccgaagaaatcctgtctctactaaaaatacaaaaattagctgggcttggtggtgcacgcctgtaatcccagctactcaggagtctgaggtaggagaatcgcttgaacccgtgaggcggaggttgcagtgagccgagatcacaccactgcactccagcctgggcaacaagagcgaaactcgcacacacacacacacaaaaaaaaaaaaaaagaaagaaagaaagaaaagaaaagtattgtccctcagaatttggacaccattgctgctttgtcttgtagctcctgctgctgctatatcttgagtcttcaatgcctgacactttctgaggttctgcagtgtggctagcttatttcttatctggatcccttgctttagctacctaggtttctactttcctcattctctgagacagttcccactcccatcctgccagttattggatttttgggatgacgcatagacaggtgtgctccatgtgccatgatgggccagagaacccataaacttgtctgggaaagttattaactgacctccagggggcagtgtggaggatagattggaaagggaaatggagacaggctagtgcaggatgatggtcgcaaggggtgatgagtgtggaactaggactgttgcagaagggagggagggagcaggtatcaggaagtaggatgaaaaggatcttaggggtagatatggaaaaatccaggaggccccttcatttctgacaggttgcaggtggctagtcgtccctttgatgagacaagggatacagtaagaggaacaggttggatgagggatgggttcagtttgagaaaggtgagggcccaggggannnnnnnnnnnnnnnnnnnnnnnnnnnnnnnnnnnnnnnnnnnnnnnnnnnnnnnnnnnnnnnnnnnnnnnnnnnnnnnnnnnnnnnnnnnnnnnnnnnnnnnnnnnnnnnnnnnnnnnnnnnnnnnnnnnnnnnnnnnnnnnnnnnnnnnnnnnnnnnnnnnnnnnnnnnnnnnnnnnnnnnnnnnnnnnnnnnnnnnnnnnnnnnnnnnnnnnnnnnnnnnnnnnnnnnnnnnnnnnnnnnnnnnnnnnnnnnnnnnnnnnnnnnnnnnnnnnnnnnnnnnnnnnnnnnnnnnnnnnnnnnnnnnnnnnnnnnnnnnnnnnnnnnnnnnnnnnnnnnnnnnnnnnnnnnnnnnnnnnnnnnnnnnnnnnnnnnnnnnnnnnnnnnnnnnnnnnnnnnnnnnnnnnnnnnnnnnnnnnnnnnnnnnnnnnnnnnnnnnnnnnnnnnnnnnnnnnnnnnnnnnnnnnnnnnnnnnnnnnnnnnnnnnnnnnnnnnnnnnnnnnnnnnnnnnnnnnnnnnnnnnnnnnnnnnnnnnnnnnnnnnnnnnnnnnnnnnnnnnnnnnnnnnnnnnnnnnnnnnnnnnnnnnnnnnnnnnnnnnnnnnnnnnnnnnnnnnnnnnnnnnnnnnnnnnnnnnnnnnnnnnnnnnnnnnnnnnnnnnnnnnnnnnnnnnnnnnnnnnnnnnnnnnnnnnnnnnnnnnnnnnnnnnnnnnnnnnnnnnnnnnnnnnnnnnnnnnnnnnnnnnnnnnnnnnnnnnnnnnnnnnnnnnnnnnnnnnnnnnnnnnnnnnnnnnnnnnnnnnnnnnnnnnnnnnnnnnnnnnnnnnnnnnnnnnnnnnnnnnnnnnnnnnnnnnnnnnnnnnnnnnnnnnnnnnnnnnnnnngaagtgcactggggtgagcatcaacccaagcccctttcacaccagcagaatagagtgggtacattgagctcggtcattagcaagcagccttgagcccacaggtccccgagaagctattgtccgagattagcaaccccttctgagccgtggcagggctgccctgctacctgcagctgttcatgaacagctgatggggatgcccctgggatttcttctctccgggaagcacaggatcaaagagagctgatggtggtggttacccctctgccttaaggtcacggagaagtccaggtcaggttctaccagtgcctgcctccttcccacaggcaccggcagcatccactctgaggtctagggaccggaggcagaccttaatgttctcaaatatcacagttggtggctagcctcagatccaacacctagaaaagacttaccctggaatcctttggttgtccctgtaagacaatcttgtccaacctgtggcccaggatggctttgaatgtggcccaacacaaattcataaactttcttgtagcaggatgagttttttttttctcatcagttatcgttagtatattttatgcatggcccaagacaattcttcttcaacgcggcccagggaagccaaaagattgcacactcctactgtaagatctgcgtaaatataaaaataagcggagcagctgtggtggcctgtttgccagtgccggcacttcattaagacgttcgtatgcgttctgtcactgaatgtagggaacttttatttattatgtatttatttttgagatggaatcttgctctgtcacccaggctggagtgcagtggcatgatctctgcaacctctgccttctgggtttaagcgattctcctgcctcagccttccgaatagctaagattacagatgcccactaccatgcctggctaatttttttatatttttggtagagacggggtttcaccatgttggccacactggtctcaaactcctgatctcaagtgatcctactgcctcggccacccaaagtgatgggattagaagtgtgagccactgcgcctggcctgaatctggggaacttttagataagaactttatgagatgggggctgtacccgtttcacagattaggaaactgaggctcagagaagttaggtgatgtgcccaaagtggagtctgcacctgtctatactgaatacactcccaggttagaacctggaatttatgctaaccattggctatgtccctgtcctgagagaactcatccccaaaactgccacacctcagctgcacgtgtgtgtgctgccaatgtcctatccctgttcctacacgctcctaggcccgcctcaagagaccacaggaattctgatgaattaatctcatcactttatcgaggaggcacttaaaaaaattacaaagcaaggccgccagcctggctttgctggcagctagccgctggggccataaaataaatggaaaggaaccgaaataaataaataattaggtctctttctctgacacacaccaacacacacacacacacatgcaggccaacccctaaagggtgaagagcctggttggggacttgctgttagcacttggtcgtcttgtcctgggagagcaccagttccagctctgcacacacacttcctgactccttgctctgagcagcagcctgtggccttatccttcctcaaaaagtgacaggttggctgagcagctgagagcaaagcatgggaaaagtgaagagtgtgcaaagggtgtcccaggcagctggaggtatgaagcccatggagagccctgtgagctcccagcacagtggctcagagcaggctggagctgacaggctgggtcccagtccttactgtcccataccctggattctgttcaccttctccttttttttttttttttttttttttgagacagagtctcgctctgtcacccaggctggagttaagtggcgcgatctcggctcactgctacctctggctcctgggttcaagcaatccttctgcctcagcctcccgagtagctgggactacaggtgtgcactaccacacctggctaagttttgtatttttagtagagacagggtttcaccatgttggccaggctggtcttgaactcctgacctcagatgatctgactgcctgggcctcccaaagtgctgggattacaggcgtgagccaccacacccagcccctctatcttacagatgagaaaaatctgtttacctccggggttgctgggaacatgaaatcctcgggatctgtaaagcagagctgtggctgctccctgacaagcattcgccagtgtgagctccccgtgtgtgcacattgagcggctgggtggcccaggcagtgggactagagaggagctggagtaggtggaggaggcagacagatacaacacaggggacattaatgggttatcagcagggagaaggagcgcctccccatgtgggacctggagaaacagagggtggagggagcatagagagtctgttctaagctgcaaagcaaaggcctggcggcctaggagaccatggagttccagaaagtgatagttatgcagagcgaatggagggaatcagcacgctgaggctgcagagagagggtgggcctgggtgggaacgggccaaatcctccagcgccttctaagccaagataaaggcttgaatgaattagctttcatatgtgttttcctcctttctgtttgtcttttgaattttaccgggcttacatgaatattgaaattattccccaagaaaccacccaagccagaatgctctaagaaatagggctagacaaaagcagggaggggtacacagaatcttcatcccttccccttcccatcgccttccaacctccagcacagagcatgacctccagctccctccctgcaagaaatgggatggggagaaaggtggtgcctgctggacttgagacagggagagagagggagaggaggagagagggagatggggagagagggagggaggatagctagccttcacctgtagatctctgaggtgctccagaaatagttttcctcaccagtaaaaagggatgagaatactcactgagcctttgtgagtactcgatacagttaggcacattgagtaattttgctacctcaaagcactttgttaatggtagaacatggttcatgcttgtttccagaaaatccaatagaaaaggtttccatccatatcccatgtggggaggtggtgacacagggaagcccaaggccacccttctcccctactacccaccaggcaacctcagccactgggtcagcaccaggcgcctgtcctcaggggggcagcacttccaatttccccatcctccttgtgagatacagggtgggacaggagatctgtgtggccttgggtaacctgcttcagctcccagagcctcagtttcttggtctatgaaatgggacactgatgtgccttcagaggctgttgtgaggactgagggagctgtgcagactatgcacacagtaggtgcacaataaatcttagctgctattcctctgaagtgggtagggtttggtgtggaggattcagacaggcaagcctccagctcctccctgctccctcaggaggtggggctggaacgagagatgtgttctagttgagagattctgttctggaaaaccctggctcaggctgacctcagggactttgggacaggagtcgaagagacacaataacaaaacagcacggtgatgtgctgttcttcgtttgtacgttccagttacatttttttttttttgagacggagttttgctcttgtcacccaggctggagtgcaatggcgcaatcttggctcactgcaacctccgcctcatgggttcaagtgattctcctgcctcagccttccgagtagctgtgattataggtgcccacccctacgcccaactaattgtttttttgtatttttagtagagacagggtttcaccgtattggccaggctggtctcgaactccgtacctcaggtgatccacctacctctgcctcccaaagtgctggattacaggcatgagccactgcgcccggccactccaattgcatttctttacctccctcacctgctctccccccatcgcctttccctccattaccaggcacattgtaggtgctcaatgcatattcgttaataagagtcagcaggtcagcatgcccagggcagatgcctgtattagaaaggcagtcacagcctctcctgactggactgtcaaccctcccaggaagagcactggaaggtcagttcaacctaaataagacctctgtgttcacactgcatagaaacacttggaaaactcatctgtaaaatgggaatagtattagtacttattttctctttcatggaattgctattgggaggggagggactctgtagatcagtcattcactgcattctacctgcctgtctctatattgtgggggctgtgctaagtgctgctggacactggggagcagcccaaggtcttggcttcgtggggcctacagcttaaaagagcatgggttgggtttatggtagccattcttttgttttattttgttttgttttgtttgagacagaggctcggtctgtcacccacgctggagtgaagtggcgtgatctcggctcactgcaacctccacctcccgggttcaagcaattctcctatctcagcctcccgagtagctgggattacaggcacacgccaccacacctggctaatttttttttgtatttttagtagagacggtgtttcaccatattggtcaggctggtctcgaactcctgacctcaggtgatccaccaacctcggcttcccaaagtgctgggattacaggcatgagccactgtacccggcctggtagccattcttataacccatgaaaggagtggcctgaaaaatttatcacagattccctctgctgaatgaactctgctcataaaatgaccccctcgcattgaatagtgtttaaagcagttgtccatatgtggtcttggttaattcttcatttagtagattatctcactgttttgaagatgaagaaatttcaacttggtcagaggaaagtatatcctcaaggttagcaaagccaggtggcctgggcccctccagtgggatgcagaacccgggccttgatcctggtggacgcagagtttccaggaggcttttcccacacattggggtcccaggctggaggctggaggagcctgtggtggtggtggtggtggtggtggtggtggtggtggtggtggtagtggtggtctgcactaatgttctggtcagcatagggggcgttctcctcctggagtaaaaggccagcttagtgagttttgatgtccctgcccaggagtggcttcaacactgtgggtggccatcctctggagagtgtttccccaagtagctgcctggtccacccagacctgccacctggagtctccatatggaagagttcgaaatgttctgacaagcacctcagagcacttgctttgagaacactaggggggagtggcagctctggcaaattaaaatccccatccatccagccctgcgctggcaggtgggggccctgggcggccagcacccggcaaccctctctgtgtctggttgcagggaacattgagtacagctgcccggccaccaacgagtgcgagatcaccaaacggaggcgcaagtcctgccaggcctgccgcttcatgaaatgcctcaaagtggggatgctgaaggaaggtaagagaccccaccgagtcggggttcactgtgaggctctgcttgctggggagtttttgtcccctgtgagacacccacaagctgtggacctgtgtcccagggtgagacccagtctgagcgcccatctcctcccacaccctgccagcctgccacgacgcccgcatggctctcctcctttagggaggtgggaattggaatttcttcattaaggatccttccgaacccctggccccacttgggccccagtgggcctggcactctgggaaggccctcctttaggggcaaaccccatgtctaccctaggaggggtaggcttaagaggctgttatatcacctagcaccctcaagggctcgggggtgaaaaggacagacacattaagtccaggaatgataaataatgttcccttcacctgtgaagaatggcatttgttttctggtgggtggacaggacatggctcttgccttgggaacgctgctcccttccttgttccctctcttcccatcctctcccttccctctcctttctctccctgcgtcctctgtctctagagctgtgctgtctaatatggcaaccaccagccacacgtggctcctgagtgctggtccaaacagaggtgtgctgagtgtacaacacatgcctgctttacaggacttaataggaccataaaaggcagtgtaaagtctggtggtgatccttttaaaaatgtgattgcatacagaaaggctaatcttctggacatgttaaataaaacatattgtgaaattagcatcacatgcttttttgttttttttttgtttttgtttttgttttttttggagacggagtcttgctctgtcgcccaggctggagtgcagtggcgcaatctcggctcactgcaagctctgcctcctgggttcacgccattctcatgcctcagcctcccgagtagctgggactacaggcgcccgccacctcgcccggctaatttttttgtatttttagtagagacggggtttcacggtgttagccaggatggtctcgatttcctgacctcgtgatctgcccgtctcagcctcccaaagtgctgggattacaggcgtaagccaccgcacccggccttttatctattcgttgatgtggctactagaaaatttgaaatgacacgtagctctcattgggacaactgctccagatctcctcttcctcactttctctactgatttgctcctttttttatattaaaatattattgatagaggcaaggtcttgccatgttgctcaggttggtctccaactcctgggctcaggcggtcctcccacctcagcctcctaaagtgctgggattacaggcatgagccactatgcccggccgatgttttcagtttgaggaaccttgttcagtaccattttggggatgggtcgtgagtgtatgtgtttccctgcttctccagcttccaaggggagccagtgaaaattcttagagatcaacttttaagctccgggcctggaatccttctagaagtgggaggaaacaggaaaagaggtgtgtgggggtgatcagaaggggctacagagagaacgaagggacagatttggaatccagacccttcctggagggggaaggctaggagtgggcttctggaagcccagcccaaccttgggagccccagggcactcctgctaccccctctcccagggccctctgaagataagggcccagacctaagacgctttgtcaatacaacttggaccatcatgtgctatagaaattggaccttccacttccatttaccatttccaggtcccccacttcacctcagctcagcccagcacctgtatccataaaacagaagctcttgaagcaggccctcggcggcctttgtgtcgacatggcacactggcttttaaaatgctcctcattcagggcttcatttaacccctttgtgatggagtggaccactcagctcttagacaggccagctgcttcgttaggggctcaaccgaaaaaacagtctcctttccagattaaaaatgggctacatcgagcccgcggaaaggctgtctgttggttcatttttgactctatataattttggtcttgctcctggataggatgacccaaactagtggctgaactgggtcccctgactcctatgttgggccctttctgctccttcagagcctcctggtattcacagatgggaaaattgaggcaaaaggcccatagaagcatgcctgagtgctggtctcttgactttctctccgtgtggtgctgggaatctgagggtttctaagccttggagactcattcattcctcttaagcccaagagacagagctgcttgacctgttgttctcacatacagagctggatgtgagaacagcaggtcaagcagggggccaggggccacttggtcgcagcgtgcagcctccctgcctacttaacagtatccgcggcacttagagcagccagaagcctcattgttttcaatatagccctgaattttacaggtgacaaaatggagccctacaggggctggggtgagatgactcctaccctcagtcacacattcatttgaggggagctgggcccagaggctggaactttccttgccctgttcagtgtctgctccccatggcacagcacagggatgggggaggtcgagagggaacctcccactcaattcctggaccaccttgtaacactgaacagtctctttaggggctatgcactgctgggaagagagaagggcactttctagtggcttcccagaaagcaggagatggtgaaggggtgcactgatggcagggagggaggtggtgaggcccacaattgaccagtgaccactcagacatccagactggcacttgtcagagaaacgaggtggacactgtgtgtcccaggatgatggtattgggggctgggaggacaggggcatgagacccctgctgcctcaagtggggaggatgttcaggggaagcctcagtgttgacacccctgccccgctgcaaatatagccctttggttgatggtctttacccagggtggcagctggggcctcccaggcagacatgctcggcctgaaaaggccctttaaggagctttgcctgaaggaggaagggacagccactagaacgctccctcccctactccccaccagtgctggcaggtccagatccaagagcggggatatgacacaaaggctcctgagtatggacaaagcagggagccacgtttagtttctgtcccctgcagggccttggagagatcctgggatctgaagctccgtggggaccgacccccttaggaggagcatcctccttcaacagcctgggcccctgccaggtgggggctcttggcagctgcctggcttggcttttgtttgggtgtccctcctggctctgcaggcaaggcccaggccccccgagaccagcgtgggctcatcgccagcctcagactctgacgggactctaaaaggcaaacttcaccttccccagggctgctctctgctttagggtcccatagtgggcctctgttgcttggggggctttgggggtccaggggcttggggagggctgcagacggagagatgtttgtgcctccgccctctctgctcccctggcctgcacgtctgaacaccaccctcctgccctcatccagccacattctccttgtgttttatgatttttcctttcttaggtaaaataatcagagatcgtttcccagtttgggggcccagcaacagccacagaagaaatcagacttggggcttcctctggctctccctctctcttaagactgtggccagctcagggatctaagcttttcagattcctcacgtggctggggacagatcctatggccacgtccctgtgactttctccctggaacatccagagcagaccatggaaaacaggagatgtccaaaggcctatcttgctttaagcaaatctagtacataaaaatctgtattttcagagaaaaagtaatttttctcttttaaaaactgaacacgaaatctgggttaggagttgatggcctgtgttctgcccctggttattaggtatttttgcctgcgtaatttttttttttttcttttgagaaagaccaaaaaaaagcctcactctgtcgccaggctggagtgcagtggcgcgatctaggctcaccacaccctccacctcctgggttcaagcaattctcctgcttcagtctcctgggtagctgagactacaagtgtgcaacaccatgcccagctaatttttgtatttttagtagagatggggtttcaccatgttggccaggatggtctcagtctcgaccttgtgatctgcccacctcagcctcccaaagtgctgggattacaggcgtgagccactgcccccagctgctgtttaatattattactcacacccacatgcttccatttcttcactgtaaaacggggatgttgatacctgctttccatcaccaggtcaaagtggggacctgggacagatgggacagctcctcttggcagaatccactgtgggattgctttgcaatgtcagctcccttgatgcgttaaaatactccagtgttggattcaggctgggtgcggtggctcacgcctgtaatcccagcacttggggaggccaaggtgggcagatcacctgaggtcaggagttcgagaccagcctggccaacatggtaaaatgccttctctactaaaaatacaaaaattagctgggcgtggtggcacgcgcatgtaatcccagctactctggaaactgaggcaggagcattgcttgaaaccaggaggcagaggttgcagtgagctgagattgtgtcactgcattccagcctgggcgacagtgcaagcctctgtctcaaaaaaaaaaaaaaaaaaaaaaaaaattctagtgtttgattcaaagacaacctcatttacactcagcttttcatcagtctgccccttgtgtttggggaggcagactggtgtctggccaccctgattttcttcctggatttgttggcgggaatcttaaaaggcggccttgtcttgggctggtccccactgtgggttctagaatcaggatgggcagctcccctggtagtcagcctttgcagcctggctagggtgtggactgactctggaaaaccactagctgcatttcctagggggctccccgaggcctcagtacagctctgggatttcagcaattctctctagacagcctgtccccgccaacttcacctcctcctcacctcacctccctcatgtgaccagcctcccaagcccgctccatttctcccccactcagcccctgcctgcctttccccaagtgttttctaaaagatatttgatttcagtgaaagctgggccgacatccatgcaatatgctctcacttgctttgtgcttgttgggaaggtggagggctcctccggggattctgggtaattgtgttagtggccagctcatgtcaggaaattaaaaggaggccctgatcaggttcccactgcatgggatttaatggccttgtatttatagagtattctgcctctagcccatgccagaaatatcactttttttctggccctgtgaatgaagaaagagcatgagagatgacttgcctttaaaaattctttttcttttccaaaatatattagtgttttgaaacaaaccaactctttaccactttatagaatggtattgagctacagcctgagaatgccaatgtgtgttgcatccctttcgagccactttacattctacacacactgccccccccaacaccaccacccccccacacacgcacacacacacatacctgacagctcacaggatcttcccaggcaccctgaagcctttgggccactcagccacaatgacctctggttggagaagtgttgattgaatgaagacgcaggagatgatcttgtctgtgctaaatcgttcttactgttccctgcaggcttttggataacggtccggtggtcacgtaggcctggttaaacctcatcttcaccacttatcgactccttgggccagttacttaaacccctgtaagcctccctttcctcctccataaaatgggaatcataatagtgcctatcttcatcttgctcccaatcttcagggaaagctcctagagttatactgtgaagtctgattgttgattggagatagatattcttcatgtacaaaatggattttcttctgtgatccagaggcaattttgaatctcccgtagcctcactccctactcttgtaatcttgcttcacattttcatgaaaaaatagaaagtcaaatgggaaacatcttaccctcctaccattgaatccacaaacctaccagtttgtgcacctgttttctgccttcttcttggtagaatagaggtattcccaatcctgacaaacgctggtccccctcctgcccttctgtgctctgaatcgctctcttctttaccaaggacttcattcctttatttatttatttttctgagatggagtctcactctgttgcccaggctggagtgcagtggtgggatcttggctcactgcaacctctgcctcccaggttcaagcgattctcctgcctcaacttcccaagtagctgagattataggcatgcgccaccatgcccagctaagtttttgtatttttagtagagacagggtttcaccatgttggtcaggctgttcgtgaactcctgacctcaaatgatctgcccgcctcagcctccccaagtgctgggattgcaggagtgagctaccatgcccaaccccttaccaaggacttcattcctatagtattttttctgcttccagcatcatctaattctctctcactactggatcatttcattagcacacaagtatacttctgttctcccattatgaagacaaaattaaatttattttttaacttttaaaaaatgttaaaaaaaattttttcacattaaaaaaaagagacaggctggtctcaaactcttgggctcaagcaatcaacccaccttagcccctcaaaatgctgggatgacaggggtgggtcaccacgcccagccaaaaacaaaattaaatttaaaaaaatccacaactatattttgtcccttcatctccatctagatattgctacctgatcctactgtctttctcaacaaaacctccaaaaggaatgacagcacttgctatgttcatttcttgtcccattcacccctttctttaaaaaaacttctttaaaaagtaaacattgaatagatccagaaatacacttataatatagtacattaggtaaagactaggctgtgttttttgtttttgttttgttttttgtttttttgtttttgttttttgagacagagtcttgctctgtcacccaggctggagtgcaatggcacaatcttggctcactgcaacccctgcctcccaggttcaaaagattctcctgccttggcctcctgagtagctgctattacaggcatgcatcaccacgcctggttaattttttgtaattttagtagagatggggtttcaccatgttggcccaggctagtcttgaactcctgacctcaggtgatccacctgccttggcctcccaaagtgttaggattataggcatgagccaccgctccaggccacgctaggcttctaaaagaaggagactccctttttccctccacaaaccaaaccaaaccccaaaaccacccagaagcctaagcaggatagcggtttcattcccgctcatttcttacataacagtcagaaggtcacaggcaatcccagactggctggcagctctgccaagcttagcatgtggcttgcccttgtggaccccagttcttcccatctcacagacatctagaaggaggaaaagctccatgtgaagggctggaccctaagtagcacacatctgttcttcccactcacagcccagggccacacttttctgccagggagtcttggaattgtagccattatctgggacgctgtgtacccagctaaaacgttgttggtatggaaaaagggaatgacatattttcaaatacaagtattgtttttttgtggggattttgttattgttgctgtttttaaagagacaaggtattgctctgtggcccaggctggagtgcagtgacatgatcatagctcactgtaacctcaaactattgggctcaagagatcctccccacctcagcctcctaagtagctggtctacaggcatgtgccaacatgtggggctaatttaaaaaaatttttttgtagagacaaacgtcttgcttatattgctcaggctggtctcgaacccctggcataaagcaaccctcctgcttcagcctcccaaattcttccctagatattttagacctgaatatctaaccaccctattggcattgccacttgtgtcctttatgagacatcacagattaaacatgtctagagaggaactctaggtttgaaccattcctccttctaccgcttccagtctttcccatctcaggaatggtgatgctagtcacctattgctcaaaagaaacctggaggtcatccttgactcctcccaggtcaatgtccaaagtgtattttagattctcctacttttcttcatctccatggtcatgaccctggtccaaggaagcattgttttttcctggaccactgtgacagtttcctaactggacttctgattccactcttagtcctgtttaatccccctagcagtgatcttgttaaagcactggtaagattctgtcattttgctttacatcaatcagtggctctccatagcacttaaaatacaatccaaacactttgctttggtcttcgagaccttgcgtggtctacccactccctacctcttcagtatcatctcataccattcctttcctgtctgttcactcctacccactctgctccagcctccctggcttatttttgaccctcaagcatgacaaactgtttcccatcttaggactttcagggccttccctctgcctggaatcctctccccaaagctggctccttcttatccttccgacctcaagttaaatgttatcttctcagaaaggcctccctatccactctattacttgctatcatatccccttgtatgcttcttcattgaacttctttcagtctgacattatcttatttatttatttgtttatttgcagacgtgtttgcactggctgcctctaacacagttgttcttaattcaggctccaggatggcaagttgcctttagttgcactcagctggagtgcatgattgaaaggcttcttaggcagtgtctgggatcagcaggtaagagtgccatgattgattagcaatgtctgccacagactaagaaatggaaggcaggggcacaggtgataagtctttgccatgcctgatctggtcaactgagtttcagcgatttgaccaaggccagacagctagttaatgacagagctgggtggaatctagtctccttggctatgtggaattccttctaagaagcctattcgaacctcacggttgatgccttggccagtagtgaagcctgtagccctttctcaaaggggaaaaaagaaaggaaaggaaagggaagctgggctgaaataacttctctgtgtcaggcgtacagttttggagacttcttggcagttgggaatgcaggcgtaacatagttttgtcaaaatgcccttggggacatggtggcatggtaagaagtgtctagaggagcccagcatgatagcagacactcctttaataggcagaattctgagagctcatcactcactaccacttatccaccgcagtgcccggagcccacagagcagctggcaaaagccccggaatattaggtgtcatgtatgtctgtttagctacaaggctctctctctcttagcttttaggaagtcaggtgtgaggcactctgcctttacggtgtgtcactggggtaagaggcagcccaaatgagccattgtgtctgaggcagcaaggcaagcttgcctgtcacccagaaacccgcacaggacaggtggctgaaggaagtccagtgtatacaagggttgtggctgagagttcagggcatcgcactgggctggaatgcccatcagcatgcccacacaacttccagaacctcaggggctcatgatacccacatcaccttctgggtggttttctcctcctcctggagatgggtcagctatagtttggtagaacctacaggcagggagttcacccccaagtttcctgggaagaacactggccacataaaagtattgaaaaaacaggtttagcacagtgctccccagacctggcacataattagaattagtagaggagctttggaaaaatactcattcctcaacatctcccttgacctactgactcagagcctctaaatgagtaagtcctcaaagtctgtgctgttcaaaggcttcctagggcattctgaggttatatgggactggcgtcacaagtttagggcaaagaagataggacttggagatctgaaaatcaaggttcaaaatttccctgtgacgtttcttggctgtgtgatcctgagcgagtcgcctgacctttctgagcttcagatcttgcatggaactaatcataatcatgtatattcttcctcctcaacattgttgggcagcttaaatgagatacgggtatgaaatagatttgtaaaccatgaagctgcttatttcgttaataaaccagggatgttgaatttggtgatgggggaaagttctggataaggggaagagaagggtgttggtcatgaaaaccttgcaatgccagtggggatcttgacctcagacctggatagtagctggtgggagggcagaggcctttcccccgcctgccctgtctgaacctttcctgttggaagagaaatatgatgtgggaagcgcctgggacaggcttagggccaggtgcagggccacgctttgcagagctttagccagctatttttagtgcccgggtataaaagaaagaagcttaaagtggccccgctgtggctgaccctgcacactcggctatttttacttccgaaagactgggatcttgtccagcttaggcagggaagatgagaagaaaggagggaggtggagggaagaaggaattattttacttccattaagaaaaatgtcagaagcctgatcttatcaagtcagcaagtgggtatccaatcccggatgtgtaaggtgccggctgtggacgctgtgacgtgcctgcagtggattggagaggccagcagagggggagccccgctcccctcctctcaaggagtttctgtcccagagtggccccgaagcttctttgctatttttttgtgccctgagctgggaagtgggcttggccaccacaggcacgaggggcaccagcctggtgacgaggccggtggaggtgggagcagttatgactgcagccaagggtggaacctctgttctcaagttggacaaaggcagccatcagacccgctggcatattccagagagtcccagtgttggggctgtgtgccctgggcacaatatttaacctctctgaaccttaatttcttcagggattttgtttaatacatgtgactgacagtagttacaactgtggggatgtgtttctctcttccatgaggaaggcagttcaagctagactctatgactttcaacaggcagatgaaaggcaagaagttactactgagtgcctactgtgtaccaagcactctgttacgtttcaatattttatgttgttaattccactaacctgagaaaggatacatattttttaaaaattttaacagctttattgaaatatagttcacccatttaaagtatacagtttgatagcgttttgtattcctatatttgtaaattgtggcaaaatatatgtcaagtacaacttggcattttagaaattaagtgtacaattcagtgacatcaaacacattcacaatattatgcaatcaccggccatgtactgtggctcatgcctgtaatcccagtatttcgggaggctgaagagggtggattgcttaagctcaggagtttgagactagcctggccaacatggtgaaaccctatctctacaaaatataaaaaaattggccaggtgtggtggcatgtacccataatcccagctattcaggaggccgaggcaggaggatcacttgagtccaggatcgtgccactgcactctagcctgggtgacaaactgcgaccgtctcaaacaaaacaaaacaaaacaaaacaaaacaaaccattatgtaatcaccatcagaccaggagttcaagtccagcctgggcaacatagtgagatcccccatctaccaaaaaaaaaaagaaaggagggggccaggcacagtggttcatacctgtaatcccagcactttgggaggctgaggcagaaggatcgcttgaggtcaggagttcgagaccagcctgggcaacatagtgagacccccatctttgcaaaaaaaatttttaaaaattatctgggtgtcatggcatgtgcctatggtcccagctacatgggaggctgaggtggaaagatctcttgaagctgggaggtcaaggatgcagagagccaccctggcctatagagtgagaccctgtgtcttaaaaaaaaatggggtgtggtggtgtacacttgtagtcccagctcctggagaggctgaggcaggaggatcactggaacccagtagtttgaggttgcagcgagctgtgatggactcactgcactgcagcctgggcaacagagcaagaccttgcctcgaaaaaaaaaaaaaaagaaagaaagaaaaagtggaatcacataatatttgtcctttggtgtccttttggtttattttccttagcgtagtgtttttaaagtgcattcatgttatagcatatatcagaactttattcctttctatgactaagtaacatttcatgtatataccacatttgcttctccactcatctgtccacggacacttgggttgtttccaccttttggccattgtgattatgctgcagtgaacattgtcctacaggcgtctgttcagattccttctttttattttttaaaaatttgcttcttttccccacactacacagatgtatgttcagattcctcttttcagtttttttgggggtgtatacctaagagtgggattgctgaatcatatggtaattctgtttagctttttgaggaaccatcaaactatgttctacatggttacaccattttacttttccagcagcattgttttttaagtttttaattaaacttcttattttgagataattgcagattcacatgcagttgtaagaaataatacagagagatgtcatgcatcgcttacccagtttcccctaatggtaacatcttaaaaaactacagtacaatatcacaaccaggatattgacattgatacagtcaattgacattgatatggtcaagatgcagaaaatctttaagagtgaagtgggttttttttttttattaatttttttttagatggagtctcactctattgcccaggctggagtgaaatggcgtgatctcagctcaagctctccatctgcacagggtcatgtattccagggattatcaatttttttctattcatggagcactcagaaatattaaaattttgacctgtacacattaagggattaaatggtgttaatggtggttaaaacaaaggatctgtatttattgcagtatttggaaatatgtgacactttacatttgagcattattaatgcttttttgcattcagaaaagtatcaataagatgataaaatctaataatcctagacagtaattgtaagttaattagtattttaatgtgtttcctgagtctacttttagatattttactaatataaggacacaaacaataaggcaactctcatttcaagttcaagtcttcttgtttatttccagttagtgtttgtaagtcttaagcatcctaattttaaaagtaattgcccattgtatcagtcagtgaaaattgctttctgctgcaagttacggagaacctgatagctagcagcgtaagcatggataaatgaagttggtttttccaccttacaagaagcctggagatgcgcagctgctgtattgcacaaagttctcagccatggcggcaggggcgctccagctctttctttcttctctggtgttctttggtgtcctcagacagccatgtcatggctgcaaggtcgttgccacacctgtaggcttcaccttccaggctggggcaagagaaaggcaaaagagctgcactgaacatggctgtcccttttctcagaaaagcaaaaccgttccagaagtcccgccacggacttaacctgacatcccattgccgtggtggcacgcacctgtggtcccagctactcgagaggctgaggcatgagaatggcttgaacctgggaggtggaggttgcagtgagccgagatcacaccactgcagtccagcctgggccacagagtgagagtctgtctcaaaaacagtaaaaaaaggagaaggccgcttcacttaggtgggggtccatcttccccaaccccaggctaggggtgcacaggtctgtgtcacaggaccctcccactctaaatggcctttagcaagccctgagtgtgaggcagtgccagagcaggggagaaatagagcaagcctgggtcctgtcctctaagaacccattgaatcaaagagctgatgggtgtaaagggaaaccagcatgaggtggcctgtgaggtatcagatgaatgttgaagtgctatggcttggcaggagggtggtagaagagatggcctcacccagcctactggaactgctttccagcttaccaagcattttctcatcattaagtcatacaattgtcacaaaagcgatccatcttgagcagagttggttttaccatcgctccccagacctgaagatgcagctgaagcccacttgtccaaggccaaataacctgaaataacccgtaagggacagagatgggtgtgggaccttcattatcgagcccatgggctgcagtgattatgggctgtgcttagggcaggctcagaaaagcagacaggaagcaaggggaacagacacatttcacatcagctgtcagtttgtgcataattaaacccaacaggctactttttttttttaacagcataacctgataattgatacacgtattgattggagccattgaccactatgctgtaaagatcaggaggagaaaatttagaggagaatttaacatttgctgtgccctgggaggtcataccatggaatggcaaagagctcgggtcttttattggggaaattactgaatctctctgagcctcagtttttcttatttgtaaaatgaggataatagcacctgccttatatttttgtgggttaagtagggtaatacatacagacagtcctttacaaattatgctgttatcattatcattattaatgtgatttaccaaaagcttggatgcaatgctggggaacagtaataataaggatgatgataataaccataataatcccattttctaagcacatggtgcatcttgggtaccatgacagactttggggcaggactgtgagccacccctggccttaacgggcgcctagtcagtaagggaagcccagtgtgctctgggagcccatgaagaagcccccagcccggcatggggatgaggaggacagaggtacatccacccctgtattcatcaagtctttcctgaacatccatgaaaggtcaggccctatatcaggacgcagaacatcccagatggagacatcggcagaggtggtggctgcccatctccttgccttaccaagggacagacacctctttttattttgtgttgagcatgcctcactctgattgacagttgcttgctgggaagcaggctggatgggaagcgagagttcattccagtggcgtctaggagagaaggtcagtaaagtggggaaggggcttgtcctggactcaaggagagtatatgtttaagatcctggcatatagtaggtgctcagtaagtgggggctcttactgtctcttatggatgaggtggaccgttttcactttcggtcctgtcaccattccaaggggaagcagagcttggtggagggtttggtttggcctggatatagtgagcagaggaggcttctatgtagacatgtcacaggatagagtcagaaagcttttctagacagggaacgtttcccaaaagacttttacaggaagaatcatccttcctgtgtttgtgtctgctccttatgctgtcactgaaggggcttgcagggggtgagggagcaaatgtgagccaaagtgctagcagcacataggttcaggtctggagctggatggcatctagctgtccctttagggtccaaggtacaggcagaagttgatggtacagctgcgtttgctaggatgccttagtgcagtgctcctcaaactctgttgtccgtgcaaatcaccttgtcagattcctctgtggccaggcctgagattttgaagcatctaacaagcctcaaatgatggtgatgatgctggcctgcagaccacacttgaggaggaaaacagcggagacggctcctgcccacacctactcagcattgtctgtgtgtgtgtgtacgtgtgcatgcgtgcgtgcgtgcgtgtgtgtgtgtgtgctgatctgacgcctaggctttctttggccaccagagtctgctcagcctggacctgggaggcaggcaagaagcgccaaagcagccggtagctgggagcctcagttgcccacagcagtactgtcctcaggaacacatttgttattggctttcttccctccttggaaactgctcgcatgcacagccttgtctcagattctgctcctggagaagtcaacaacaaatgtcagttacaaaacctgatcttctaggcagaaggggagtttattggaagcctatcagaaggctcaaagagtacatttagaacccagacaagaaccaggagaatccctggagagcccaggagcaggaaacccagcagccaggacatactggccaggggctgtctacactctgctggggaggcgctgctggtctgatcagtcctcaccttcgctctgtccttgtgcctccgtttgatggtgcacttggctgagcctgtgtcacgggtccatgccttgacctccagagagcagagagaaggagaatatgtacttctcagatatccattgaggggtggggcacagacttccaacaatttccatatcccaataggggaattccatttttaaaaattttttaatattttcctttgagatggagtctcactctgttactcaggctggagtgcagtggtgcaatctcggctcactgcaacttccacctcccgggttcaagcgatccttgtgcctcagccacccgagtagctggaattacaggcacgtgccaccacacctggctaatttttgtatttttggtagagatggggtttcgccatggtggctaggctgatcttgaactcctgacctcaagggatccatccgctacggcctcccaaagtgctgggattacaggggtgagccaccgcgcctgaccaggggaattacctttaaacaggaagcctgggtgggctgctgagtagactccccctctccccgactaaaaaacatttagcaccaggtacaaatacaccaggttgtggggttgaaaaagacattgctgacaaaaatgaggagttgtgggctcactcagtgaactcacagcacccttgccctccagggctggagtcctgaactgaaaacacctggggcagcagaggggtggggggtagtgtccttagcatcccaaagttcctttagggcaatgcgcacttaaaggagttttctccactcattcagtaaacaaagtaattttgctttcagttgctctaggaaacttcctccttctcagggactgaaatttagtagctgaacatcctaacaaagaaacagccagaaaatagccccaggcatgaatgggctctaaatcatcattccattaagtaaccattgttctgacttccccttgcctgttctggagaaaggcccgaatccgggggactggcagccaacactctggggctgaaggatggacaaggctgggacaggaaggaagattctgtttcttctgctccccatctaggaagtaccagagtttattagaaaagggaaagacagggccctgaaggtcaactgactgaggctccgtgagggtgatactcactgcctttggggaaaagaacagaagttgaacctggcctgtcgcagcagaggctgaggtggcaacccagctttcttctctgaggactctggtctccgtgtctgacttcttgtgtgtttcagtcaaggcccatttcatgatcaggaaaagggagctgttcagtgagctcaaggtaaggactccaagaaggaacgttgtctgaggctggcctggaagagccacagcaagaaggcagaagtggcttccaggccccacagggccccagcagcatgcttggggcacctgctctctggtgctttttgtgttggttcatactttgtaaccaatttgttgggattcatccttgcaggccaggccacattagtgggtagccagtctgagctgtgtgtccacctgaggccctgtgccttcgatctgctggtggggggcatgaaatggtaccaatgtgtctgtccaggcagcaggagctgtgggtgaggcaggcttccggaaggcaagttggattcagtgacaatgacagatctctccagggtaaactctcactcctggaagtggctgtctacgtggagtagccacagctgcttttgaacctactttcaagatatttccaggcactgattttccagtccagaggtggccagtccaactgttgcattcccatcccctggggacttgtgtaaagacagactctaaagctttatgctagaacctcagagagtggggtctagaaattgacatttgtaatgagtgcctcctcagatgcttcttgtgtgaaaagtctgaaaacccttgaagtgcctgtgaatgaccgggattcctttcttttgttggcaagttaacttaaccctccctggattcaaagcagatctaacatagtatgacttcttccgccaacacttggtagagtgcctttgttgacataaggagaaccaagggctgagggttgcttgggatgaatttcagaaggatgctgaatccagagagacaggaccaggcctggggcaacgggatgcgccgttactgttagacaattattttaggattgtccagccacctggcctgaggctggccgtggggcagctgtcgaaggtcatccgagcaaggccctgaaggacccagccagtgctgaaattccaaagtcagtgcttctaccctggtgatgttgaacaactgctgagatcttttccctttcctccccaataggtgtgcgccttgatcgagtgcgtggaggccgtcagaaatacaagcgacggctggactcagagagcagcccatacctgagcttacaaatttctccacctgctaaaaagccatgtgagtgtcagggcagtccctgccccttttgccagcatctgtacctggaacatcaggcatcccttagggaaacgtcatcttcccaccactgggtcatgagacaatgtggatcttggggaggtgacatcagtgcctggcacatttagaacgtggctccaaatgaagcatggtcctgacaagccacaggccccaatgtccagaacatgctccccttgccacccacccaaagttgctctgcaggttgctcctggagaattcatcaggcaacttcccttggagggatatttctcaacagcccagatcaccactaccagcaacttcatggagccagaacaggaggggagattatagccgctttgaccttcctggagctcttaggaacccaactttgcttcccgacccatctgagcctccaccccggcccctttcctcttttcccagcgtttacctttccctctttggttgttgcagtgaccaagattgtctcatacctactggtggccgagccggacaagctctatgccatgcctccccccggtatgcctgagggggacatcaaggccctgaccactctctgtgacctggcagaccgagagcttgtggtcatcattggctgggccaagcacatcccaggtgagcatgtgggaccaggggagagtgtggccagggactctcagccggtatctccgcagcctacccaatggctgtgcttctgatgcccggatcctggaccccagaaggcctgtgaaatcctggcaggcctgtttctctgagctcctcttctctccttgtagcattggagaggaacaggtagttagaagacccagtgaggcttatacactgctgcaggctcttcagaattagttatcattcgaggcggggccatgtttggatctacaatcagtgtaatattcaaagaacaagttccttgagcccttaaaagggcaaagagtagggttttcttgtagaccttattggaaggatgccggaaaacaacagaagaaagactgaccctctcttcctattggaggcagcagaatggagcagtgaagagcatgggcttgggaatcagatcgggattccaattctgggtctgcagcttactagctgagtaaccctaggtaggccacctgacctctctgtcaaatgggaatacaagagtcccccactttgtgagctttgatgtgagcatgaaatgagatcctgtgtgtgaagtgttcggcacagtgtctggcatgtgctggcatcagttgcatgcccactattgccatttgcctgatctctaagggaggcctgtctctggattggcttctgagattttaagggcctttctggtgcggaaagtgtgtgttacatgtttcaggctgtgtggacttctcttcgctgtgtgtggacccaaaccctgctttcagcctctctaggtctgggcagatggcgggagtttttttatttttgtagacaccaacacccatgtattctacattacatacacattgggggcctttctctgtgcaatttattcctcaactcctttaagactctaataagttgactcagagtgtggtagaaacatccttttatccttctggtaatgacccaccatgaacatgggacaagtcagcttcctgtctgtagatccgtttttggtttgtcatggctctgaaaggtgattacagcagacgatacagcaaaggtgacctagactttagatagcaagacccacaattgtttgtttgtttgttttttgagacagagtcttcctctgttacccaggctggagtgcaatgacgcgatcttggctcactgcaaccttcgcctcccaggttcaagtgattctcaggcctcagcctcccgagtagctgggattacaggtgcccgccaccacacccagctaatttttttgtatttttagtagagacggggttttgccatgttggccaagctagtctcgaactcctgacctcaagtgatctgcgcacctcggcctcccaaagtgctgggattataggcaagagccaccatgtctggcccaaggcccacagttgattgagggaataaaaaatgtccttccatgtgagaccttacatgcccaagttgcaggaaggagccttcccgtggacagggacgcacagagacatcagatggcccagaggctctgctggcagggactgcctggtggcccctgggcattctgaccagggatctgggctggtacgcccttactaaggagctcaacctctcggggattacacactcagtagtttttgaatctgcccagtgctggttcagcacagatgtggggtcaggccactgcttaagacacttcagcctggattgctccactaacccagggccaaattgggtacgggtacccctgcccccgccccacactcctgttccaggttgaacagatcctgcatcctagcaatggctcacgagtggcgcctggcggtcccctgggtcaatgcttccttcttccacaaccccacccctgcaacaccacggaggaagtagataagaccaggagaccctgtctcccctgcactcatttttctctgtgcctttccacctcccagctccatctcccatctgtgcccaaccaagagggcagggctagagcagagtgagtgctaaaggcatagactttggaatcaggcagcctgggctttcatctcagctctgtccttactggccttgtgcaagatgctgaatttttcggagcttcagtgtccttgtctgtaaaatgggaatcacgataaagctccttcacgggattgccgtgaggatgcagcgagcttagtgtgtacactgggtgaatggcagagacgcttaccagggctgttgtagttgctaatagtaataaaagcctcctttcatggcttaatttatccttgtccaaagccggattctttttggtaaaaaaataaaataaaataaaaacaggggctcagttgtccatcttaaatgctaatttgcctattttgcataaatctgcatgctgaattctttgcctcctgaccttccagtgtttaaggtaaaattaattagtggagtctcctgccactgcatgtagactcatactaagggcaatgacacaatcaaatgcctgattttttttttttttgagatagagtctccgctctcttgcctaggctggagtgcagtggtgcgatctcggctcactgcaatctcctcctaggttcaagtgattctcttgcctcagccttccaagtagctgggactacaggcacgtgccaccacccctggctaatttttttttctatttttagtaaagatggggtttcaccatgttggccaggctggtctcaaactcctgacctcaagggatccacccgcctcagcctcccaaagtgctgggattataggtgtgagccaccgtgcctggccaggtgcctgatatttttaaactaatcaacttaatcccatctcagattagatggaaaatgcatctgaagatgggctccctctccctgaaagagagagagagagaaagaaagagagagagagagagctggttgagtagggaggataaaagctggggcccaccctggggcctgtgttggctccagtccatctagttcctgcacagacagaaagagggggactggccactgcaggctgctcaggagtagagctctgaagaatttaggccactgtccttaaacgcaaggtaccgcatctcacgagagggcattgcacacttagctttgcatgcacatattgagaagtcactacacatgaggtcccctgataggagttgtggctgagacaaggaatttattttgccccaaggatcccatttggaacaaggctgacatccagggggaacttggttcactcagaatctcagccattgttcaagtcagtctgacattgtcctaccccaaatgcaggttttttaccttgagttgaatgttccaagtattgggttccccatagggcaagcccaagtcttcagagtgtccacttcttattccatgagatcaagagctagcagactttaataggcagtggggaattacttgatgaattgcagcctcctccaaatgacccgagcctgccatcctgcctccctcggcagcctcatgcctgtgccagccaggaaagcctgcccagggagtttccaccaccctgtcctgcccaggctcccatgtgcagggcatccccagaggcctcctcacaaaagtccctcagcggcgctgctcccaggtagcccccgtctgactcaatgaaatatgagctgccgagtgacagcagctgtgtctgaagtggccccagatcctataattacatctccctttattacctctgctaatggccctccaggtcgacagaaacgatcataaattaacagattatgaactccacttgccacaaattacgtgctttttttttttttccttcaattctaggagcttgtggtgccaaatcacggatggggggatggggagcttggggagagcctgaatgttattagatgagttggtgcagataaaacaattttcctggggcagcagagctccaagtgggagcatgaggagccaggagctctgggcaggcccgagagccttgagggggcagtgccgcctgcagtgagcccggcacagggacacccctgcactcccaggggcacggggcatccccagaccctcccggtagcctcttcaggggccttttggtcccagagttactaataacttgagaatgagacccagcccagctgagagaggcaggggtggaaggcgctttactgaagggcagagaggagtgcctgggctccttctgggttttaaataaaagaatctgtggttttagtaaagacatcagatgggaccaatgggtcgaaattaagagctccaaattccccatcctaaccttccttctgggaatttcctgggcagatacaaccactgtgtgaggtgtgtgtgtggatgggggttgtgtatgtcccccagtccatggcgcttataccataacactgctttacacctgctttttccatttaattatacaaaatagtagcacttacctggcaaagcagggttctaagtgttccacatgtcagctcatttattctgaaccccatgaggtgagtgctgttacgatttccattttacagaagaggaaaccgaggcactgagaggcagacttgccagggtcacagctagtgaacagcagagttaggaatctgatctctgtgctcatacgattacaccctttttgcccccttgggtgtctttccacgtccacacagagttctaacttatttggcacattcatttaactaaaaattacatctatataataatcacatgtattacattagttacctttttttttttctattttgaatcatttcaagcagtgatctaatacccttttacatttatctctatgtctttattcatacttttctttctaggataaatttctttttttttctttttgagccaggatctcgctttgtcacccaggctggaatgcagtggcgtgatcttggctcactggagctttgaccacctgggttcaagcgatcctcctgctgtagcctcccaagtagcagagatcacaggcatgcaccaccatgtccggctaatttttaaattatttgtagagatggggttttgccatgttgcccaggctggcattacactcctgggctcatgtgatcctcccacctcagcccccaaagttctgggattacaggcgtgagccaccgtgcctggccactaggagaaatttctagcagtagaattgctaggttgaagggagcaggccttttattttatttttaatttaattatatttatgacttacttttatttttaagcatcttaagcactgactgggttcagaagccaaatgtagacacaaacgtatgtaacagaagtctcacctctatccctgtcccctcccattctgacctcctagaagtcaccactttttctttctcaattttccttctggtgtttctttttgcaaatactagaaaagatttgaactatttcagatgttaaaagatgtcaaatatctccccctcccttccttgcacaaaatgaagaaggctctatcaccattcagcgccttggagtatacctttggattatcacagctattttcagggctttttgaaaatgttcagggaggaagagagtgatcaggggctgagtccagaactcgaagcagcctatcagaggtttgggaacaggcctcccgggtacatcctcccatggcagcacaaaactttccaagtccagtctccctcccaccacccaagggcagggcctgactcctacaagataggcaaaggcagctaaccctgaacctgagtccaaagatcttagagggtctaaccaagtactgtgggcatattttcttgtctcctgggagtcaaagcctgtggcatttgtccattctgtctctccttttagctgcaaagttttgtcgggcagcttctttgctgtgcccagtcgtgggggtaggggaaggaacagctcagtgactgtgcaccctgggaactcagagctgggatgggccatccaggggcacctgggcatgtgcctcatcaaaggtgccctcaccaccccgcttgacagctcagccctcaaggctccccttccacaaagcctccccagactcttgtttggaccaccttccccagtgcgtgctctcagagccctgcatttgctgtagctcttcttatattgcaactttgtgctgatttgtgccccttggtgtgtgtcttccccttcactgtaaaccgttgaaggcagggagcagttctggactgagcacaccattctgtccccggtgcctagcacaggcctggcacttagtaggtgctctgtaagtttttgctgaatgtctcaaagggcagaaaagcattctagtaacatcctaatgattgtacctgcaggatccactgcacaggggacttttcccctgcgtttccagaagcctagtccttacctcatcctctctctccaccaccttccaattcagttgtctgctaatttcgcccctgccctcctcctccatctcccctccagtctgtctgcttttagactccctccctagagctgtccaacactccccccaacacactctccggtgctggctgattggtatctgttaattaatgttgcccaaggcctctctcctactcaaagacctgataagggaaattggatgtccatttctatctatcttttattacctcccagctcccccggccaccacaggcagccacacaccctctcccatgcagggaatctggacaacccccccccacacacacacacacacacacaccctgatcccctgtcacagcctctcccctgagaaggtgcatcaatcaaagctcccccgtgtcagtcggtgtaatcactcctgctcttttgttgatcacccatggattccgttagccagtggtgatctgaggcccaagttgtatagatcagtcttgggaactgtgataattcacttggagaatgctcacagggtaagggtggtagggtggtctgcctggtcagggaccttcagctccaggagtgacccctaaggttcaactgccatgccctgtgtggaagccagggaagaagcggcatttggagacaggacagcagatggatgggggagccacacaagccaaagagctgggtggtccagaagctcaggaccccccaggcctccaggcaagtccagagaggagaagtgagtgatgccaatggtgtgccaacaacaacaacaatattaatagtaacaacagccacagccatcaccagcaccctagcatgttgagtgctgatggcgccgggagaggtgcccagcactttacatgcatcttctcttttcgcccccacagcaccccacatcagaaagtggcttccagccaaggatggggtctaagtcagcaaatgaagtagaaagtccttcctaggcaaaattacccctgaaaaaaatcccttcatgtcagttacccatagtgcatggtgcaaacaactttgtggatgcccttctttctttgaataaatccagcatgtccatgttagaaccaatcactgagtttctgtttgaatctccagtgaagttactgccttgtgtttggtggttaagatgcttgaaaatcagctgacttatttatttacttactctctcttactctcctataaatcaagatgttaattgactttgcctaatttaagtgcatgtataatgcaattccagtacattatcattgttctgcagtgagaactttcatctcatcattagtaataatagctcagtaaatactttgtatgttctggaatcatcgtctcatttagacctcacagcaactctctgaagtagaccctactattatactatttcctagatgaggaagctaaggtttggagaagttgcatggttttcacaagttcagcctacagctagtaagtgggagtcagggttcaacccaggcaatccccacagctcattgggcaagacagtgtcacaattctggagccttctccatgcccaactttattttcactgtggaatcagcctcctcaatagcaggcaggggggaactagcatgattccaagctcccagaacaggcctgctgggtcatcgttaagcaaagagtgatggcccgggaagaggggctctgaccctgggagaacaggctgtcctgtgagaaagtgcccctgaccccgggggctcttgatctcttagcagccccaggctgtggtcactggggccttcccctgtggctttgaacagctgcgtcctcattcttggtcaggcctgtgggtctctgcacagctgagactgcatcaaggatcaggtgtcattttcaaacaccaaagcctcccctggtttgagcagagagtgggccctggaaactccccagagtggccgagagcacgtactgctgcctcctggttccagtatgtactcagtcactcctttaactacaaatgcattgaattaatcaaaaagcctctacagacgtttggaaaataccatagagctaacaatcataatgataacaacaactgtcaacattgactgagctctcgttttgtaagtcttttccgtgaattccaagtctgaggcattccccaaggggaggacagtgagtcttacactacacagggaaagcctgggggcaggatccaggggtgccagggacaccccgcaaccagccacgccctgcaacctctgcccccagcaagccccagggaggcccctggtccgccctcctgacctgctgctgccctctgtgccccctcttcctgcaggcttctcaaacctctccctgggggaccagatgagcctgctgcagagtgcctggatggaaatcctcatcctgggcatcgtgtaccgctcgctgccctacgacgacaagctggtgtacgctgaggactacatcatggatgaggagcactcccgcctcgcggggctgctggagctctaccgggccatcctgcagctggtacgcaggtacaagaagctcaaggtggagaaggaggagtttgtgacgctcaaggccctggccctcgccaactccggtaagggtggcggcggggcctggaaggggagcttctagggctctgcatgggcctaatgagcccatccctggggcctgtgggcagggctggctgccatggatagagatgaaaggaaaacactgaaactttttattactgaagattgtccaaggggtggcctgcagataaaaagctggtgatgaaggctgacactggctgagcatttcctaagcctcagacatccagactggcacactggctaaggacatgggttctgaggccacattgctaaggagcaaatcccacgtctaccaactgggcaagttgcttcactctgtgcctcagtttcttcatcagtaaaaggagggcagccaaacagtccctactctacaaggctattgacaggatttctttatacataattatattgcttgcaacatgcttggcacataaaaagcactcaattatttatttatttgtttattatagacgggatcttgttctgtcgcccaggtaggagtgctgtggcttgatcctagctcactgcagtctcaaacttttgggctcaagccatcctcccacctcagcctcctgagtagctggaactacaggcatgtgccattattccagctaattcttatttctattttttattgagatagggtctcactatgttgcccaggttggtcccaaactcctgggctcaagcaatcctctcacctcagcctcccaaagtgttggcactacaggtatgagccaccatgctcagcgtcaacttattaaattagctaggagtttactgaattcttacaaacaacccaagagtaaaattcttattgttgcaaccccattttacagatgtggaaactgagacctggaaaagtaaagaaaatcacccagggtcacacagttaaaatgtgtcagagttaagagtcaaaccaaggtcctctgattccaaaatcaacctgaacctatacccactccttgaatctttcagtcaaatttcttgaacacaggaggataaaaccttcccaactgagtggtttaagctggagttacaaaggaggactcactccatttcattagcatccaccaacttctggctagattatctgaggagagaggcaggcgttgggtaatgccagtaagtgaacttgaatgtaaccaacatccacacttagagagcttccacactattcagggaatggtgctgggtgccagggggctgcaggagaaggataaatacagggtaccctccctaaagagaacacatgccaggaatcacacacatgattctgctgcagagcagtgtgtggcagagttaaccgcccaggtctgggtcagatagacccaagttcaaattctatctctgacacttcctagcagtatgaccttgggtaattcagtgtccttgtgtgttcagtggggatattctgagcacctcttccaagcactttttttttttttttttttttgagacagagtctcgctctgtggcccgggctggcgtgcagcgatgcaatctcggctcactgcaacctctgcctcccgggttcaagcgattctcgtgtctcagccttccgagtagctgggactacatgcgtgcaccaccacacccagctaatttttgtatttttagtagagacggggtttcgctatgttgcccaggctggtctcaaactcctggcctcaagtgatccacccgccttggcctcccaaagtgaggggattacaggtgtgagccaccacgcccagccccaagtgcttttgtgagtattaaagatcgactgacaataaagcactcagcctggtgcctggcctagaggaaatgttcaataaatattaattattatcattattattaatgatagaggatacaaagtgctattagcatatggaaaagggagaactggctcccagatgcagacagtacacacagggtaaccaactggtttgctcaatactgtcctgcttttactgaaagtcccatatcccaggaaactcgtcagtccctggcaaactgggacagttggttgccctagcacatggcttcatggcgcatgcagggggtgctgttgatgacccacttggatcccttttactgggttagtgcatccatcccccagctgctaacagttcagaggtacccctttgcagggcctaccctcctctgccttgcccagagggttatgtggccctttccttggcaccaccaggcaatggtggacccacatgggtacaaaagttcggatcagagccctgcatgggatcaggctgaagccgaggtcccatctttgccttgctttctccttccctgtgcttcctgcctccccacttcctttctcctgaacacatgccctccgtaaatgtctgtacctaaacccttgcctcaggctctgctcccagggaacctgatctaacacagaaaaggatgccacttttttagttcaaatcttttattaataataaatgaatgcaaaataatattaaaaattttacatacgtccacagagaatatttacacattgaattccaaaattgtagtgcattctttgttagagaatcctaatgctgtttttttaaagtatagttttagatttacagaataactttttttttttttttttgagacagaattttgctcttgttgcccaggctggagtgcagtggtgcaatctcagcccactgcaacctccgcctcctgggttcaagtgattctcttgcctcagcctccttagtagctgggattacaggcgcctgccaccacgcccagctaatttttgtatctttagtagagacacggtttcaccatgttggccaggctggtctcaaactcctgaccttaggtgatccacctgacttggcctctcaaagtgctgaaactacaggcatgagccactgcgcccagccaattttttagaataattgagcagatagtacataaagttccaaacacccactccatccatgtcctccttccctagcagtttcctctattattaatatcttgcattaatgcagtaatgtgttacaaatagtgacctaatattgacatattattaagtaaagtccatagtttccatcaaggttcactctttgtgttgtattgttcttcttcttttttttttttttttttgcttttgcttttgttgcccaggctggagtgcaatggcatgttcttggctcactgcaacctctgtctcctgggttcaagcgattctcctgcctcagcctcccaagtagtatgcaccaccatgcccggctaatttttatatttttagtagagacatggtttctccgtgttggtcaggctggtctcaaactcccgacctcaggtgatccacccacctcagcctctcacagtgctgggactgcgggcgtgagtcactgcacccggccgactgtgttgtattgttctataggttttgacaaatgcataatgacatgtttctacaatgacatatacaaaatagcatcaaggccctgtgcttcacctacacagaggggagcatttgaaccaggcattgcagagggcttcgaggttccgtcgggtggaggaggagcaaaagcagttcaagcaggggaagccaggtgcacaaagccaggtgcaggaaggctggccaggccttggagctcaagccctctattctgggctctcctaacttacaccagacacagagctcaatcttgcctgtgttgggagaggagagtaaagaggtagtgtctcctccactcttacttggtcctcagtaccggaccacaccacaccagctttcagctgctcttcccttgatctcacatggacccgcacacatacacacatgcacatgtatacaaacacatgcacatacatacacacccacacatacacacacatgtgaacacacatatgtgcatgcacatacccacatatgcagccacatccatgtgtctatagacatacacacacacccccacctgaggacccatggaggtttgtcaatatgaatccatactgaacttctgttggcatcaacagaacttctgttggcatcagactttgcctgagtgcactttgtcccatggtatgaggattcaggtctccggacttcttgccccagcaacatgtagagagccatcctgcagctggtgcacaggataagaagctggaggtggaggaggagtttgtgatgttcagggccttggctgacccccaagagggaacacacgttgcttattccagagagccgcaggccttgatgaggggaatgcttccttcccagcatggaggggttgagcatgaggccctcttgctatcaagtagatactcagaaagcaggctggctagtctttttttttttttttttttttaagtaatggttttccagcctaggcaacagagtgagaccctttctcagaaataaataaataaataaaataaagtaatgatttaaaggagtgcttgccaaagtacctgtgatgaaggacccatttttaaatgtttcaaaatgttcaatccattatggacagatcgttttgtaaaatacaacaaaaataaattattaaaaaaatgaaattaaaaaccagatgtacaaaacatgagccaaatttttaaatttttatatataacagacataaatataaatcatccttccaaagtgctataaagtttctaaatgcttattctcagtttcttatcacagaccagtaacctccagagggcaggcaggaaccagtctgtgtaccatgctttgagcaggctgggtttaaagcgtgtacttcagggtcagtgagacctgggttcaaatcctgcctctgccacctgctggctgagtgtctggcaacctgacctttgtgagtctcagtttccttatctgtgaaatagggagaacagcagctcattgtgaagaatgtgcagtgacgcacataaggctgtggccaccgtgcttggcacagatccctcctagctcattgtgtttctgttgggctctgcggggtatagtgggtggcctggggaagaggagccagttggatgtagctcctgcttccaagggagataagacatgagcctggatgtggcagaaagagccagtgattcctggcatgagagaggatcatgtaaagggctcaaggagggaagagtaaattgttttcagctggggaggtagaatctgagtggggtcttaaagcaagggacggttcggtaggatgggaagagggagtgtaaacttctgtagtggggccatcagctccaggcaggaaatggggaaagaacaggccagttgcagggagaggctagaaaagcaggctggggtcagaccagaagctcaagggctgtgaagggattggataatgatggggtcagtacagggaggcaggaagggttgtgcgggagtgacctgcctcagccttgagggagaaagatcacccaggcatcatagagaaaatgtgttggctggaggagggatgggtgccaggagaccattgaggtgtcctagcagcagcccccagggccgccatgggtgccactgctgaggctcagtgcacgggatgactcaggtgtgggtccagtggctcagggggctgacgctgggcagaagtgcccaagcacatcagaggcagactgtgaccccacaccacggccccctgggagcctgctggctgccgtttaccccacatcccagccatccccaaagctccctgacagcaggaaaaattcatagccattgattttgtaattaacagtttatcaatgccatcgatacagaccggctgatggactgcaaagaaattaatcttgcaatgttattttatttcatttttggtcgaaggcagctgccaattttgtcctccttggggagagtcgggggaggatggagagggcggggagagggagctggcaggagtcaggagcccacatggcaatgcccagccatgtcaggtacacactctgtaagtggccgagagtgtaggattggggccttgcttcatctcccacctgatgacgaaggagtgctcactgccttggtagcagggagcagaaaaatgtggaggaggcttgggtgtggggccagtgaagacccagccctgcaaggacactcacccccagcctgagtccccacaggaataacactacctgacactgaccaggtgctgaccaagctctgggtaatgtgctgcttcagtcaccctcaccaccaccctgtgagtcctcactcctgtgttttacagccggctcagacccagctgtaacgtggccgtcagcaggtgcctccctgccgtgctgggatgtaggtaaattttgtttgaacccctaggtcatggcctaagttcaaaacctttcccaagattttagagaactccctatagctccctccatcaccgtgcctcatgccgccaccctgacacagagctcagcccctatatctgtgcctatattctgtgtcctataaccagaattttgtcaggttagcgattgcactgaagacttggggagctggtgcctggcagcggcagctgcagtggttgtcatggtgatagtagtgatggggctaggggcggtggtaggggtgataccgctaccagggcactgacttgtgacaagttctgttataaacccttgacctgtttaactcctttaagcccttgaggtaggcatggctattatcccattttacaagtgaggaaaatgaggctcagagaagttaataacttgccgaaaatcacacagcctgcaagtaagggacacaggattccaacagtctggctccagggtctctgctgccaccccctggtgacctcttgagaaatgtcccctgtagacgccagtctctccctgggtttgagtcccagctctgtcattagcttctgtgacctctctgggcctcagattggctctctgtgaagagagggttctgaagatacccctgcctgcctgcatgctgcctcctggaccccaagatggcccccacgccaggcagcactccctggccaagcctgctaatgctcgtccttgtgcctgcagattccatgtacatcgaggatctggaggctgtccagaagctgcaggacctgctgcacgaggcactgcaggactacgagctgagccagcgccatgaggagccccggaggacgggcaagctgctgctgacactgccactgctgcggcagacggccgccaaggccgtgcagcacttctatagcgtcaaactgcagggcaaagtgcccatgcacaaactcttcctggagatgctggaggccaaggtgtgatggccccgcacacggaccaatgcccacctacagacggacaaatggacagaccgaggtggagacctccacaaccaccagcctccaccttcaacccctgtatcatggctctgagctgtcccagaggtgggggtttctcacctcctggctgtgtgcagactcccgggtgcagtggggcgggggacggggatgggggggcaggggtgtggggctcgactgtaactggctttttctttggtatgtctttccttctccatggacggtgcggaggcctgggccagggctgactcccttcaggagtggagaccactggagcaagtgccctctcccctccaccgagccaccaagaggcagcatgtgcatttcctaactcccttgccccctcccccatctgtggcctgggtgggcaccgctcaggctggataccacctggaggttttccttccgcagagggcaggtacgcaagggacaacagtatctttcttccagaggtcctacctgctctgagatcctctggggccggtcaagaggccccataccttccacagtttccactcagctttcagcgaggggggacccacaggagagcagcggctagagctcaagtgcttcctgggcaccccacccctcggggcctacccccctgcctgtcacccactgcgccggtgtccacctgtcctcctcctcttctcctcccctggggagtcccccgctacttcctgaccctacctcagagctcactcacccagtgggttcagccacccacagcgactccaggggctgtagacaggaacgcactggcacagagaagagcagggaccacaccatcttccccagaaccctctccctcttcctgccttccccctctccctgaagggcaggtccaggccaggtgagcctgtgagaagctcaggagcctggctccatccaagagcaccccggggggaggatcaggacaggatggacagaggcccagactcatctttgccaagtacagaaaggctgagcagctgagataagtaggtaggggagccccaaagggagggagttcagcggggtggcctgcctcatccttcctggcttcccttccctgcacccagcatcatgccgcagggccagtgtaccagtgccacaggaggggtgccctcctaccacacttgggcgaccagaggtttggtgtagttcccctgggcaccgcgagcacgccagctctctggcaggacccctgcagtccccctggctgtgccaggtaaccaaccgtcttggtttgtccaggacgtttctttatcccaggaaactcctctaccccaggcacacggggccagtgggtcactttatttctgtggatggccgtgaaagttttcactaactcaaggggcagccctgaacacccatctgtgctcacaggttggccaagagcagcttagaggatctcccaaggatgaaagagtgtcaagccatgatggaaaatgccccttccaatcagctgccttcacaagcagggatcagagcaaccccccggggatccccaatccacacccttctagtcctacccccctcaatgagagaggcaggcagatctcacccagcactaggacaccaggaggccaggtaactttctgcagcctttccatagaagccctggtcccacctccctagctctaccccaggaacctcccggcctgggcttctgggctgggatgtgctgaggtcatcccagataggagggagggctggctgaaatccacaaactgcagagcagctctctgatggtgtcccacacagaaaatgttaaggattccaagagccctcccagaccagtgatgtgtccctccggctccccttgcctgtggggaatcgggtctgagtcacttgatgagtaggcactggagccgttacccaggatgctgcagccctagccctccatgcagcccatcttccctcatttgggtgtaggcacacatttggggcaaaggccccttcttggcatcaaggaacaccagctacaaaccaagtctagcacagtgtttagaggctctgccctgaggttctgctccagggaaaccttcacagtagagaccttggggtgtgcgctttgggactccctcagtctctcactgtgctgtgtccttgcagcggggccgaggtagcaccctgctctgtcacttcctgctcaagctggaggacccaggtggcagggcatcatgcccagctggcatctgctgtccgtcttttctagggaaagcatttctggctcaccatgtaacatctggcttggagcaagtgggtgttctgcacaccaggcagctgcacctcactggatctagtgttgctgtgagtgacctcacttcagagcccctctagcagagtggggcggaagtcctgatggttggtgtccatgaggtggaagctgcttttatacttaaaactcagatcacaacaggaaatgtgtcagtaacaatggaactccatccaatgggaaagttcctggtactgaaggggtccattggacactcagaaaagaagttcaggggccaacttcttagctggaatcctggccagatgaggaccctctccggggaagggagaggactgacttagtggaaggtggtgaagtgaggagagtttaggggacccttcccccagtggaacagatctcaagtttaccctaaacctgccatttctggaaaatctgtaaagaggaaacagcctgtctcagctgtactctcatgatacaggtcatttgaaatgaaccaagaaataaaacataaaaatccaaccatggagaaggtggtatggctgggttttgtttggtccccttgtcctcatacgttctaaagtttccagactggctttgtcactttgtgaactcgtcatgtgtgaaaaccaatctttgcatatagggaacttcctcgggccacactttaagaaccaagtaagaggctctcaagactccagcagagtcgggaggccatggcagcgccttagaggagctggaacctgcacccacctgtgtcggtgggggggggcctcctttccccatagactctgccctccctctgtgcagatggaagtggcaggggagggtgaccagcttgtgacaagaagaccgaagggtccagagtccatgctcacggaacagcaccaaagaaaagcactatgtggaaagattgttttattttctaataatgataatatggctggaatggcttcttaagatgtatatattttttaaaatggcagttccccattgcagcatcacctacttgtacgtctttctgcctctgtatatgttctcccagaaacccccatgtaaatcaaatgccctaggatgcttccatcctggtcccatgtatctggaatctaataaataaggaaaggaact

SEQ ID NO: 52 - DNA, 160512 bp, Mus musculus
  source 1..160512: mol_type = genomic DNA
gtgcccagtgtaagctacgccactcaagaagccattgtcttcccagctcccacagtacttgctaatcctggtcctccccctttgcccatacatgacacgtcccctttctcgcgcccctaggagactacgaagcttgcatggggctctgtggagttggaagtccagaggttttggctgttttgcttgagacctggttatggttgtgggatttttttttcttttctgtcagctgcctgttatatcaatcacggagtctggatctatttatagtttgagagtactgtgtccttagtcacaaagagacacagacaggggactgtcagctggtgttggaggagccaagcaacgagtcatgagccgctggaacacctgagggtaacctttccttgcgcgcagccccgtcctccagccagcccaaccatgtaagtaagctaacttctcctctccctcctccccagactgccctgtgccttctgtcctcccgacacatcctcctctctcctgtgtttgctctctctttttaatggataaaaatatctccccacgcccgctctttcatcctagtttctgtgcacgaaagcatccatccctgtgtggctgagaggtaactgttgcctctctcagactgtcatgggaaggtcagagggtctccgcgtggctggatgggatgattacacagactcgtttggaatcagtgggtccccctccggtttttatttgttttcatggagagaaagtgagtcaatcaaaagggcaaagaaaagttcgtactcggctcagtggggtggttatgtctcccagcgtgaaaacttttatttgctagcagctcctggcatttggtgagagaggaaggtgataaagggggccggcctgcgtctcagggtgatgatgtaggggtgctgacagacttgggggcaaccctgggagcgttcaggttcccctagagtcatgacagctccaataactatcttatttacagagactccaagaaaaaagcacacacatacacatgcctttccgtggagtgattctactttgcaaagtggagacaaaagctgccaacccgatttatctatctatctatctatctatctatctatctatctatctatctatctatctatctatctatctatctatctatctctatcatctatctatctatctatctatctatctatctatctatctatctatctatctatctatctatctatttccttttttgctgcctggggctggcttcattgctgggtgtattttctcaattctggaaggcgttaggaagcttggtccggaaagagaaggtattagaaagtagagggccagttgtagagggctctgcacccttcactgaggggggtggggggggaagagttaccagttttgtcaaagctaagctcagtatgctcaaagtgggcaactgcgcattaagtggctgtggagcacacgccttccacgtctccacccccacccccatcactgtcctgagtgagtcttagctgccttgagtttcatggatccttgaaactttaatttttagataatgggtcatattttccagaattcctgttcttgggagagactggctttatagcatttctgaaagagaaggccttaaacttaaaaaagaaaaaagaaaaagaaatctatatgttggtatttaatgtatacgatgtacaaccttttaaatagacttcattctttttacaatgagtttctatttacttatgcattggttaccagatgctatattgctaaggactactcctagatttgtttaggaaaacagtatccgaacaaagaaacaatcctctctacaatgtaaaagcattaaacaaagcaaataggcctgaattggttttgattacaagcagaataggtttgtcagcaaaactgttgaggcaagttaagtaacttgcgggggggggggggccacacataggcttccaggagccattccatcccatttccattttgactttccttccttttggctccttatttttacatttgatgttgggttattaatatctttaatttgcttttgtagagggagggttgggatgaagaaggaaaaagaaaggagaaggtgaacagcgtgtggtcaccagtggaaaaaacccagaataaaaaaaaaaaaaaaaaaaaaaggagatagcctggtgtggtggtgcatgcctttaatcccagcactggggagggcagaggcaggtgggtctctgtgagttcgaggacagccaggacagccagggttaccagggtgctgtaggtacactgtctcaaaactgagaagaaaaacagcaaacaagaaaggaagggagggagggagggagggagagtaaaaagagtgaatgtcattattttaaatctagtatcaaaagcataatcaagaacccagggaaggggaagctaggcatactgtccatgtaaggctactgttatttcctattccaaggtctgtgtgacaaaccaatcctgctaagctctcccctccccgtgttggagtgggattttgtgggttgttgttaattaaggctcccgtgaatcgcgtgattgagacattgtgcacagaaatctgagcggtcggtccactgtttgtaaaactgaacttcccagacctcctgagctcagtggcttttaaaacagtctggaatctttttttaacctttcagtgtaggagcaaatcctttcccccaccccaactccacacacacacacacacacacacacacacacacacacacacacacacacacatacaccctctctctgagaccagtctggtggggactcgtgactaaaggtaataaggagagttgtgttcttgttagtgttcactgtccagagaggagagcgtttgttgaaacatatagaaaccagccacccttcccccttgacctgcagaaatgtttggatgggcttgggggttgctgggtatcataattgagcccttggcattggtcccagtttttaggatgtggtttgtccctctttgggttccctatgggggatgcagttgggggaaacttcaggaaatttgcatacagcctctgattacttagtttctgcttcaataaccgttaattttatgtggtctgagctcccatcagactcattttcccccctaactgatttcttaaatgcaattggtcacggagctgtctgagacttcctatgagcagactctaacactgttcttggaatgaccactcattgctgtgcgtgaggacaagctgactcctatgtgagtgcattgtggtttcatgggccctccttccctggagcacgcaggaatccattctgacctcttcccgaattggggacagtgaggccaatgagcaggtgctttggaatgctgcaggctcaggtgcaggcccatcaatctccaggagaaacgatgacaagtgccagaaagcactcccctgactcaaacaattcaagtagttgaggtctctccaaataccccatgaatagaacctggcagctggcagggactttaaaccaaaggctgtggcagagcttcctccctgtcggtacagctccactgtatctctgtccatctctttcttatctctagttttacatctcattatctgttccctcttcccccaccccaccccccatcctccatcccccaacctctcgcctttcctgaaaacacatttctatctggcacagaaaataaactcagattgtgggtagttatgttaatctaattcaatcctccgagggttaggagcaagattctaatagtagagctgttgagggcttttttgttaatggcttggggattacattgagttaaaggctcatttcctaatcaaacagagagggagagagtgattccgaatatttatgagtctcccagtgagagtttaaaccttcaactccaaaagctgggttttctgcgggaggaaagagttaaaacccctcagggctgctggggagaaaggaaaaaaaaaaattaaaccagttaagtcgtcagcatttccaggcagctgtagaacttctgggctcttcaaagtggaaggtgggatggaactggggggttgggggggggggactgaaaactggggccagagtctgctaaagagttcccaaagaatcctacagcagactgggttgctgggtccgctggaggcttggaggaggagttagttgaacaactctggcccctcaaatccatctttctccagtctggaggtgagaagaagagactggagtgcagctcaatttgcctctcgttgcctaggcagcgcagaggaccagcgtctgtccctgtccctggaacgcgggagccaccataccagccagtgccagggttctccactgggtctggtagcttgatttctcccccgcccccaggctctctgggcctctctggcttactgtaccaggtgcaggcaggtagggaactctggatctcaagccagagaaagtcaggagcaactgggccaaggttgagtcatgtcaaggtcaatggaggtcaggtgtccaaacccaggcaatcctggccttgatctgctggctctctggagtccagtaaagaaaggagatggcagagccatgtgacctctgaataaaccctgggtccctgcagagagctgtggcgggcagcggcccctgagtcgtgcatttgctttcagggtcaaggaatacacttcatgtactctcagtaactttccgtcaagtctaactctgcttgggctttcactctccgtgactccctctctgctgcattcatgtccagtggaatgcttgacacaccattagacctggagcgtctacacttggctcccacgttggcctgatgcaccacttatcagagatgccctaggtacctctgctgactcagacagctgggactctgataccaccaatctcctttctcatgtgacactagaactgcgggaccctcacagtcactacctcccagggaagccctggatccaaacagtgtatacacttttttttctctcagtccagtgtgctggcttctgcacatcttggaggctaacccaaggagcaggttgcacaccttcctaaagggctgctatccctgatgcattgttaaatcctgagtcagaggcactgtcagctaacagccaggacagtcagcagctgtccctccagtggacaaccccctgggagcagagctcaaggtatcctagggaggcctttggacctcaaaagaacttggagttctaaatcaccatgagaaagcagagaggacagcggggcagccttgctcagtcagggataggtctgactctccagaaattgattttttctccggcctctgggctctagttcatactccctggagaagtttggttcttgggtctcaaggccttcctgcatcttgtcctgttcctcacactctcagagaccagtttctgttgttacatgcagaaaggctgatatgtcagggtaaagccagcattcctgtgaccacagggccacaggtgactgtcagatccccatttctcctgctagaactgcttaactgatcaattctagcaccaagtgggtaccactctagtctcaggcagggttatcctgttgtatgatactccaatcctcagagccctgtgtgtgccagggctgtgtgtgcccagcccctggtacagtgccgggcatacaataagtgtccaatgaatgtatccaaatgaatttcagattcccttctctcaaggggcctgtcctattgcctaaccgcaggaggagggacctgaagctttatccatctatattatccatccagatcagtgcttctcagcctccttaacactgcgaccctttaatgaagttcctcgtgttgggatgacttccgcccaaaccttaagatcatttttgttacaactttatgactgtaactttgctactgttatgaattgtgatataaatattttttggagacagatgtttgccagaggagttgtgacgagcacataggttgagaaccacggtctgactccagccgtctcccctccctgaccctcccacttcagaaagagagagacacacacacagagacagagacagagacagagacagagacagagagagaaccagcttagtcaccttaagaagctttatccaacttgatgtcagattaattgctgagcaggtgcctctccttcaccagtttctctcctcctttctcaggctgtctcctctctcctttctcagtgcccttccacccacccccaccccagcttcctctgactgttcagactctgtcaggccccgtctctggtcccaggggtgcacataagagggagcccttctctctgaggccttgcagagggtctgcttccttaagcacagacaagacctttgaaaggtggtgggtcatgtgctggattcctcccagaacagcatctctgtcgggaagaagcagtgcagaacctcgggctgctgagggttaaatgtcagcaatgaaaagtctggacatcccttggggaccggtggctggctgagacaattgattagcttgtcgtagtgatctttctagcaatattcaggagcaaaattcttgctgattaggctctgtgtgtggacgtgtgagtattttagggtttctgatgatgaagggggcaggatcagacagcagaaagagcaagtatgggtgcattggttgtgtgccagtctcaggcagggccctaatgccccttgtatatgccaggtcaggtctcaacagcatgcttttgtgtgtgcacaattcagttgagggaggcaggaggaagggatgcaagacagtttgttttttgttttttttttttttagtcttctctttgtgactccctgggaaattatagttactttgaagttcaaaggacaccaaagggctgaaatgatgtgggatgtgggggtggggagaggaggtgttagcatagtgacagcatttatagttctggaactacagaaatggagagaggcagacccctggtgctcgtggggaagctagcttaccctaatagtgaatcccaggccaataagagactgtcttaagaaacaaggtgaatgacactcctgataaacatgaacacacacactaatacccatgcacactcaataacatgcacacacactctctctctcatgcacacatggtcacatgcacacacatactcacatgcgcacacacacttatatgcacacacatactcacaggcatacacacactcacatgcacacactctcatatgcatacacactctcacaggcacacacacacactctcacatgcacacatgcatgcttacagcatcgttgaacacttaacgtcagctagagagagagcctccaggttgagggagtactcttccatttgatttgcagaccctggtggtccaaggatagcctgctgccgtgggaggagatagatgtcaaggggttagtccgtgggaacataggtgctctgcctgtccagaatgtggctcccttggtcaggacagggggtctggcaggaggactcttagactctagcttaagtggttacatgttgagaaacaatgattctaatgaacccgtgcctgtagagtaagttaccagtctcggttgggcagctagctctctcatccaaagtcttggaccaagatgaggtcttgcttgagttttgtgagtttgctctaatttccttggcttcctccctcttcagtctcatactctgctaccattaagcacactagagaactactagaaaaactgggtagagccacctgtccaaacacacagatacaaaggttttaatgtttgtcttcactttgcagagactacaattctgtagcttgtgggcctcatagctcccgtcccttcctcccgctcaatggcgcctgtgctttctcacacttggagaagcccccacagcagcttcccatctaccagcctttcctgggcatcagctgaaggaagggagggagggagggacacagtggggattccggaaagaagttagctcctggggacttctgcaaggcttagcttctccatagcaggctttctttgcctgccaattggggctggtctctgctctgtgtctcctaagactattgagaagctgaaataagaatcagagaagaaacagcccctgagaagtggaagcacttaacagttttggactagcccatctccccgcatggtgtgtgtcatcctctgagatgacatctgggttgaaatcaggcttcagagtcacccatggttgtcatggttaggttttattgtcaacttggcacaaactaaagtcacctgggaagagagaacttcttcctaacaattgcctagaacaattgtcctgggaccctgtgtccaggagagattgtcttgactgagggttgatggtgttcccatcccttggcaggtgggctgggaccgtgtgaaagaaaaatgtctgagaaagccagtggtccagtaagtagggctcctccgtgttttctatcagaagttcctcccctgactcaatgatgctttgtgatctggaagtgtgaacaagggtcatactcatctcccatctgttgtaatgatggacaaaagagctgctgtcctatcttaaccccgactctcaacatctacaaatggaggtggtgagagcccctccttaatagagtgctgaggaccacagcagccacgtaaaggtcccctgggcagtgctcacagggtagtaagtgctcagactcattgtggtggaggagacgacatggtggcggctgaggctttgtagatgcctacaatccttccagaatcttcctggtcagtttacaaagatcagggaaggtgttactgctgagatagtttcacgacacacccggtcctgcactgcacgtggcagtgtgcacggtgcgatgcgcgtggcagtgtgtgtttaagctggctgcatgtgctgacacctacctcttttttataataacttttgttattttttgaaattataatatacttacatcatttcacctttccctttcttccctcagacccttcccatgtatttgctctctttcaaattcatgtcctctttttctttaattgttatgatatatatataatcatatatatgattatacatatgttttgaatgacttaaagatggaaatatgcttagggtcttggactgatcgctaactagattaccaaagcatagctgtagatatttctgtgaggacctttccagagaccatgggggctttggcctaatcaatggcttaatccattgatcgaattaaaatctgaatagactcttgggaggctgggccactagaaatgtgcctttaaagattaccttagccctggccgctttctgtgacttcctggcacaaccctaagcagatgtcctggctcccatgtggggaactgctctatgcccctgccccggacacttctgctgtgagattctgcctcttcgtggttcagaaaagcagtgcccgccaaccgtggactgacacctccatgcccatgagccaatgcaaacccttccttccccaagtcttcatgttgcgccagggattttgtcccagtgactacaagtctgactaacatggtgactgtattacctacctggggattgtctgctctgacaaaccctttcaccttgtgtgcaaggctgctcttccataggccagcgtataggactgctcggatgtagacgtaaaggcagaagatgatttgcataagttgccttgtgtgtctgtgagtctaagtccccacagtgcagttcctgtgtaaggccaattcttctccgctgtaaagagtaactaaagggggattgcttgcttcccacatgtttgatgggacgtcttctgggagtactcaacaaggaaagaaaaatgggaacagggaagggcaatttctagtgcctaagtgtgtgggggtgcacgatgtgtgtattccacagaatggcagaactgccatcctgctcttaagggaaaattccgaagccaggcttgtgaccagactgcgtgtttgtgtgcacgtgtgcacgttcggggtattgtggtcagccatccatgactcttcttctccatctcaggctgagagcaatctagaaggaacgtgtaattactatttactctggggcactcaattgagaacactctcatgtaatgactcttgctaattccacgttcagccgcccatctgctgcagttccttggcaagcagggagtgaacactgctcttagcccagaggaagggatccggagatggaaactaggccctgtgagatgctgctcttgggccacagatagacggagatggcatctttcttggcagactctgaactcagacctcaggcatgggggtttcaaagcaaggccagctatgactaatgggctctgctgggcagtcagtcacattgatcagagaatcatagtttaaaaaaaaaacaaaaatcttagagtcaggcagatgccacttatataaagttataaaatgtgtaaacgaggttgttcgtcacatagagatgagagaaaagatgagagtggggtgagaaatgccaccctcaggagggtgggggaccatctgcgggcactctgtatactcatccgtggtatccagtaactttggtgtttcctgtcacctcctttgctctcttgacttaattttgggagattttttccaatcatttaagatagggaatggggagagcgagtgagcgagagagagagagagaaagagagagagagagagagagagagagagagagagagagagagagagagagagagaacaagtgaatgcattataattaaacccatggaatctgtttgctaaaaatatcagaaatattaccttgaaatatgacaccctagtgctgtagcccggcactgttgtggaggcgaccaaactgtgtacggaaataaaacagagttttttagatcagcacattgagcaatcgcttacattagcttccagaggctacctaccgcctgttggctttctacaagctgtctccctttgcctctgtgtctctgtagaaaggataagaggggatggacgagccccaaggacttctcagcatcctgctctgagtgtctctgtctgggtcccaggcagggaacttcttgtttcacagctacctctagggtgaaggactctgttgtaggaatagggggtctacttcccagtagtatctggatgtgacaggcacccaacacactttgcatgtactgacaaagccattgtatagcacaggtgtgtgattctagccctcgggaggctgaggaaggactttgtgagtttgatgctagcctggagcatggagtgaggccttgtttggaagaagggaaaaaaaactgtctgtgaaataagtgatgccagctccccgatcctacttcacccagcaggaccacaagtgttacaggcctggctgcctgagctcagcacctctggtttcttctctctattcctctgtgggccaggaatcaagggccttgctctcatggtttgaacaggagcatctttcagtaataatataaattgagctgtgtggggaaagcccacaccctggttggtgagatggctcagtaggtaaaggctcttgccatgaaagcctggcaaactggattcaatccccaggacccacgtgaaaaagtggaaagagatccaactctatctacaagttgtcctctgacttccacatgtatgctgtggcgcgtgtgcccgcccccggtggtgcacaaacagtcacacacacagcaatagtaataataatagttaataataataataataataacaataataataataaattaagtaagtggagctgccctgtttaggaaggctagtccacagggctgtcctcttgtctctttctgtcccctctctatcttactctattaatttaaaaagtattacatttggagacacgctaaataaagagtcctcagagcagagtgcgtgtgcctcatccattttctctgtccccgtgtgcccctttataaagattatctctcagttcttactaaatggccttgatttttatcattaatcgctgagtgataattcctttttccgtgtctaacttatttctaaaatattctcccctgggtcctgcagtctacttttaatggtctctgtaccctctttcccctgtttctgccattttagaagtcgcttcaagagattccttcacacattggacccttgatctccagcctttccctcttcctccactgtatttcccagaagagcagtccttgtggtttgatttctgccgttcaggtggccctgggtctctgtcttttccacacaggacctggggatgtgctttgctctccagcccccaaagcttcatcttttcttgaacctgaagttttctcactggggtgaaccacatcataaatttaaagcttgaaaaatgtctattttttccttctactttatattgggaagcctttagctcccccacccccattctctcctcacgtcagctgcgggtgctgttacttgagacctaaccatgacatctcctgaagatatttctccactgtccatggtttagtgtctcctgctgtcttggcttccccatgcattcttttcttcggtgactcttctgagtgtgggaaagggacagacatttctaaggagctcttatgtgatggagaccttcctctatttgtcctactcatctttgtaaggactggaaggtgtaggtgtcatgatccttcccattgtacagaaggggaaactggggcactgaggttagggaccttgcttaaggccaatcaggtagttacaccatctaatgttaccttgcagattcctgtaagattcagtacaacaggcaggcagtagaaaatgtgtgtgtggtgtggtgtggtgtggtgtggtgtgtgtgtgtgtgtgtgtgtgtgtgtgtgtagtatgtgtatgtatattgtgtggtgtgtgtgtgtggtttgtgtgttgttgtgatgtgtgtgtggtatggtgcatgtatgtggtcttgtatctgtgtatgtggtttgtgtattataatgtatgtgtgtatgtgttctgtggtgtgtgtgtgttggtgtgatgtgtgtatgtggtgttgtatctgtgtgtgtggtttgtgtgttgtggtgtatgtgttctatgttgtgtgtatatggtatgtttgtgtttatgtgtgtgtgtgtggtgtgtttgtgtgtgtgtgctcatatcagttcattttcttgttacttgaccaaatactgacaagaagcagctcaagggaagaaaggtttatttcagtttgctgtttgaaagtatccagtcatcgtgatggaaaaggacttcagcaggaacgtgaagcagcgggtcacaggtcatgggtcatgggtcacaggtcacgggtcacacacacgtcatgggtcacattacattcccagcctggagccagtgggagatgagtgcggttactcagagtactttgttgcttttactccctgtttctttagatgggatcccagcctacggggctgtgttgcccatgttcagggagagtcttccatcttcagttggagcacctcacagacaggcccatcagtgtcccccaggtgactccaacccagccaagtagacaatgaagattaaagcacgcagttgctctgaggactgttgaggccccgttcatgccaggcaagctttctatcagttgcactcccagccttttttacttttattacttaaaatatgtgttatatgtgttcactgattttgtgttgatgagtgcatgcaaaggtgcacatgtggaggccagcaggcaacttatactagtgagttgtctctctgagtctcggggatcaaatgcaagcaactcagcttagcagcaagcccctctacccatgcagccatcttgccagcccactttcattttattttaagataagatcttgctaagtagctcaggctagccttgaattcattctgtagcccaggtaagccttggacttttggtccttctgcctcagtctaccattttgtactattgacatagacacagaacttggcctaacagtttcatattttcatttattttatttgaaatgtgccctgtgtttcccttcatataccatgagagtcagcctgaagctctgttacttattcacggtattacgtcacagtgtaacattaagaaagtccccttcctcccccatagctcttgtttgtccctctcacagactcacttttccacatatcatgtgtgtttgtgtatacatgtatgtgtgcatgtgtgtgcacatttttttgagacagtctctcactggcccatagatctccaaataagctagactggttgaccagcaagcactgcctgtctctgtccccctcagtcatgcacaggcaacactctcccctttatgtttcctgtttgttttccacaccacactcttttaatgtttgatctttccagaaacatgaacctggtgggccatcacctttcctatacgaatatcagcacacttctctatgagaccttcctctcttgggggctatcccttccttctctaggtactgtctctttttctctctatgtgggctgactccactttagcccactaccaggctttcttatggaggagggagggagagaaggaggaagggagagaaggagggagggagagaaggagggagggagggtctcttgccaaggccacagcacctgcatctggactccttgcccactctcctgtgaccctgatctcctttttatccacccaccttggctctcaagatgctaatcacattcccaaggcgagtcagactatcttcctacattggaaggcgtccaacatgtgctcaccatttgggacaaagcgtttatcctctgtgtctgtgaccttccacagacaagagtccactgggctcctgctgttctgccttcctcttctctctagagctgctgagagaagacctccctcccagactgcggggcaggggtgtgggctgaggagggcagctggcatagacacagaggccatccgcagggtttggcacctcccccttctccctaagctgaagtgtcacattgggaacctcagggacactgatggggacatggggacactggaccgttctgtgggggccgctttccctgcttctctgctgtttgtatcattcccggttctggcttactgttttgtagggaagttgctaagatgctccagcagaggtatagagcacggataacagtactcgtgttgtctctgaaacctcccaaatgccaagctgcagcgcaacaggttatcagagtaagctacaggctttgacagctttcccacagctggcctggccttgggctctggttctctagcctggagcacactggggaatccagaagaaccttcctagattctggacccattgcgagacctaagggctctcctcagactgacacagtccttgcttacctggcttcttttcacctgctggggttgtgtaaggatctctgtcagatgggtttaagcaaataaatataccttggtgggttccactcttgctgctatttgagggaagctcttaaggagctggggagataaatgccttaggtcaggttccccagagcaaggatggaggggtgtatgtgtgtgtggggtgtatgtgtgtgtctgacctcaggaggaacttgggaagggtagagtcagccaccaagcaaactcatgggtttagctatgatttgtctgtcctcatggacctctctatggaacttcccatcttgaggcagagagactggctagttctactcccaaatcagttggcaatcagatgacagttgtcctagctgacagaagaacctatgagactcatctggactgactgggcacttctgatcagggaaaattgtcagagatggccgttttaaatggaaaggaagcactgtggggcataggaactgaatggagctgagtgaagccgagtggagctgagtggagctgagtggagccgagtggaacctagtagagctccgaccggttatctacatttaggcagaggatgagaagtgacctatcgtggcttctttcctttcacattcacttatacccttctagaatctgaatttctgtcactctccaggttggtccaatttagagtcaacataggtgagggaaccactcacctcctcgtgtttccatttcatgaagagctggaccatctatggcctcaagcctggcttctgaagatgtgttgggcaaaagtgtgaggagtaaggtcgggtttgctttatctacccggagctgtctcacgcagcaaagtggcgaatgtgtgtgtatggagagcaagcacagaggcagaggacctcaaaatgcaaagaatgatgttgggtggaattcctggtgtgtgactgacatcttctccaacagttccttgacatgggtggcatctctcatgtactaccaaggaaacagaggttccccaatctttccaacagagaggatgccggtcctaggaaacatcaaagacaatttcaaattcagttactgaactgtgtggctgtggctaccctgttcttggggtactgtggagcagggatgggggcaggtccatgacaacatgctggctcagtgactcaaagtggcccaagctatctcatcccctgccctaccccaaccaaagccctctatttcatgaaggaacctcatcttacccctctctggaggagatgtaaagcccaaaaagcaaagtatattcagttcatgtacctagtaccccacatgtacccatgtacctgtggctcacagtggctcaagtccaccccccaggggctggctggaacatgtgttcattctgtgttccccggccaaatgtctgctcaacagccccttgtttacctactcaacgccactcacaagcgtctctgatacctgccttattatcccactgcctgagtccatgctggtggagcccatggcccacaggaacctggtggccaccaccaacataatagatggaaaaagtccagacttgggcagatctgggttttctctctggcttattaattttatggccactggagagctcaccctatccgtgtccccgctctcagggcactggctttctcatctgctcatagagtcattaaaaaaaacagtcctgtgggagttttaaggaagatgggagatgaagcacgatgaagctctagctctgggttggctcagagctccgctttccctgtggcttcatggctcaagctcgtgcgtggactgtgaatgctctgaatgcccatgtagaagagagatgaatacttagcctctgcttcctaggtctctaccagactttccatttcccacaggatgatctggaaactcatccggagatgtctacgctcacacaggcgaagcaggggtgaggggtggacaagaactcagaaagcaagccttgaaagactaaatggatatgggcagggagtttctagctgtctccatggaaccatgtgtagctgtagtgataccagcagctgtgggcagtaatggtggtgatgaggaagagggagaaggcattccttgccctgagcacacactgcggagcaagctctgtttctggttctattcctgacccttcccatgttccgcaactcaagaaagtaggtgctggaaccaccccctcctgtgtgtgcgacagatgagaaaaacaaggcccagtagagttttatgacccagaggctcctgaattgcaaccctggaatcccagccaaggctgtactcaaatcctatgcttgtggctactttctggcatagtgaatcaaaccctgacaacaccatggaatcagaacactggagctgcagaggagggcctctaaacaggcaaagaacatcttcccattttgtaggtgggaaaatcgaggccagggtcagaacagtctcagtctagcagtgctccagtcaagaaaggaatctgaggaactttgtctctccctggggtgagctgcagtttgctgggtgttgagtatttatttcagctgtcacttcatggaggcaggagtgtgtgtgtcattgtgtgttttagtctactttagcacagggaggtagaggattgaaaggaggcaactagataaagctgtctgaggagtctgcataagctgaaaaacctgccttcaatccccagaacccctgtaaaggtggagagagaaccaaatccacagagctgtcctctgacccctatacatgtgccatggcacaagagccccattctaaacacacatctcatacacacacacacagagtaatgaaagggtatggagaactattgaatgacgtcaatctcaggtttaagtgccctttgagttcatgtccttgtcaccacccctgggaaagcaagatacctctgtgcgcctgtttcccacctcatccctccacagtgagctggcaggctctgtgcatctccccactgatgctggtgatcccaattggaaagagctaagactgtggatgacatatcccagccccagctgacctatgcaaacacgggcagaattacagccacccataaacaaattagcatcctttaaaaggtgaaaagcaccataaaatgtctgggttttgtttacggctgtggccaggagctggattaaatcaccgaggtgtctgcaaggagcagcagactcccttctcatcctcttagcttcccccagcaccctgtaggggcacatggccaggcacaccgcttgcacgtacacactcatacacactcgtgcacattcggggccagcttgcaatggccgctcagtccatcctggtcctgcctccgttcctgccagcctgggtcccagcaggtgttccctaattagcaatctcttcatttccaatcaaagcacaaagcggccccaaaagcccgtctttatgagggagccgagcagcggctagggatgcgaggagggggggataattgtcttcgccagtggcggcagtaagcgggctggctaattcattattgtaataactttgcttgtccttggggaggagtgagtgggggaggagagcaggagaagggggaagggatgagagggcctgaaggtggggtggatggaggtctggggcaaagggtaggagatggaagaccatatgaatggtgcccactcctatcctccttgatgacctctcagactctggcccatgtgcagggcgtgtcctctgcttcagctgtagagctgtctaggctgtgttccgttccgcaggggcaaggaccaattgctgccctctgaagcagccaccttgcagtagcgagaagtccaggctttgcactcttgggactctctttactgagggagacccagtgggtacttggggctggcttctcaggctgtggatggttgtggaagaagtcttagggttgagacttagagctctggatgctagttttccaaagactcaggtcccacaaactagaactagcccctgcttcttgcctcgtggacagagctatcactaatgtctacactgcggctggctggctgactttagaattcggctaacaactctttccctcccacccaaatcaggaattcccaaggtagtgcagagtgttattaaaaggggacatggtagtggtggcctgagctattggtctgtcctattatacttgtatactagtgtttgtctcgcagagagcaaggcctcctatatataagaggtgggggagcccgctggctggggaagaacaagcgactaagcccaggcagggaagacagctgtgtgggctgagtggtcaggtggccttgtgagggctttgggtgaggtgcaagggtgaggtgtagaggaagggtagaagcgtggcatggaagatcagtatgtgccaagggctggggtgacctggtgacaaggacagaggagtagctgagggccaccggggaagctgggactgcaggttaagactgcctcaaagcctgaaagtcaggctgaggttgtctctatctcttcttcccacaaaactagcaagagcaggccccctgctagtctgctacccttggtccctggagaaaagacatcagttctctgtttggggtcagggcgaggtgtcaatcagccaaggcttgctaggactaactgtgcctaatagactgccgaagcagaaggctggccatcacagcccctgcacggctgcttatcttccttgggcttctgaacactcagtcccctggccttgttgtgtggggaccagttggtgcttccgactggggtcaggcgattcagaggtggaaagacctgggatcagaacttggctcttttatgatcatactgctttgtgcctcagtttcctcatctgtcacatgcactcagtaagagtggctgcctccatgagctcacacttgtgacacgcatagcacaggctggttcagagtgaacctctgaacagaggtacactagctcctcggttcatggtgtgagtgtagctcagtggtagggcagttgcttagagcgcacagggtcctgggcacaggctcagcactgcaacaaggaatagatgtggggaggaagatgtggagtagagaggggagggagagtcagaccctctcctcttctctttacctgtgttccccgcacttggaaagtggaatggggaagttaaacaccccactcctctctctcactcatgtggtgtgatatatgtgtgcatgtgtgtgtgatgtgtgtgtgtgtgtgtgtgtgtacatgtacagagagggtcttcctcagttatggtccatcttactttttgagacaggatctctcagtgaccctggagctctctgattggttagactggctggccaagaatttcctatccctttttttgagcacacatacacacgtatacgcatacacatgtacacacacacacacacacacacacacgcacacacactagcatacccccagatgcatgcacatacacccacatacacatgggcacacacacatatacacacacatacacacttgtgtatacatacatggccacacacccagcactgaggctgcagacagactaatgagcacagcttttctgtgtgtgggtgctgggcatctgaacccgggtcctcatgctcccgtgataagcactttacagactgagcctctccgtggtctgtgttgctgttgtctatgtttgtttcgtgagacagggtcccttgtaatcccaagctggtctcacgtttactgtgcagcaatgggtgaacttctgattcccctgcctccacattctgagtgctgcatggtagttttataggcctacaacactagaggggtacttgaatcctttcctggttgaagaacaggtgctggggtgagcagcaagcagcctgtcacacacactggcttaccttggagaatcagtcttgaaatgcatctttctccccagcagggaagcccagctgtgcctctccttggcccactctcttcctatttggtctgtgagagaagccttgcagcagaccctggaccctaggcacgagcctgcctctactctccgcttggtctggttcatatggccatttggtaggatgggggcccaactctttcagtggtcaccttcttgggacattgtagccttgatgagtggctgtcatactagtttaagagagagaaaattcaagctgggcgtggggtgacacacttctttaatctcagctgttaagaggtagagttaagtggatctctaagtttgaggccagcctggtctacagtgcaagttttgaggacagccagggctacacagagagaaatcctgtctcagctcccctccctcccagccctgctcctgctcacagatcagactgcagaagcctatggaaaaggcttctctgaggagtagcatttcagtttccagatcaggctaggtgagaccaaacacagtaccagccgccagcgggcagtgcgcactgctctcaatctctagcagctacgcctcttaatgatgaattgtctttaacctgacagatgaaatggagatcatttccaatctagccaataagaagaaaggcttctactgaatcactctgccttctttttgttgacctgagtgctctgtagttcacttctccccctcctcctcccccacccctccccctcccctctccctcccctccccctcccctccccctcccctccccctcccctcccccaccccatgacaacatcaacaacatcctaagtggccagtagccacaggtgcgagtccagagatgaagggacacaaactctggagtcactttatagctgtgtgttgttggccaaggtgtggaagttctcagtgcctctcccctttcctatctgtgcaaatggagttggaatagaacacacacacacacacacacatagggctttgaattacctaagttcatacacataaggcagctcaaaaggcaactggcaaaaagagagcaatgcctaagtaataagaagcaaagatagatagatagatagatagatagatagatagatagatggatggatggatggatggatggatggatggatggatagatagatagatagatagatagatagatagatagatagatagatagatagatagatagatagataaatggaaatatcattgctatcaccttgaggaaaaaaagctgtcaaggcaggaaacagcagaagagaaggtcggaggggcagggtcggcatcaggagggcagagagaccaggctgagcacatctagccccccaagagcttggcttccctttcagccctgaacagagcccaagatagagaaaagttcagagagcttttgcctgacacctgttcctgtccccaaagatggtgcaggagccctgggggaggggctggtgcacactccgtctcccccacttgccaggacttgaaactgttgcatgcctgcctctcagctgcatgggaagcgccgggcaccagctgcagggggaatattaatgattcaattttcaaccgggttccactccagggcctcgcctgcgacatgcatttttaatcataacaaaacagaatgacaaagggagacatttgcagcaaggcagcccctgctggctgccccccccccctgaagggtctgcttgtgagaggggtagctggttcttcagcaccagggctgtgggatgcagcctctgcctctgtctctctgcttctctttctttttgcttctctgtctgtctccccatctctctgcctctttgtctctgcctctgtctgtctctctgcctctctgcttcctgtctctctgcctctctgtctccccatctctctgtttctttccccatctctctgcctctttgcttctgcctctctgtctctctgcctctctggttcctaactctctatctctctgcctctttgcctctatatatctgtttctgcttatctctgcctctgcccctctatctctctctgtctctctctttgcttctctgtctctctgtctctctgcctctctgtctcccaacctctctgtctctttcctcatctctctgcctctgtgtctctgtctctctgcctccgtctctgctggagtaagacttttttctggagctgtacctcctttctgggttggggaaaagaaaaacctgggtaccatcaggtgagaatgttggtctctggaggtgcagagctccaaccagaccctcagtattcctggttaccagcaggcctgaaagccagaaatgaagaggatgtgagcatggagtttgtaacagacctctctcggcatcctatgaagccagagttcatcttccttcctcctgggtctgaatatggcagggtcttctgtatggcctgcctggagctcccggattccctaactgtgggccctggtccatcctttttagcaaactgaatttgcacagaatcagtccagagtgttcttcttcaccttcctttttgttttatttatttgcttgttcgttgagtgtcactctacatagccctggctatggaactcactatggtaagtagaccagactaaccttgaactcgaagagatcctcctgcctctgcctgctgagtactgggattgaagaggtatgccaccaggcctggctgtctttagcttttcctgattcccttgagaatccagcttgaatacctaccaccctgattctgcactgttcccttgccaggctgctgccttgggccattagactgttcagattagggcctctgaacatgcagtatactttaggcagggtctgggaagagctggaggaggtggccataggaagggctgattgttattaatgtgtatactacttactcatctgacatttgtgaatgacttactatgtgccaagcattggggattgtgggtgcaatggcaaagaggatggacaggctggatctctgccttcccagagctttcttttaggcagagaaggttaaacaccactgccccttgctccttcccatggcttcctgtgcctcgtgcagagagaatgttcaggaaatgttcattggctgtgggttctcagttgactgttctctggctcacacacacacacacacacacacacacacacacacacacaccctggcttgtatttgtgagactgactctgacattaggcctttagctgctttgtcctggttcgtcatagcttggtaacggcagtggacagcatttacggtgctcatcgtatggtgggccaagcacttaactttggccagtccctggcatttgtttttattgctcaacccatttttatcaaagagaaaagggaaacaggagacgttaagtcacttatttcaaggttgcacagcaaatcatgggctgggcatgggatataaacccagggagtctagccctatgatgtctgctctgtggctctgtgtcatttggtaaccacctcttaatcacatggaagagcaagtcagaaagagctttccaaccccatcttcacagtcttatgagtcagcagaaggaaggcctggcctgaaggcttgtggccgcctcacctctaggtagcacccaagcaccgttctctagggctcagcagaacctggatagcatgtgactggtcttaggtggtcacacaaaggggcctgtgaccttgactctgcaccttgttccaggactctagcctgttgttccctaacacctctcttcacctggcacttacccctcccctctatgtcatacaacccccaccccaccctgggaagtgaggagtggcagaagctggaggggtggtgcagtagatgaaaaggtgagttggctccagggctcctggaggcctccactccctcactcagttcacagatgaactgggtgtggaggacctcacaatgagcagacctccatccccaccaccatgtgtcttctattaacccagcgagcaccagggggctgagagtacttagtgtaggtaagtacagtagataggaggtgaagctggagggtcagggagtcactcactctgctacactgctcctgaaggaggggagagagtcaccaaatctgagcagctcgagaatgggaaagacacaaaagatgcaaaggccctgagttggaagtgagctcagtatgtgcaggaacagcaaggaagcacacagtgggaatacagtgggcattgagggagtgtggacagacaggtatgggagtgaccccattaataaaggcgtctgtgaaaagcagaaatcactagtagtagactgaccctgtgggggctgaggcgttgtgcttccataatgagaggaagctagagtggagatctaactgtacaatggggccctctccagccagagcagacttctctcttagttaggatttccattgatgtgaagagatgccatgaccatggcaactcttataaaggaaatcatttaattagggctggcttacagtctcagaggtctagtccattatcatcatggagggaagcatggcagcacacaggcagatatggtgcgacagaaggaactgagagttctacctcgtgatccacaggcagccaggaagagactggattccacagtgggcggggcttaagcattaggacacgcacacgcacctgccacagttacatactttttttccaacaaagccacatctaatctaacaaggccacacctcctaatagtgccactcccatgggccaagcatttgaacacatgagtctctgggggccacacctattcaaaccaccaccacatctaactgcagaagccctctgcagttgccctgctcagcttaggacccatcagtgatatagacaaggtattagggacagtcaaccgtaggtgtttctggtgtcgcacccctacttcctgagcaaaggggtccaattgctcctgtgacctctctttcctttgtagtaatacaggcagaagctgtagaactttctagagattgggttataggggccaacaaggagtactggaaggaataaggtattagattattactgaaactgtcattggaatgccttacaggtgacaggattctctcttcttcctgacttccctccccccttccttccttccttccttccttccttccttccttccttccttccttccccacttccttctttcctctttcagtattttacatgacctcactatataaccagggttagccttgaacctgtgatcctcgtccctcagcttccatgttgagtgctggatttacaggtgtgtgtcaccacatccacacaaatgtcctttggctccagtaaacagctaccctggacggaggcataccagtcatcggactttcctaggactgtagaagagtcgttctgacgggagttgtcagggacggcatgctaaataaatgctgtctcatttggtcctagttcctgtgtggtggggagctcctgctgcgcttggaatcttgtggcaacagaagccatacagctaaggccattttgcctggagggtccacagcctcagctttctgttgtctcctcctgccttcctaccaccgcctctctctctgatttaagggcaggttttattcccaagctgcctcagggctcctctttctgattgcattaaagtctccgtaattctcccctcattaatgattggcatatttttacctctcacgaaaggagcttcaaggcaactcccagggggccctgctctcagaatgaaacaatttcatcttgctccagaaacgcattaaaaagggtttgtcaggatcttatcaccagttagagaaagctaatcaaattacttctatttattagttggtacagcaatgtgccattccagcaagcccctggctccagcagggtgggcatgcacccggtaccctggcaccctggctccttggttcctgaagggatagtactaaagggaccacctactgcttctgctcgcactaagatgggtgatcggaagagctaggatgagctctaccagctactcagcaaaggcgaccccttgaactcacctgtgtgtgtttccctcagccacagggcaaatctcgagcaaggctgtctgtccttcacagaactaaataggaacatcagagttataaggcacagcccaggagttggggtgtgcgccaccttgactgggtaccctttgcatcctgtttcagctgcttagggaagcatggctcatggtgttctaacaagcagccggtgtagtcacacatctgttcttcccagcactctgaaattttgcaatccactactcagagtggcctataaagaggcaagactcacttgaggcccccatcccctgagcagactccagctggagcaacagtgaacacccctacacacacacacacacaaacacacagggccagcctggagcaaggggccatctcagctgtactgcctctgtgactcccggagtggttcaaaagactgagcctcgttgccccatcacgtcgcacaaaaggacatattgattgttccgcagaagcatttcctggggtcctttatatctctctccctcgtcaggcgtaatgaggaggctgaggcacgggggtggagggtgggagggggaggccagcacacatccatccgggtgggatttcttcatcttatcaatcaggactttaattagacacgtccgagagggcagttccatctcggggcaggcggcaatctttatcaagcacgccacatctctaattactgtgtactgacagataacaattggggagcatgtgaaaggtgggggaggtgggaggcagagaaaggacggcggggctggggatggccatttgcccaaggagaatggccttcaaagacaacctggaccaagttattgtaaccccgatgtccagggacagggatgtggccccagataacacccttcagagtgacagcggggagtgtggagaatggccaggctggcatctgggcagatgtgaggatcatgtccccagcccttaatccgtgccctgatacacatagctttcttttcaatatatatagtctggagagggcacaggggtgtctctacacagctctggctggcctcaaacttactttgtagaccaggctgacctcaaattcacagagatcctcctgcctctgcctgatgagtgctggaactaaaggcatgcgctgccaccacctggctcttttcatcgtgttagaactctgtttttgtttggtttttcgaaacagggtttctctgtagccttggctgtcctggaactcactttgtagacgaggctggcctcgaactcagaaatctgcctgcctctgcctcccaagttgtgggattaaaagcgtgcaccaccactgcccaacttagaactctgttattactcagggtttttagtagtctagtagaaatatcaagaaagaccaggtccagggctatacagagaaaccctgtctcaaaacaaacaaacaaacaaacaaaaaacaatcaaacaaacaaaaacaaaaaaagaaagacctaggtttggatcctacgggttggatggattcttcggtccatactaaccagcttatgtgacctcagacaactgtgtaaactgggccccagctgccttccccaccaaatgaaatggttccatccaaggagttccttgactgtgtggaaatgatgtatgtggcgctggggaggttaagtcagtaaagtgcttccatacaagcacgagaacctgagtttgatgcccagaacccacacgagaagtcaggaactatgcatggcacacacttggaatcccagcgctgggaagtataaaccagcaaatccctggagcttgctggccggccagcctagcctaattagtgagtctcagatcccagtgagtgatcttgtctgaaaacacaagatggactgcagctgaagttgatccctggcctgtgtgtgtgtgtgtgtgtgtgtgtgtgtgtgtgtgtgtgtacatgtgtgcatacacacatacgaaatgacccatgtgcaagagcgtgtgtgtatctgcttagcctcccgttagttagagaatagtgcctttctgggatgactcttctctatagtgttgacctagaactaagactcacaggagcaagccgggtgtggtggcgtgcgcctttaatcctagcacttgggaggcagaggcaggcagatttctgagtttgaggccagcctggtctacagagtgagttccaggacagggctacacagagaagactcacaggagcatggatcaccggccaggcagcaggtacgcacactgtcttgggtcacggctccttagcgtgtattctctgtagtggtcttgagttaagatgcccattctcatggtgataaactgaggtcaacagctggttttccctgagcctcaggttccttaagagcacaatgagtgtatcatgtccccttgaggactggacggtggacacatgaagtactcagactcagtcctgcccctggttgctgccctgactggtggattatcaagacagactgcatggatcacactataatgggtgtcgtagctgctaagtgtaacatttctccttattctgctctccctacggagacagggcctcctatacatggggactcttacccaatcctagtgcccctcaaaaaaaagcagcctgaattgtccctactgcagcctcagtatttacacactcagcctgagggctgtgtcccgccatctgctcctccccatgctaccatgttccattcttcagagtgactcagttctcaaaatctattctccagcactctggaggtggaggcagaggaaccaggagttgaggctagcctgagctacattagcccctacctcaaaaaacagaaaccaaacataaattcactcccctctgtctagtctccagtaacagttgctccctgtagtttctgtcctctataaagaccacctggtcctgtctgacatccctagagtccttgtgcccaggccccgggtgccaatatactttttcctgggagttgacttgatagtcctcagtgctctggtctctagggtctcatgctagttggctctatgactctccatgggcagaagcaaaaatgagcttggtctcctcatgcgatagacagagaactcaagtctcacttagaatggttaaaacgatgcttgagccagtatttgaacccacttcagggtggtgttggggagggttaactagtgtggaatgtatcaccagactgagaagagggtaaagctgagagccgtggactgaggaacacccaggggtgtgcctacaggagagttctcataagctttgacagatttaaaagcctggatcttccggcaagtggatgcttgcattctatgatgaaaaggttgaaggggagaggacgaggctatgaggcaagagagcacatgacctggggaatgcccagggaagactgggctgaggagcccagacttggactgatggcgacccctaggtatagtttcagaatgccagccacactgggacaccacatggtattgatgaggacctgtcccacctctgagatgtctagtgtagatgaggacacgaagctgtcacacagattttattttgctggagacaatggagggctctgtcagtctcacagtgggcgaggcaggggtgaccctgggcttagagtcagtcagccttcctggaaagacccagacacccctctctatctctctctctgtcagatacagctttctggagagatgaggatgagagatggggaagcaagaatagcatgcaccttcatctgagggcagcatagatgtaacaaatcccgagatgacctgtgaacaatgcctagttgtgagtgagagtgtcccctcacccaggacatataaaacctttccttggctggatggtggtggcacatacctttaatcctgtcacccaggaagcagagacaggtggaactcttgggttcattcggggccagcctgatctacagagcaggttccaggacagtcaggactataaagagaaatcctgtcttaaaaaaccaaacacacacacacacacacacacacacacacacacacacacacacacactcccttcccttgaagctgatgtgggctcagctcctctgatccatatgaggcctcagacaagcggagtgagcactgtgcatgggatctagggagccagtggagcctggattctgtccatgtgagccttgctttctttgtctatagaatgggaactgtgccatgtcgcagagttgctggatgcatgtccatctctgagggtatttcctgatgcggatcttggtagaatctcagcaaacagcaactgccttggctattgattgatttatttattcatcaagaaaatgcctctgccagattctaggatcacagagcttggcagctccattcctgcactcagggcacagatgtcccagcagccaaggactgaggaagccaaggaggaggccgtgaggttattgcaaagtgagtggggccaggatgtctagattctaatccaacaaatgtaaccaactccctgaaaaatgtgatgttttaaaacaacaaaatccacttattaaaaatggaactaccaacagagttctgtgagcatcgatctcagtggcttgtcacagcgtctgcctgggtggcttggccagggctggctctgtactggctatggcacttgtcatggactggaagctaggcgaggagactcacccagaagcccccattctttcccactagggcctctctcagactgggcttccttacagcatggtggctgcttcagcatctggtgttgtcaacgacatgatttcttctggcctgatcttggagattgtgtgcagggccttctctgactcaactgactgagctggtctctaaggcaggctacgtccaaggggacaggaattatgctcagtgtctctataagtgcagcagtgcacttacaggcacgttcaacctcttgacattgcgacatgacattgtcatatacacttcagaactacataatcaaatactttttaaaaagagtcatgcaaaaaagtctcataacatttatgttttgctgttgttgttgctgctggtggtggtggtattttccactctatgtagtcctggaactcattctgcagaccaggcctgccttgaactcaagagacctgcctgcctctgcctctccttcctgagtcctggcattaagggcatgcacctccttgtccagcccatagtttatgattgtatgttaggctgcattcatagttattctcggccacacgtggtccggggggtataggtcggacctgcctatagtttggtcagcaagaaactaggcaagatcttgtaggtcacagtaaggagttctcatactttgatggttaatgtgaggtcactgatagtaattcatgcttggggttttctgaggttttaaacaggatccttcccatccccctacagtcctggctagcctgtaactcatagaaccagctggccttaaccgcaaggcaatcctcctacctctgcctcctgagtaggggggttgcagggacacccccccccccgctttattaatggctttaaattccatggaaatggaatgggtttggggatttgatggctgagatctaaatggtgcctatcggtatggttttcaccattttctacatctttgtgtgctcagttttcctatttgtaaaatagaattgataagagtacttacctcggagtatttccctccgtctgaggataaaactaatccaatttctgtgaaagacatagcatagtggtacccggcccatcttacatactcagagcttcactggggttgttaaaggtttgcatttatttagagagaaagagggtggtagtggcatggagcacatacggagatcagaggagagccttagctgtctgttcgctgcttccaccttgtttgagacagggttcctattgtttgctatatatgctgagctaactggcccaggaggttccagggagtcgtctgtgtactggggttacagatgtgtgctaccaggtctggctttacatgacttctagggattggaactcaggtcctcatacttgtatgcaagtgcctcacccacggtgccagccttaaaggtgtaaacccttgacatagccacttcatagaatggcttcaaaaggctcttagctgacagagccaaaccttgaactcaggccccactcactcagcctacattattttgcttcctatggctgtgtgcagctgtaacagtgtttgcgttacttttgccgtgacaatttaaaaaaaaattttttttttctgtaacaaaatacccaacaaagcagcttaaggaagggagggtttatttggctcacagtttgagggtagagtccatcgcggcagaaaagcatggccgcccaagtgtgaggcggctgctgacttgaagcactcaggaagcagagagcgctggacgctggcacttcctcttttccttcagtccgagacccgctggaacgaacgcttaaggtgggtctttttaaacctcagttagcccagcctagaagttctctcacaaaaacatgcctagaggtctgtctcctaggtcactagagatcccatcagttgacactcaacagtaacatgtcgcaagcagccacaactgggttgcttcaaacagaaggaatgtatttcatcccagcgccttccctggcttagagttaatccctcccatataagtctcccttctatgtgtcaccgtccagagcgtcctcttctggccatgtgtggtggtaggtgcccctaatcatagcaataacataggggactgccaggagtttgagacaggccttagctacattattccagagcagactggggctccgcgatacaccataagatcctgtctttaaaatgaggggtcattttttttcttttcttacaaggacgtggggccctctcaatctatcatggattcggtaacaacgtctagtgacactcatagtggacacgagtttggcagactactttttaactcaggataagatcaggtcttatcagagctaacaggaggggttgaagatccggcccctggggagatgggaaactctaccctaattccggaactgtctggtatggggcttctggctgtcctgagcaagagccattgacattcctaatcactgagtcacctagatttagcctctgctaaacgcagaaagccagccctgaaaatgaccaccccagggtgccttttcctgcctccctagggtggtacccttgttttaaaagaaaacaagatgcagagaatgagggttcaacaagtgtttttgtttacccggggctagcctctccatccccacctccacccccagcccctgcacgcacgtcccctgtgcttagagctggcaaaactgtccgaagcttggtagagctggagtgcctgtggcctagctctctctctggcaagcaggacctcggctctgcccacgcacttcctttggtggctgatctgggccccgtgtggccaggccgtagaggtgcccaccctggctaatcctaatggctggccctaaccagcccagctcaagccttgaggggttgaggaggatgcctgggatcaacggggatccgtaattggactgttgttctctcattttgctgcgacgcagcgtgtggattatagacaccacttgctatagatttcctgtcagagctcatgaatcaaacgccactgacttatttactgcggccagcatctgtgtgtgaataacccggtgccagcacacactcagaggcacacactcacaaggacactgcctaagaatccaggcctgagagctcttggattacctatgtggtggcccaatacactgagacgctctccccaccctggagtattgaaaccagcaaggggctggtcaccatgccacagcctcgcctcatggtgactgctccattctttgcccatcaaacttaaggtggcttctgtgaacttagggagaaggacagattctgactgcactaggccactgccactggaactgagcagtgggtattgattcatacttgggatacaaatcctggggaggccttactccccatgcatgcctgggctagcatctgggtcttcagtttccacatctgtaaaatgggatgattaacaatgttaacttgtggggcagagtggagaaagagaaagggtatgaaatgggacttcagatgggacctttgacactgtttgcaggcccaaactcataaagaaccaagttacggcttagaaggagtaggcgatttgcccaacactatatgcacctatagtacataatgaagcaagaactcaacgccagctctgcctggccttagagaccagagcactgagattacactttactgcaagtcatggaccctgagcaaaccattcctgcctagtccatgcaggagcttcaagagtggatttttatcatctttatgaaatgtaaacctgatttttctcattcagtgcttattagatatttgcctctttttttggctagtgtttcttttttaatttttaaattcattttaattgaagtagaattgcatcatcttcctccttccagcactcactctggtcctctcacgccccatcccaaattgataacctctttttatttgattatcattattgcatacccacacatacacacatatatgcacatatacatacacatacatatacacagatatagcctactgagtctgacttttggtgtctgcgtgtatatggtctcaagggtgatgttcctgagggaggatatcaacaaagagtctcatcccagagagaggctaattgccctctcccagaagtcattagttccctacagttctttgtgtgtgtgtgtggccgggggggggggggttgtcccatgaatttccctccttcagattagcatgtcttttgatattgccatggccctggtcaggtttttatagccctttctaggagagctactttctgctattctggctcatacaatctttccagatgttccctgagccatagatgctccgatgcacatgtgttcattgaaactgggatccctacaatccattgatctttagattgcggtttttggtaacagtctccattggatgtgaagagaaacttctttgatgaggatgatagccacacttctctgtgggtataaagataagatttagaaggtagtaagagaattatgctggtctagcaaagtggctatttggagtctcttatctcttatgtcatatgctttagacggagactcatgtgagtttgctgcagatgtagaccatacatgtctggcccactgtttctacatctttcaggaagtatttggatacatggtagacaggtgggtgggtggatagatggatgatggatggatagtgttcctatatatcaaaggataggattttaatgtaagcacctgtcatgtttcccaccatccctgtcttgttttgtctcctttactaacagttattcaaagtgtcacaaccggaaacaattgtcagtaaatatagatgccattgcctcaatattaacaaaggaagcatagctcgcgtttctctcaagctcggggtggacctagccacttgagtttgacaccgttggtccatgggctggccatagttagaggatggtaggacattgccaggtttgaagcccattttcatcacaaccataacacacatggttttactgtctcctcttatgtctttagattgtaagtcaagaaagagatcccactactctgggctatgctccctgccaatcatttgtaccatgactaagccaccctggctcgatccattctttatctttctttaatttttaaaaaaaaattatggatgtttggactgtatgtttatcttccctccttcgtgttagcatgtctcttagtgactcttgtccctgatggctatggaggccagaagcaggcattgggtcccctgagactagaatcacaaatcgatgtgagctgccatgtgggtacagcaaatggaacctgagtcctctggaagagctaccagtccctagacctccacttccagatccaccaaaagggcctgagagtccctgtatcatagggggctacataggagcctttaagtttgtcctcaaacccagggtggaagctcacaccttatttcttccatgtctggctggggacatagacggtcgccaataaatataggtgatggattgtggagctttgaggtgatgccaaagcttaagggattctgagcatagtgcagttgtttctgccagggcctgtaacaccccatggtgatgaataaataaatatattaaggccatttgcctaggaagtagacacattttcttccttcctctcaacgagagactcttgtcaaggactaggcagatttgaggttggtgggaagccactaacctccaggtttgtcccatgagtcatctccaaagagactctccgcccctcctggttgtcccactcccactgcgggcttatcacagccttgctcgtcgcccagaggaaaatgcttcatcctcaaatgtaattgtgtctgaggagggtgtcctttgcaaccaggcgggtcacagagccaatgagtgagtcagcacatccgggcagagttaattaaagcagggagggcagctggagttgtggagcacggagcctcaaggcagggacagctcctgttgggaacggggctccctctgtggtctactgagaggtagggatggctcccctgcaaggcagagatggctcatttgataataggattccctctgtggttcgctggcctccaaaagtgcaaagagaggtcgaagttagaaaaggagcaaccagagtgtgcagaggaaatgaagagtggaggtcagggcctctgcagactctccaaaattgctcagcacaactgctaattgcagctcttagagcctcctttggattccattcacaacatctaagaatccccaggagtctcccaggatttctctgtgcctagaggggatcgggagagacagagaggaggaaggaagatgttatccccttagattgctgctgccaacccaggaaggtgtcgcctgacagatggtagatgtccaagccgtccagctgcagaatggtgcccagtggtactcagtgggcagctctagagtgaatgaatgagcgatcgtccaaccaaggtgcagtcgagctactactgtttgataggtgataagggggaaatgggctaaaaggtaaatttataaaagggaatgaaagagctgtactcactaggatgatgtggtttgcatcggtatgaccctcatcggctcatgtgtttgaatgcttggcccatagggcatggcactaatcggaggtgtggccttgctggaggaagtgtgtcactgtgggggtggactttgaggtctccttatgttcaagctacacccagtatggcacagagtctctctctccctgatgcctttggatcaagatttagaaatcctgactccccctcgcctccagcatcatgtctgtctgggcactgccatgcttcctgccatgatgataatggactggacctctgaaactgtaagccagccctaattaaatgttttcctttaaaagagttgccttggtgaaggtgtctcttcatagcaataaaaccccaagacaggtgtaaatttcacaaaggtgaggcgcattggttcctcgctgctaaggtctacagctatatccaactcacagcccacaggcagccagatgtgaataaggacagccgtgcacgcagcacagcacaaaagtggaaacttactggaaacattgagatggttttgtgggatctcaaaaactaacgtcattgtggggctctggagtgtgaactttgtaaaggacaaagtcatattgcaatatgaaaaagttggatggacctggccctgggacaatactcagcttttttgtggatgctcagtaaatgtttgcttgataatgagtggacagaaaaagaaggaaggaaggaaggaaggaaggaaggaaggaaggaaggaaggaagacggattggaaaaggaaagtgacttagcccctaggaaaacactgttgcacatctagggatgcagggcccctgaaccagggttagtctaacagaccttcgagaaaggttgatgtcagcaacagcatcttctatgccaccttctacccatttttcagatacccgttcctatggaagagcattaaacaatctttctcctcctctgcatcctgaggccacccaccttggaagtgtccacccaacatgtcccatgtctcaggcaacagttctctcctgtcctacacatggcccttcttgagtctctgctcacttccacctaacaagcaaggcatggcatttcagaaggcctctgtggctcccaaatgcatccttctctgtagaccagactggcctcagactcacctgcctcacctgcctctgcctcttctgagtgctaggattaaaggcatgtgctgccaagccaggctaagtgtacccttctgaggccagcaggtgccgtgggtggggccagtgctgactctgggttttgaagatgctgggttagacactgatggctctgagcagccctgcctggtagagtttgctgacttccaagggaaatgaacacgtggacgcaacatctttgtgcccagtggaatgttgagctgaaggaaaagccagagaagtgatgtaaggctgcctctgagatagaaagaagaacttcctgagcaagccaaacagtgtcctgcctccctgagtctggagcctcaagctgatctagctacagtgacagctctatcaaggctctctctggggacactgctgagtgagagacccagataggcatggctcaccaaaggactggcctcttcctgctactgtcacagaccacctggacacagcgggattgactaccccgacacgatctctccctttgtcctcgtccttctccaggaaccaaacaggcaatacatcagcgacaggaggctttggcaatgccgagagaagctggcagggcttcggttggcacacgaggtgcaggggccctgggcacacctgcctgctgtctaccctgcctctgccagctgaatacacctttgtcagccaagctgggaactggagggttggttctgtcagagacaagacagggatcgtgaccctgaggtcactggcttggacttgaggccatcgtggccagagaccttcaaacttaaggttagacatccaagaacaaggtgtaggtaggccatgttccctctgaaactagagggaagattcttccacgccctgtcttcacttgggccgttcactggtggtcgatggcattcttcggtggctgtagctatactccattttctaactattatgaggggcaggtggtctgaccttttctcctaaggacactagaattagattaggcctcctgttcctctatgcttcatcttcacaacacagccattctatttccaaataaggtcccatcctccgggaccaggggttaggtcagtgtgtgccttggggaacacgaattgcaacagccatcagtcctctacctccaggggaggggcaggcgcattgtgtcataaatgtcacagtgagcaaaaggctggcttcttttctgttgagtgcacatgtccttcctcatgaaccctcaggaaacacaagccaggataatgtcgtgggcatccctatggctagtggaagatgggaaactccaggatctgtaattggtcctgctcactgtggagacggtcacctaagcagagagtgtgctcagtgtgtgttgagtgaatcatggatgactaaggtgccggcatctccagagaatgggaggggcctcaaccatgtgacggaaagaaaaccacttgcctccaaagtttctctgggggctgaggcaggaggatcttgagtttgagggcaagctgaactctacagtgagttctaaatcaagactaagctacatagcaagatccagtctggaaaacaaaagaagtttgcagtgttcgaagttccaccgtcattggtagggtgttcacgagaccccatggacatgcgtgaactgcaatgctggtattcaggaagtgctcaatcagattctgttggggaccctgggtgtgctgggtctttagcctgctgcggtgatttggggaggcgggggcaccagtcccaggagtgggtgacgttgggactcactttctttgctgcagggactggctggactgtctcaatcagaagtcatgacaaatcctccgagaagtgggagataagagcaatgtgcctttggcgactgtaccacagatcttgacacatgagtgaccagttagttttgttttcttggcatccgttttcgatgtcttcctccctggcggctcggagctagatcatcagaaagccctgagcgccgaactttgggctgactgaggctgctgcctttctattctggctcccagtcgctcacctggatgctcacccgggctgcacagcttgcccactcgcagcacctctgccgacccgtcgagcactctgagacccagcgcgccctctggtggcgcacagacccggaccggctacagtccctgaagcgctcttgcagccctgaatgttaccggtggtctgactccaaggtttcctgctttcaggagccaggcacccttgaccttgggtttcctccctcagtggcataggcgtgatctttctttctttgtcccgagtgcaagtgggtgggacccgggcgggaaatggatgaggaaggtgaggatgatgggtgttgtcctccctgaccagtatgaaagagcaaacaagcaccgttgaccgtggctctcttgagagctccaactatctcgcctttttctcttttactgcgatatcaaaacccactgatagctaaagagatctggcagctgcaactcggctctcgggagagggagatgaacacgcagctattgtgtaggagaccactcagccccatcacctctgagccaggtgctgtgctaagtaccgtgtgtgtgacccagttaaccccgaatagtgagacctatcggtatagtagcacctacgaggaagccgaggcacagatacgttaaggatgggttcaagataacacagatggaaatgtttatcctgacagtcaggctctacgctaatgtcaatccctgccctgcttctagcgtccataaccaaacactgtgcagtctcttgctcacctgcccctgaagatggtacccctcatctgtccacctagaatgtcctactgtcctgccctgataaataagcatggtgggccatcttcctgctccccgttgttcccagaccctgcactcttcccagtctcaccaggaggctgttctctttgggactctcccgctttttctgggagacacggatcctgccagcagctgaagctactggctatctttgcaccccagcacgcagcaggaaattgtcccatgctaatttcctatctttcctactaaccatttcctgctggatcccagcatcctctcccaccggggaaggaatagcgaatggtgttctcttggcctctgagggtccccagtgactgggatttttcagtctttctcctggcttctctatctaaggattgaatctgaagcagagggaaatagcagggggcttattgggctccagcagagtggggatgggtcttgcttgtttgcccagcaggagcttcaggtagaagtttaactattggctattgcaggcctgaccgtcttaggagccccttgccgcttcccacctaaatagcaatgtctgggtggggttagggacagctatgcagggggcatgagataacccttctctgcccacttgtgtctctgtgtaaggctctagctcttcctggcctatacagggacagtttcactgatgctttcttgccttcatcctagaaggcagatgctacttctgacaggcagagaaattgaaccacagagaagcaatgggacacgctcagctcatgcaacgatcccagagagtcccactctgaggctgtggtggccactgctatcctatgctgtctcccaggtgatagagaacttaaattctacagcctgatttcttcttgtcaaagcctgccttttggtacagggctacatgggccagcttgtttcacttggccccatgctgttgttctgaagaccttccccttaccccctttaaagggaacactgccccctggggacagagaacaagtggcctaccaatggtggtcacttcatctggcccaataggtgatatcctgaggtggtcccggggctgtaacctctcttatgaacgtttgtgctctactatggcaaccacaatttctgtccctcttaaagaaaggggcttggcagtcactgtcctagtttcatttctgttgctgttataagaaaccctggcaaagccaacttagaggagaaagggtttctcttagctcatagctccaggatgccgtccgtcatagcagggaagccatgctggcggaaacttaagacatcctgcatatcacaaccagagtcaagggaagggagagtggcatgcgatcaggctcggtgctcggatctctttctctgctcttaatccagaacccaaacccaggtaataatgtttcccgtttccaagctgggtctccctgctacaagacaaccccctacagacgtggccacacgtgaacctgatccagtcagtccctcagtgagactctcttcccaggtgattctagatcatgtcaaatcgagaattaaaacctgccaccacagttgccacccacttctgcttggaccaccttgcccaccaggcacaccagtgagagaggttgtctgggcctctgcctggggtccctgccacactgatgcatacctaatatctcctatccctttctgatggtactaagcaatttttttaaatctaaatttatgacaattgaccagagtatctatacctaaaattctaagatgctagaaggagcccaggaaaccacaagagtgttatccaaatggtctttgactttagaaatatagtaaaactaaatatcgaagagctctaatacaataccgagggctcttgattccttagtttgctttacagagctgatctcagtaatttcaggaggccaggagggttcgatgtagaatagaaacaacctaactatggagggattgtaaaatgattgacatgcctgtgtgtgccatgtaggatccttttaatggatgctgatgaagagtatgtgacaagggaatgtgggtgaagagagaaaaaacccaaaatctgtgatgctcccatgtgccaacgggaatgggcaaatggaaactgatcctagaaagggggaagggactctggtggtaactgccctgctttaacgtagttggccttgcttaaaattattccttagatttagaaatggaagtaaacagggcagggcctatctcagctaagatctctgctgctgtgctaacacactgatcaaaagcaacttagagaggaagggatttatttcactttgggccatcttcaaggagagtggaggcaggaacctggaggcaggaactgaagcagaggctatgaaggagtgacttactggcttgctcttcatggcttgctcagcctggcttaattgcttaattgctttctttgttcctccctccctccctcccttcctcccttccttccttcctttttttttttttttttttttcccaagacaaggtttctctatgtagccctggctgtcttggaactcactctgcagaccaggctggccttgaacctagagatccacctgcctctgcgtctcaagtgctgggattaaaggaatgcactatcaccacctagcagcctagtttcttatagcacccaggactaccagcctacaatgacttgggccctcccatatcaataaaaaaagagttgtccacaggcctgctcacagacaatccagtgggtggtatttctcagttgaagttccctcttccctaatggtcctagcttgtgtcaaattgacataaaatgcaactagacagcaattgaacccttattgacttgacacacaaacatatcactatgcaaccagaacctttcttctctcgtttgcccccaaaatggtatgttaatattaatatcacaatataaaatagttcaacttttaaaagtcccacagtctttaaaatttcaaacagtttaaatatttagtctctttaaaacattcaaagtctcttgcaaactttaaagtctgtctaaaatatctgtaaaattccaacttttcttactctaagagagaaaaaacaaggcatagcccaaagtccaacagtggcaaggtactgttctcaaagtctgagacctattcatgatcctttaagctccaagggcttacagcggttctctggagttacacctgtaactgcagggtatctgggccacttctctagctctgcccactgcagttcacacagcgtgtctcctaggctcaggacagctctattccatggctgttgtgcccaaggagacactaaggatgctagcaatatttgatttcttgagggacataactgagtttgtttcgtgaaaactgaattcattgaacacctaggatagatgattatttctgaacgtaagttgttcttaataaaagtaaggaaacaacctgactctacctgaattaaaaaataataataataatttgttaatggttgttgggtttttgtttgtttgtttgtttttttcgagaccgggtttctctgtatagccctggctggaactcattttgtagaccaggctggcctcaaactcagaaatctgcctgcctctgcctctcaagtgctgggattaaaggtgtgcgccaccaccgcccggcagtaatggttgtttttaaaagatgctttttccttgaatctgaagacatcaccatttggctatgagaaaaaagacttaaggacttaaaatattgctgtttctgaaatttagattagtgattccaacactgaagaaattcagacatctgcagggtggggctcaaacacagatgacagcagatgtgggcctgaagatattgaacagctgtacctgcagagccccacccccactcctttgagacagggttttcctatatagctatgattgtcctagaactctcgatgtagaccaggctggcctcactctcagagatcttcctgtctctgccttccaagtgctgggattaaaggcatggaccaccacgcccacttctacagaacgctcttaagaaccactaacctgcagaaggatcagaagtttatcctctgctacataatgagtttgaggccatcctaggctaggtgagattctctctcaaaaagcagaaagaggagtaagagacaccaccttctatcatccctgatggggtgggcgttgctgatgtataccaagacatgttcctccttctgcaagactataactgccactaggtctggatgagaggattacccactgttccagaagcagtcaatggctgggtgtgcatgcctttaatccctgcactcagaggcagaggcaggaggatctctgtgagtttgagaccaacctactctacttagtaagtttcagggcatccagggctatgcaatgagactctgattcaaaccaaaccaaaccaaacagaggctagcagtgcctgtgatcatccagaattaatttatgttgaaggccttattcatgcatgctttctctaaaaactcaagcctacgctgctacttgaggtaggaggagccttaatccctaaatctgaaaaactttcaaagcaccagtttgacaatgcaagtagaacactcggccaaggggcacactaaaaattgtatggaattgcctgcaggctgtgtgcatgaggtgactatgagacatacatgaattttacatgtagacagggctcctatttctccaccatctccttatctgtcaaatcttatcaaatctgtcatatcttatcaaatatgccctaatgagaaatctaaaacagctccggtctcaggtctcaagcactttcagttagagatctacacctgtattggtatttctagatatgaaaggaacatgaaggcacacttgtgtaaagacagggaaaggcacaaatttaaattattgacattgaatacttaaacacaaaaggatgagtttttccccctaggtctgtctgtctgtctgtctgtctgtctgtgtgtatgaatacactgtcactgtccttagacacaccagaagagttcactggatcccattacatatggttgtgagccgccatgtgttgctgggaattgaactcaggacttctggaagaagaatcagtgctcttaaacactgagccatctctccagcccaaccaatgcaactctttttaggggtgaaaaaaaaggacaaacttttgttgagcaattgcgtggtgcaaggctctagggaaggcaggcatgttgacaaggggggaaagaacatgtatgggcagagtgtagcccttattggccaggactctttggagtaaaagacatcaagacccaggagaaaacttccctaaaggtcatgctgcttctgtgtctagggcagatcccatcttcagggagagctggatccaggaaccatcagggctccctatgtcatcacgccttttctcaagggacacagtagaaaaggatggcaaaggtaacaaagctggtgtccagctgccaggtccccattttcaactgttggagtgacttgctgaagtgcttcaaggcctgaaagtagggatgtgtctgacttcccagcatccctccgtgagtgtggcagagggaaggcttgtttctgaaagcccgtgtcctcgactctccgcaccagtgttctaatctgggttccttgacccatgtcctgggctgcacactctcaaggtctctggagcagaccctggtgtctcagctgtagacagaggaggtagaaaaaagcagacactgagatcttcagaaagtacagagctgtatttcccatgagactgggaagtctaaggtcgataacttgtatatggtaagagtcttctgtctctgtcctccaatggtagaaagaaggggaggaagaagacacaccctggctacctctcccattccaccattacagtaaggattacgtttcctacacgtgagtttggagggacaccttcaaactacagcagagacaaaatagaaatactgaccttggaggtggctcctggaagccccgcagaacatttggacaagtgaaagctttgacagatgtataatctttaaataatacacaatggcctgagtaccattggggtgtgaccccgagaaggtcctgggtgctgaccaatcagaccaacagttcctccctctctagtggctgggggcagcaatgtggggagaagaggctaagtctcgccctttctgtttagcagtcattgcctttgttggtggcacctcccagagttctgatcttataagctgctgttagtccttcaactaagatttagatgaagaagatttgccatgtctctgccccaagaggtctcaactctgtacatacctggttacctttctgggttgctccaccctgtcctaggacacactactcatcaatagctttcttcttcaagttgccttggtcatggtgttttatcccagcaatagaaaagtgactggtgcacacctcatacacggcctccatcatgcctggatgtgttccttctccgcccctcctgcagaagttgggcagggggttctcccacattatgggtagcctagaacacactaagaagctctatctgtgttgtcatgttcagacaactgcttggaagaggtggaatggttggctggggtagcgtccagacaaacgaggtcacaatccacaatcacctccgcctacactgtagcctgagccactcatggggaaagcactgggcagtccattgacatgggagacagtcagctcagctccatctgctggagcaatgagctggcagacgggggttgaaccaggctttctctctctctattccctcccagggtccttggcagcagaaatggttaaagcttaaacttgcatattgatgacgcttcttccaacatgaagggttgagagtaacaccttgtctgcacaggggacagacaaggatttgcagccatggctaagtcttaggcttctggaatggcagttctttttatacctgttgaaagactaggttctctctcgggggatgagttgccatgaatcacaataagactcaaaatatacccacagcaactcgcaggatgatcttgcctctgtggtctcatctctgcctctgtgtgggagcccgtggctcactgtgatcaaccatgccttgggttattaagttgggtgcttacacgaagtggaacagtgggatgatcacgctccgggtacatcttggagaagggttagactcttcgagggtttgcagatagaatgggagaatcagaagcatcgaatattactcattgttagtaacggcagacactagctaattcctcagttgtgctatgctctctgtgggcacctagcctcatcaggctggagtgcaatgtggactgagggcatgttacagtgggagacaccactttggagatcaacctcgctgtcttccttcctctatttaggaaaggaagaggtaaaggcagctgtgtactaggcatatgcaaactgcatacccacctgcaccaaccttacattggttgattaattgattgattgattgattgattgattgattgattgattctctgtcatcctagatggcctggaactcaccatgtaggctggtctaaccttgaacacagagatttgcctgtcactgcttctgcttttgcccgcccactaaatactagaattaaaggcatgtgcttccagcccagctttagacaaaccacaacactgaggtcacatcacagacgtatatattgctgcagaatcatgttgttaacaaagaacataaccaagacttgaactaagctttgcaagactccaaagccagtgttctttgccagtgataacattcacagtaacaagttctgtgtctgactccaatccgtgtagacattgtaacactaggcatgaacaaccaagtcacagtatccatcaggatgagcctggtacttgtcatgaatgtgcttcaagcccagtcatggagatgatatcagcttgatgccgaatagatggaaaaacaaaacaaaacaacaaaagcaaagcaaagcaaaacacacacataagcaatggggtgggggaggttccccagactgagtgtttcattttttttccccttcttgtctgaacttggatagctactttttggctgctttatatatcagggtcctaggttcagtttcagtggaaggcagctatctgggggctttcttttaaaatcttaaaaccagtgctctcaaatggtgtttctgcaatcccacaggcaaaaacatgtctgctagtggcacgtctctcttctgtggattgaagacatcaagagctatgaaggaatcaagacaccataaaactccacacgctagctcatcctttgatattgggagcaaggaaacactctctatactggaatggataagttagccaggacccacagaattaaagggaatgtgcactggttgaagttggaagaaacaggaaaataaaatcacttgtttgtgcttgaatagcctttcgagttggaaatgctcaggaacttccgtatgtaatcctaggacctatcctagtggcagaagatacctcctgggtaccatttcttgggtatctgtgcagaaaattgtgagagcatccatttggcttagaagtactgaccatttgagctgccccaaccaagcacattgaccctgatgagaaactttggcttagcaatagaaggtcctctttttcatcacctcctctgtcttcttctgtcagcacttcactttctctgggtcatggaaagctaaaatataccctctggcttctatccataactgggtagtcccttcctcaacaccacattccttctcagattttctcccctccctgctgataacaagcctcattccaatttgaaagaactcttcagtaagagctaggtgtgttctgttagacccatgtgccatgcagagaggtctggctcacaagggcctcccaacaggctgttttgctaaagccctgacataaatctgttggctgtacaaagcataaatttcccctgttatccattctgattagattcccaagctagcccccaaagccactgatattgattccgctgaaggtagcagggtatcagagagtaaattcagggtggatttgacttggtttttaactctagattttcttctggcccaagcaatgtacctgcagaccttcagttccctcctgaggcagaaagaggagggcactggtaccgaccctagctgcagagtgtcttgtttaccctgtggtaagaataaactgtggggcagtgtctagtggccggttctgagtggacactcagaaatgttggcttgcgcaccttccagctcactgagccagaaaacacagcataattagtacactccttgtgtggcttgagaagtgaatcacaatgaaaatgaatctttaatgatgaactgtggtgggtttgaatgagaatggtccccataggtccatatatttgaaagcttaataaccagctagtggaaatgtttggaaaggatcaggagatgtggcctttaaaatttcaaaagcccatgctaagcacagtaaatctctctctctcatctatctctatctatatatctatctatctatctatctacctacctacctatcatctatctatctatctatctatctatctatctatctatctatctatctctgcctgctgcctgtggatcagactgtaaagctttcaactactgctcaagctccatgcctgcctgctgcctgccatgatgagcataaccctgtgaaacagtcagcaaatccctaattaaatactttcttttacaagagcttccttggtcatgaaacaagagctaaggcacaggcccaaacagaaagtccaccgtaagactaactaagaaacagactgtcttaaatccagcacttgagaggtagaagtagaagggtcaggggttccaggccatccttggctatctaaggggtttaagaccagtttaggttacatgaccaacagtgtggctgagtagtgagagaagggaggaagggagggagagaaggagagaggaagaaagaaagagagggagggaaggaggaagggagggagggagaaagggaaggaagaagaaaatagaaagtcttcattggtgatatttgacaaaaggcagaattattcaatttggaaaataagaggggcagatcatgacagttctgtgagcagctctgaaccctttcagggccttggagatgaccattatttatctatgggaagaagttctcagaactcactgtgatatctcctggtggaatcctttgaagacaggcaagatgattgggagtttaaggcaagagccagacaactggcttgcctgctagaggctcgcctgctagaggcacttgctatcatgtctggaaacactagtgccagtgcctggaacccacatggtggaaggaaagaaccaacttccaaaagttgtcctcaggtgtctgtgtgcacaacgcagcaggtgtgagtaccagcagctgcagcttctgtatgcacatcacagcaggtgtgtacaccttcaactgcagcaattgcttaggactttggccagcaaaagactttcttgggaggaggttttttgttttttgttttttgttttttttttaatcagtagttttgatttgctggagaaaatgctatttattaaaaagcaacctaactttcagtccattttatttttgtttctgtatccatataaactagggtcctatttatgttcacagacatggtaacctgatcccatcacctgcccatgacacaccaccagttgtgggagactctaccggagttgcccacccatgaaccacctctactttctttaacagaactgaataccttggttttaagcattcatgtgttcaagaaaaccgagccttcccctcctgtgagtaaatacatttttaaggtagtcctgatagaatagttcttcattggcagtgaatgattggaaggtgagtgtgtgactgagttctggccactttaggagtgagcatactggtgtggctgcacatgtttgtaatctaggcactgaaaaagcagaggtgggcaaatagttccaggccagcgggggctatatagcaagaccccgtctcagaaggataagggcttgaaggcctaccacactgtggtagacagcttgtctagtgttcaaggccctgagttccatcccctagaaagcaagcatgaagatgaatcttctgcaataggaatggagaactcccaggaaaaaaatctgtctggatcaaatacaagtcgaactaagcaaagcaaaccagagaaaggaggaacagtgtttgctcaacacaggcaggcaggcattcagcccttccttagagtctacacagcaggcaagtgattcaggaccacaaggaccacccttcacctatagccccttcccacccaaaaaggcccaaggagagtagcaggagctttaagtaagaagtcacagacccaggcagttttgttttgtctcagccctggtacttcacacttataattccagcacccaggagcaggaggcttgcccccatcttgaagaccaacctggtctacatggcaatgtcctggccagccagaactatgcagtaagaccttgtctaaaacaaaccaaaaaactagaacaaaagaagagaagagaggccctacccccaaagccatccatagagaacacatgaatccaaaaggacagagtttgggagactctggagacagctgcaggtgagagaaagcagggactagtcagtgagtctgagacccaaacatctgtgcttcggtaggccagagagcccgcccctccttgtcccgtgtttgtccctttctctctggggttcacatgccctccacaatgctgctgacgcctcctttctccaagtcccttcattgccaggtttgcagttgtctttcagagcaagtccctggggttgagtataaacctcaccggcgccttcagtcagcaggtgtaaagaggaattactgctgttccctgctctgctgggtctggcggaattaccccaaagccgtgtttatcatgccattgaaccttgtgcccatgtttaatgtgctatctacgctgaccccaggtgtctctctgcttcactgctctttcccgcagccatcctacagtctgtggctcggagggtcatccctgacaagtgtattactggtgtttatccatattaaatcttggattggtgactgcctttttactcatctttctaaactcgctttggttctcctgcagcctcgctttctgccttgtttcctcctaagtcagggaacctattgtggtctccggtttccaggcgctcatgaagaagaaagatgctatggatggtcctgcctgcaaagctccagccttcatctggagttgctactgacccattcataattgcatcattgagagcagtgggggagctcaccaaggggattggtttagttacatcatacatctgtaaaggcaatggtgggcctgagttttcgcctatcagaactctattgaaggctatcttctttatcatgtcttgcataggcatagcacgttacacttcacaaaacctttcatattttccccctaaagcctggaagcccatgccaatctcggtaagacattccgagagagcgaaagcaaagtgcattttatttaactgcatcattaggaaatcaaaacatgttacacgatccctagttgatcgtgggcatctatttggtttgtgtttttattttgccttgttgatgtgttttgtctcaaacttcacactcccctggcctcagttgccccctggctggaatctcaagcacgtgctgccacacctagctcaaatgactccaattttgattttccttttctcttgttatgtagccctggcctggaactcaccatcccagttttgaattctggtgtcagtactgagacaggttcaactgatgtgattttttttttgttcttacttgataataacatttcagtgttaggtttaatttcccccaaagtttcatgtattttatgttttatttaaaataattatacttgaaactaaaatgtaaatggggaaagtaagtgtgtgtgtgtgagtgtgagtgtgtgtgtgtgtgtgtgtgtgtgtggtggcacagtgggtaaaggcacctgccaccaagcccaataacttgtgtttgattcctgggccctacttggtaaaaggccaaaactaacccttaggacttgtcctctaacctcttatcatctgcacagggtctgcaggaagaaccaatctgagtgctgagcagagagctttaatatactattcagctgtgctagggagcaggggatctttggggtgtgtgatgggtgagcaggtaacagaattttgacctccacatatgtcccagcgcgcgcgcacacacacacacacacacacacacacacacacacacacacacacacacacacggacttttaagaaagaaatgtaaacagagtccaattttccattttcttcgtggcgggaggactttgacagcgggacatttgtagctaaactatcgtcggttgagaagtttttctttaccaataataccccagatgaattgcttatattatcatttctagtcaaggatgttttgtgctcaaattgatgccagagtcacaagaaattggatgataaattaatatgtgacacagacaaaaataaggtcaagtttctttgttataagagggggaaaaaaaccagaatgcactgtaatggaaaatacttaattagatcattcatccagtcaatagctcgttgttcaatgcctcttggctaccaggtactgtcaaggcacagttttccttcttgttctttctcctctcccatacttctctgtctcctctctctttgtgtcctgccaacacttcttttcctcccccagaactttgtcaacaatttgattacagccatgatgccctctgattgtcctggcgatagggaggaaggaaggaaaatcttcatttctcaattttctggtccttcatttttccctactggcttctattgtcttctgcacaggacctacaggaagactcaatccgtgtgctaagcatggagctttaatatactattcagctgtgttggggagcatgagatctttggggtacataatgagggggcaggtaacagagttttgaaacatctggactttcttccaagacccttggtatggattacagatagtagtattaagcaagaagcctagcatttatcaacccaagatccccctcccccttcatagtttttggtgttatggtaacagtgctaatacaacacaagctttctagccccaataatggcccattagagcttcaggaaaagccatcatgtttctgtagcatttgtctgtcagcaggagactattacagagcacaaactcacattgtattagtgttatcagttccttatgatccttggcacaagtgccagccaatgggctggcagtctgctggcccccactggatgatataactccatacccagagtcaagcatgtgagaaagcagcaggtctgcagaggtgtgtggctgaggacattcctccagcctggagcccatgacacatggttctagagatgctcaggctaaggtcactgtcttggtcgggactgtcttagtcactgtggactgtccatggatgccctcccaggatctgccttctccagtcctcaccgtgggctggagcagagttgggtttggcttatgatccaaacaattccatggagtcagcctcctcttcccagactggtggtaagaagcgtgggtgtacacgttgggtgtttcccccacagccttgttctctcctgcacccttgacttcaggagatgtgggaatggatgagggatggcagaaccaaactgtgaaccctaatatctgctggactcagtgaccagaggatagatttcctaaaactgcctggtgtgtcttattcaatgatgaggccattgagctctctgggtgtgggggagagaacaaactgggtccaccagttccgttgagtttttgtggcttgagagatacaaacaacttcatttagcagttggtcctagagcatgtgggaggaggaaattatggaacttgccagacatttaactaccaccgccttatttgtggaaaatagaaggctggtttgggaaggctgtcccaagggacggaggataaaatcgaaactgggctctgatggaacaaaggtgtgctttgcaccacaccagggacaagggctgctgtgcttggagtggttgccaagatggcaaaagaccccaggtgcagacatgtggcaacactaaggatggagaccaggtaggatggatccgtgtggacctgtggattgattgaactcatggcgtacttggagctttccatccaaagggaaacacggggttttggagtatagtaggctgcattaaatggccagggttgtagaccgtatattaggtcaggagagcaggtcatgaaattggtctttaccaactagcaatcccttttgccctctcaggactccaccatgatgtaagaggtggacacagatgcccagaccccagtgtaatacacccagaatacgcccagaagttcatgctactgacctcacaactaatgaaagaacttgtgctcagggaaggaggaggcagggaaaggagagagacccgtctgcacacattgagaggtggttttaagcagagatccagacccgggctggcatgttttgccagtatttgttgtgtgacctggagaaggacaattctgcacacagggaagtgcacgaatctctccatttatcgaacctgatttagagttctaaatgcaggtgcttctccgctgagggtggggttacatccccatcaacctatcatgaatcaaaaggctggaaaggcattgaacgtacctatcctagtgaaccttgtggcaaaactacacagtgcactgcgggcccctcctccccctgtgttttggggctgagtacgggctgtagctgtcactgcctggcacgtcgagccagtatggcgtacatctgtgtgctgggaaaaggatttcccaccccccaaaaaacccttgctgtgtaacctttgtccgtgagccactcttcacagtgcattgctgggtacaggatgctggaattctccagtgaacatcatgcgtgcgcgcgcagtcactcctctcatgagacttccaatctatggagaaggggcggtacctctcacatcaataaagtcgtgattgctaactgtgttaagcaacttgaaacagtgtgactggcagaagatgtgggtgctgtctgggagggaggggggagtctattagatggcagttgtagtgatgggctgcggaggggtacagagtcacctacagcattctttcatgtgtccatggccatacaggccaaagagcaggcttcattccccactgcgacaggagtcattaactgtgcattttcaaagccctgccaagccctgagtgtgctcagggaaaggaagaattcagagaagcccgtcaatgaggccttcacaagagatgggagtcatgtagaaaccaactcaaggacaatacctctgcgtcgctttgtctctaataaaatacctattgggttttgtttatttgcttgttttgttttaatgatgcaggtctgctggaggtctgttgatagggcaaacatccctgtccatcccttgatgtgatgcctcaggtccaccccacactttcctccacttcagcacatgtggacagtgtcagctgccctcgccagccttgactagtgcatttgttcaagtcaaacatcgccccttgaagctagcacctactccctaagtccctccacagtggctaacccctcctgaggctctcagcacccgccctctcgccctctcggctttattccccaaacacatagcactgcctacaggtacactctgcttagacattattttggtgataaaattatatcccccttcccccacacacaccccaacactgttcattgtcttttgtagagactaaggtaatactctctcctgagggcttttcctcccccttttaaataattctgtatccacaccagcacacataatcaaattgattattatccctgtggcaggtatatccccaaggtgaaaagccccacaagaagagttgagacttgacttatggctcattttggtacagtggcggcccatggtacagtggcggcccataatgttctggttcatagagggagaggcagacagggctgcaggtgcgctgatagctgggaattcaggtgtgcgtttgaaagtgtcaacgagtgcctgggagaagctgtgacaggtaagttggaggttttaaaggccaatcatgttttcccaagcagacagggatttatgcctggagcctagggcctgagtgcactgttgagatttgccaatgggcaaagcctgacttttgtagtctcgaggcattttatggacacacaccctgcatcaagccacatggcagaggttcggagcagactggcccaggtgataggagcaggggaaggggaatctgtctctctcctctggctggctgcacctcacctgctggcctgacccttaaacacgaggttagagcctgcgaatttctaagccactggccgcttctctatggtggcgatggggaggaatgtgactcgtttttaatttagagaacaaaccagttccaagaaactcagagggggtttgcaagcctgtcggttcatagagctgtgtaccggtgttggtggaggtgggggcgggcttggtgagtatgttagcaccctcccttccaacagtcccaccaagcagtttgaatttcccctctgtttttcagctgcaaaagcaagaacacaagctttaggactctaaaacccagccttcctactccacaggaggtggggaccttgcatgcccgccggagtgtcctattccattgaagtctcttgggctggccccccttcccccaccccagctcgattctgtcactttaagtccagcccctgagagatagccaataggagccaaatcatacatcagtctctcagccttaaagctacagtagggttagtgggctccaagtgtcgggcgccccagcctcctccacggcttggcgtcccctctgcccgttcgctgagcgcgcggatgagtgggagcgcggagctgcgcgcggctctctgcctccggctcccccgccgcggccgcgtcctcccactccgccttctcgcgctcaccgtgcccgccggccgggactcgcacctcgcctgtgcccttcactcgtcttccgcgtgatttgcccgccgcctttctcctccaactgggaatgctaaaacgggactgatggacgtgtccgaactctgcatcccggacccccttggctaccacaaccagtaggtgccttacttttccttctgtctgactgtccttctgcccatccaagtgtctctatcctggatgtcgcagttcctcttctacacattcctgaagtggcagggacctaggaggggcgctccggacgtaggagggggcaaaccgcacacttgctccgggtttcttaaaccctcctcttaacttttcccgcatcatctttcatgagcccttacttttagacaacagcggcgctttctcgctcactctgaatttgctccgcggtgacaaatatcaccatttccgtgacgggcaggcggaagcccagaacaggtgcgggaaagtgaccgcaagggtgttctgtcccgtcctaggaatcctccccacaggcgctttgctttctatcctgggtacccaaaattatttcagccagggccagaaaaatcaggtgtgctgggggtccagtgaggggaactacaggcgaccaacgttgtgcgggcgcggggctcccagcgggacgccctctgggtggcggtcctcaggagcccctggggcacggcagggcccggagcgctgcgctccgcacgtcctgcttggggaccagtgtcccaccgggagccgggtggctcgctccgtgctgcggaggtgaagtcgggtggacgttcggggctgcatatcgggtgttcgggctgagcaacgccagtacgtcggttaagtgagctatatgggtggttgaggctgcggggaccggacacgactctgggtagctcctggttcttgggacagttttccgagtgtaccgggtgggaaggggagaaatgaccctaagcctcgattatcacacgggccacccgcgctctccaaggtggctgtgccacctgctcaagcacctgccggggtctcccttctggcgctccgcgtcccatcgcgcttcggtggaactcggagcgttcgttgtgcggtcctggaaatgatcctccgcaggcttaataattaagattaaaaagaatctaatgaaaactctagcttctcaccggcaggtttcctaagtaactttctgtttttcttttctccaccctcaacgcccccctctctcttttctttttttccttcttttttcctttttttccccccctgaacgaaacgtacagactcaggttttcttccctatcacggtcctttcctttccacaccacccaccctttcctcgcaccatccggccaaagaacttgagtgacagctttaagataaaggctgtgtgtggaccacctctggttaggtgaagtttcgaaccctccacctcgcttcggagactacctccacttgccgggccagcgcgaggaggcaacttagcagcgaggctgctgtgttaatagcaggactgtcctgccccctaccctcaccccagaaacagtgaccctttcgcttcagggattttttccccctggcgaagagttctttttagatacctgcagaatttaaacagaggttcaggaggtcttgagggaaaggaaagcggtccttaattataatggattctgatttccatcagcttgaaaagtggcttttcaattctctttcaaggttatgccgcttctggagctgccgggtgggagtaggggttctttgcttggggaaggtcaggctcctccccaagggagtatgagaacctcgggaaccccggagagaagaagagggttaggggtgtggactggaatgcttgatggacatttcctcacataaaattaccaagtacgtcaaatattggatatttaaattatttaggctccctttctccggaggtgacctcttcccttgagcctgaaatatctctgtgtttgtccctagctcaagtcatcatcgatcaatatgagattgtgtgtgcaagcaggggccggaatgtatgcatggatagtgttgagcagaccctcagaaggcctgattacagtttggggagaaatgtggattaagaggcgactcccagggaggcaacaaacaggacgatggagccaaggtcttagaggtgtaaggcgaaaatcatttatagagtagcctggtgtggattctttcccctttctggctcttttcttttctttctttcttccttttctcctccttcttcttcttgaaaatagtaataacaataaacaatagcttctccatccatgagtcataccaaaagtcaaaagtatgcctgcttaaaaagaaaaagcaagcaagcaaacaaacaaccccaaacccaggacctgccgagctgcagctctaagctatagttcatttgcaggtgtttgctgaagctgtggtttgcatttgccttggtacagaggtgccggggcataaatgtgagcatggtgaggacagaggctggtatgtgggggaagcaggcagctttggagcctcctctagcaaagtaacaaaatcagggagaaggggaagtagggggggtgctgcacactctggtgtgttggaaggatggtggcatgcatgcatttattacaggctgatgtttctcagggaacccgtgatggggtgctgtgtgtgtgtggtggtggtggtggggacatcatgtgctctgtatagatggtttttaccctgtgtggattcattgacattctcagactttagaaagcccaagggcacagggaatgtgagttgtgggtgggggtgctgctctcctgtcccctcctaagacagagaacatttgtcacattctctgtgtcatcctcaccatcccaggtgagaaatgaacacgcacgtgtgtaccttcctgccttcctgcccttccttttcatttccccatagtctgtcccagaggtgactccctctcctttccaaatcagtgttttatgtacacaggcaggctgagtgtcctctcctgtgagttgcctgtgtaggaatgacttgatgaggcactgactggagaccagaggcacagaaccccgatttgtgcatctggggatggggtggggtgggggtgcagttgccaccttctgaggaggaggaccattgcactccgatgttgttaaggaaacaaagaacaaactgtcctgaaggtaaaatatgtgggttcacacgtaggaaaaatgccacatggtaattcaaaatcagtgacctggagaaaaacaaaggggggaattaatttttaatggtacattcgaaaataaatcagagagaaggcattagtcgtggttttccaggggagggggctccagaaaggaactctttatgtgtctgcactcctctggaggtgtccagaggggttagaggatagtggtatagctagccggagttggtcagccctgaggaaataaatagaaaaaaaacattaggtcagtgtcacagggccctagtcaggactgaggcccttccgggtcggtgacagcgctaatctccttggaaatttcctcttgggatagattattttaccaattcctcctctcatcttagaaacaattttctattctgccaataattataatgtgtgtgtgtgtgtgtgtgtgtgtgtgtgtgtgtgtgtaagaaattttcttttataagagcatgcacgagagaaaaacttgatcccccaaacaggaaccttttcattctattgatttggagtgatcaataaatatcccatttagtcgagaaaagggacagaggagactttcgggacagcggtgtatgtaggagggggtggaagctgtgacagtgtgttgatgtcgccctcagccttcttggagggccctgtcctcaaccaagctctcacaagtccgtgcttgggcctcgagttcctgtagccggacattttgtcagatggcttttgaggagaacctaaagtcattgaaaagtttctcttcttccttggtcctctgcaaaatgtcttgcttctctggagcagggctctctatcatttccaggctgtggtagtacctgagagggtgactggggaagacctgggagcaggcaggctgcagaaggagagtgtcaggccaacagcacacagaccaggcacagggtgctattggcctggctccctagaacttagctgtaagaacttgtcatctcaagatgattaagccacggtccaaattttaaaggaaagaatggtagatctttaggccatgacctaccttttcaaataaacccagacccgtaccctgaatggccttgactctgatgccctccctcacctgctagctttcctgaggtctgcccatctctctcagcaggagaccctcaaattgttcctcccgcatacatagaagctctgcccagcattaaagagccctgctgatgggctctgggaatgttgggcttggattccgatgactctgaactcaatgttactgcaatgttccagcttggctggaatgtttagctcctagtgtcccttctctgtaactccccaggggtgcctgggcaggcatgggcagtgggtgcaaggtgtgcagattgctccctggaagccatagggtagagtggaggaggatgggctgtagccaaaccagtcagtcagcttggaagcatcctgaacattctgctgtgtgcccttgagatgcctgctgcttccagctctgaaggggagtgtgtgtgtgtgtgtgtgtgtgtgtgtgtgtgtgtgtgtgtgtgtgtgtggtatacatctgtgaccccttaaagaaccttctttaagcctgctgagtttcccatctctgtccaacacactcatacctctatggaatgcttacagagaggaccattcctcagaggtacgacccacaggcttcagctggccctagtctcttctggtggaaccagagtggcctggggccgggttacatctggttgccccattggcccaatgtggtcgggtccctgtgcagggaggctgtggtgcttataattgcaaatgtaattagcagaccagccatgggggactgggatgctcaacttctctgcacatctcagtgacccctgtgatagctagcctggcagattaaccctcgaaggaccagcctgcctcttgccaccagtggggcccactgatcttttgctgaccacagcagagctgtgctgagaccagaccccttcctctgaagggcctctccgggcaatgagtgggagaggttggtacttggagatttttcttcccttggacactgtgttagtgaccctcaattcttgtctgctgggacatttccttccccgttttcctggtcacaccgtgacacggtggtgggagcctttggctgcatactagttggttctgtgaccctgggagtcacagtactggagaaagcagagctctggaaagaactcctgatgactgctgcccagagcactggggatcaggggcaggggcttatattcacccatctcatcagtctccgccacaatcagcttgcaggaagtgattgcttccccctagcgtgagctcttcatgagtgtgtgctctgcaaggcagcccggcttctgctgttctactcggagatttgtagagagctggccattgagttcatcacccaaagctaaacaccaaacacatgcatcagcctgtcttctccctaccccacccccaccaagagcgcctttccttttttttttttttccctttctgccttggtcaagattaatatcagagaggatcttaaggagattttaatttacaagaactggggtaaagaagtgtcaagcctttgggtgatcctatcaggagctgcatccagccctgggtcactatgctctagagagctgtgtgtgcccatgtgtacaagcatgcactatgggcatcgccccctttaaaaggagtgacagtgttaaaaaaaaaaaaaaaaaaaaaaaaaaaagctgcctgcctgttccttgcctaagctgagatcaggtctggcgacattccagtaaaaactctcaccttgacatccagagtatggaagggaccacagagggacccactggctggtgttcctgtggtacaaaggattctggcttttctcagggcctctttcctgtctttaccctgagctggactggggcagactggagagtgaaagcagacctgcccccctctaacagatggccacattccgaggaacacttgaagacgtgggccattctactgcaggcctccatgtcctctgctctccctggatagttatgtcaccaaaacctgaaatttaaagggtaggatggcttcttaaatggaggaaaataaactgtagttcatctgtcctttctgtatgggatctgataagataaggcagggggatgaatggtcagctgaatagcttacaattaggatcatctcagtgtaaattaaaattatgtaaatctaaagtttgtttttcagaaggtgaatatatgtgcgtgtgagtgcgtgaccactcttcattttgttgtgttttaagacctgtatagattttgatcttaaaaaacaaatttcccttttttgttcattaagcccccccccccacacacacacacaactgactgttccatcttacattcagctttgtccagagtggggtcttttctattcccggcttccattcagcattgctggccgggatggagccatttctgggaatgggcttctagaatatgttattttattcttcaatatcatcttattcgggggtcaaaggggaggagttgcacgaactctgacgaggttttgtttttatcatctggcttcaaatgagatcaaaattttttgtttaacagattagcatggtcctctctagaccattacagaaacagctagctggcagccggtaactggcattttactaaaacatggcattttaaacagagcaaaggtgacacaccaaaatcacaccgggcactgccatcccagagcttcagatctgaaatataaagcattctttacatgtggcactttaattttcaattgctcaaattaactggagttcatgtattagtttttaaaattattgattcttttgctaattcactttgggtttctggtttgagattttattatttttgtttgtttgtttgttttttgttttgttttgatctgactgtgtagctacctgaaactgggcatagcggtgcatgcctgcaatcccaacccttgtgatgacaggagaatcaggggttcaaggccatccccagctgcatatagagttggcgggtagcctgggctacaggagatctacattaaatgaggaagactatgatctatgttaaaaggagaaagaataaggcaggggaagaacgacctggaaatgtggttttgaacatcaccagtttttccctatgctcttgggtctggaaggatggagaacaaggtcacacagtcctaaggacacatcccggggagaaatggggtaaagggggatgtcctaggtgaccttttgctcatgtcttacaactcagcctcatcttctgtcttcattcatcaaccctcgccgtttccatcccaacctgatacagcatgccctcgtcagctatcctgtttccatttcactgtttggagggagactgtaggtacgtgagcacacatgccttagtgcaaaccgcgtttgagctgtcctggggtggagcggtaaagtctgatacaaagtatcatcggccattcccgtaaagtctgatacagagtatcagagtatcaggctattccactgtgactcactcatcgatctctttatccactgttgcccacctgctcacctgttttggtaaaaacagcaagaacagcaaagaaagacccagtcttcatatttcattcaagctggctgtgtctgttacctgggaaaccagtgatggagtatgaatggaggtagcaggaaacgaggaaactcttcagagtcagttttcaacacccccccccacacacacacacactgcctggtcctggctgccctcgtttgaggttcctggtgaatcagagtaagcaagcttgtatgtccgcatgtttctgcttccctgatcgacctgcagagaacatcgttagtgataaaccagaccttcggcatgcatgaaacaatatttaggcgtctcctttcaggctgactctttgtcaaccatttcctgggtctgttgacaccgccgtctacctaaacagtcaagctaacaagcactgtcagaaagaacaccgcttttcacagaaataatagcaagaaggtggtggttgtaatgattataagaatggtaataacagctttcaccttttcagtcccccagagtgccaagcaattcacatgatctgcgttctcacagtatctggttaacggtgaccacattttgcctcagagcataaatatatttgtgggaatgtaaactacgcaaaggcctcgggcttgcatatttgaattcatccaggagcaaaaccagcccagtatctggatatgagcaggcaggtggcagagaatctggttggtattaaccacatgcgcccaactccagagaaatgcctctctttaaggatgccggttcagtggccccactacatcagcagccgctgtgcggttccaatgtctcctattgccatcgggtggctcttctggctgggttctcacatgtttgcaggttgggggcctttgaaggacaagggggcggtgctttgacgtggacgtggagcatcttcaagagtggcatgaagtgagcaaagtcacctccctagccttggttggtcaccttcctggccattccatttctgctaggctcttgtcccagcttgcagggtggggacctctctaagagcctctgagttgctcctgcatcccacaacaccacagttgtgttctctttcgcttgcttgtgtccttgcttgtgcgtgcattttatggaatgtaagacacagctctgtctccccctaatacgtcaggggccctgatgtctgcattcttttgaacaacatagttatcactatcactcagcttcttaccctccccgcaaggaaaataaaatcgaagtttaggattatgagttgattagtaagcgatttagcaaacaagccagtcccctctggaaaggcaagccgggggagctgtacagttcaggttcaaatctgattttcattcaatccgtgagaaattttatagctgcaattcccttgttggattcagaagatttgcttgttttgtttttaatagtgaataataacaaccgatcagttttgttgaatttaagaacgattaggagaaagtttttttttttaatttttttaatttttaaatttttattattttcttccaaagaacattttggaatctgtgtgtcattgtcactgagagttcagggatggcctgagcacacctgcctgccgttgtagcaaatgagctagctgttcattatagagagtcataacagtatcttcagcatgtgtaaggtcaacttactattggctgtcggggcatcccttctgtgtgtgccacatcctatactgattccagaggcaaccggttgaaatgaagatattttcctctatcaccagcacacaaccaaatagccacagctgtggcactgcctgcttactgattacgcaggatctttctggtttctttcctctcttccccaagaagtaactaactggaaatgtgcatgcctttggaagagtcgtggaaataagattcatggatttatagggttgcatatgttggcttttatttgttttgagacagagtctgactagtgagcctgctaggtagacagtttgtcctccaactcaaggaaatccacctgcctctgccaccagcgtgctaaagctaaaggcatgtgccaccgcacccagagtcacaggtttttgcagaaactttattctctctttctttccacagataatatctttaagttgctgtggtgaacaaaccaaatcattgacaagtgccaggcacttagcaggcgtgcagtaggcgtgcctcaaatgtttcgtgtcaatgaaagtggggtgcctgaactggacttagcttaatgtggtcactgtggctgggatttctgtatgtgtgacacaggggattagagaagggattagcgggggtggaggactgatgaataggacattttcgtctgaatgagtatgtttattctcagcctgtggagtggagtgtttgatgaaatagaggctgccacacagtttttttttttttttttttaaagatttatttatttattatatgtaagtacactgtagctgtcctcagatactccagaagggggcatcagatttccttatggatggttgtgagccaccatgtggttgctgggatttgaactcgggaccttcggaagagcagtcggcgctcttaaccactgagccatctcgccagccctgccacacagttaaatgtaattttgacttggataatttgatttagtttagataaataatgatttttttttagtgtaaatctcatgcaatatttgctaaatcttaaatttgtctgattaagtaatgcgctatcatattttccttaccattattgttatggtggttgttgctttgggcaaaacatcaaagagtggttatatgtttagggtttggggaaagagcagggtggtgcggggaggagttcctttttgtttttttaatacaattatcttttttcttttcaacttatttatttgttgaatttatttttggcgttttcttacagagtctcacatagcccaggttggtctggagctcactgtgtagcctgtgaactccttaccctcctgctccttctcccaagggcttggatcacaggcttgcagtattacgctcccggctaattatttctaattacatttttattaatttattttgtgtttctgtatgcatgtatacgtaggggcacgtgtgtgccatggtgccatgtggaggtcagaaggcaacatgtgagagttggttctccccttctgccacgtgtgtgtctctggggatcaaactctagtccgtgggtttagcaacaggtgcccttacccgctgagccatctttctggcccctcaaagtattaagtgaccatctcccgcatcttgcctatattaatcatttagattggtcatagcctcgggggttagcgggtataagtgagttcggctctcccagtgtgtcagtgaaatcctgcttgtgtaagcaagtccttggggtagatagcagccacagctgttgagttttgctttagagagaagcagaggaaaaactctttcagagacctgtatttccttggtgttctgccctccaccccaccctcagacattgttggacagcattgttggacaactgctacaagaacccaatgctcaagcaatgagaagggacccttgctctatctaaatggccaagaaagatactatcccgtcttcctatggagaacacgggtaagacgctgtggaaaatccactcgcatcagtgtcgtcattttggaagcagaggggactagggatcaaatctgaacagggccatctgggaggaggtgcagataaactaggacccagctagtagcagaataccagcgaaccccagctgctactcactcccagagctagtaagtaccattgtcttacctaaggtctcctcgctgcctggatacctggaataaaagggctctagagccccctacaggctctctccgactctgcagcctatggacaccagtcctacagctgggcctttctagagcagaaaggagaggcacacggagagctcagaagccaggatcacagctcaaccctagtgttctccttctgagcagtggtgtagcactgcagccgcctccagctgtgaagcgtcttcccctaccgcatgcgcgcatgtgtgtgcgcgcgcaccccgcacctccctcccccccccccccccagcaggacaggacacactcactgcctctgcggcttgcctgaccttcagacagcctggcaagtgttccagccccacttattctgaggaatgccctctggctgctgaatatgcagaagcattgctgccaggtgcggagcccgatggtgatgctcagatccatggatgatcttaatagtaatagtaataataataaatagtaataatagtaatagtaataataataataaatagtaacagtcacaacaactgaccttaatcgggtgcttcctatgtgacacatgttcctcagagatattttacatattcactcattgcttcctcacaacagccctggggaatctcacttcacagctggataaacggaggcgtgggaatactaagtcactgagcccttccttgcctgctgccctttctcaagcatcgtaagggcattccagatagaaccctctcttgtggcctgcctttctcccttcccatgcctcccagcagctctgcctcactccttctccatcagcccccaagtctgtgtgtgatgctggagcctgccttgaacctcgtctatgcctgtcagcagtgcacagccccagtggcagcaactccgccatcctccgtggatcttccctcgctccgcccagtaacccagggattcccagcgagacagtcagtatcttcagttcttttccctctcttctttgtctaaggtccactgacacctgaaaacttatacaaacactcacttgagatctgttcctccccagaaggccttttcccatccctgagagcatctatggatcctgtgaaaccccgcccaagtatattcttctttgtgaagccatctcttacactccctattagactggatctctctccttgaggctgcccgaaggccctggccacaatcctggcatagagcaagtgcttacaaattgctgtttgagtatgatagagaggaaagcaatgaggaaaccggagccttgggacacaaaagggactctagaccccttagtgatgaccaggactctctgtggctccacaccagtgccgtctagcacaagggcaggtagctgggagtgtgcacactcttctgagaagcagctagttctgtggctgagaagaaacctagctctaggtgtccaggccccaggagactccattgttaatgtttcagttttcttgaagctaatcattaaacacaatcactattgagcatataaacgtgtaattcaacacattatagtaaaaccaaagatcataatacaaaaagttcagcatttcctgaggctgtgggacactttgctttcaatgtttgaagcaggtagccatctctgagcttgttgaggggcatgctgtaccgtacagtggcaatttgtggtccatccctctcagcctctcaaagttgtcacactgatcgcttaaaataggacaccacagaaactcgaaaatactatcggtcagtcattacctcctctgactcctgaatgtgttcagcgtcggccaccaacacactgtctggctcccttgcatcctgctctgtgactctggataaatgacttgacctctctgagcctccgattccttatctgcagtgagccttctcgtggcgctggcacaactaaaacatggtaaacatcaggagcttaagcagagactggtacacagtaagtgctcaataagcattgactcatcgtacttatgctcctccctgtcctgaaacgtgtccaaatcccaccaccacggaagacttcccagatagaggaatgtgctctgtgtgtctggattccaaggctcattgcttttcccttctgctcccctgcccatggcgttgaacctgagtagctcagagcaggaagcagaaaggactgagtgtcccagaggaacagccctgtagactagaggattgtgccccagggcctttgaggctttgaggtcagggctgcaacagactggggagccggtgcggaggcacagatgaggtcaggtgggtgtggagcttagtcaatatacatgagcagggaaggttggcacaccgaagcactgagaaaagactcctgtcctccctgtgagtgtaggacacggaagctgtgccccagcagacagcgactcactcccctggtactgggaacagaagccgcggtccagatgatctcaaggggagcatgcgcagtgaatgtcctggcttgaccgtatggactgtgctgttgtttcttgggatatcgagtgagaagctgaaagaccaagtcagtccctgggctgcagcgactcaggaagcagaggccgagtgggcaaaggtgctctggctcttagtcacctggctcagctctggccctaaagagccgtttgctctcaagttagccgacattgctaagtcacacccagacaggccctacccaaccccagcccagcccatttccaatagtaagctaactgtgagcctagggattcccaggaagggttacagctgcctcggcatgggcctgaaggtacgacccactgattgttgtggtcccgttttggtttttaactctggactcatagatcaacgcccctggaagtgtctagaatgggcagccttgaaaagtctgtcccggacttgctacttctcatgagattctggtctttccctgagcaactctggggcctgcctgggtcagaattatctgtggattggaagagcctccaataagtgtgatagatctgagaacgttttgttaagctgggctgctccagtgtctaccgtatagctgtacaggttgctcacggaccatgaaggcctgtttgagaggattggtgacatccaaggcttgatttttccttagtcttgaggcatgtatagcagggagaagaggggagagagtgtctgagaactgagggtgtagagaggctgaggaacctgggcctattcattcgatgagggcagccccatcactaagtcaccctggcttgttcttactgctgagaatccagtggtcagggataagaaccatgctgacaccctgagttgaccattccctggctgacagggggctgggggtggggcttggggaagaatgttctggagtaatactgggctcctcgggctcctcggtcttagtgagcaggtttgggagtgtgccggtactccagaggattggggggggggggggaaatgacctctgtgcacagtacaatttgctcttaggttctgacagtgactctaagtgggaaaccttgccccgctttacagagtacagaggaggaaggacctgcccaggtaacccaggggtccactggaatcaggcccaaaacaaagccatttcctgcaataactctgatacccacaacacctgggaaacaccgtgtctggcacagctcatggtggtccagaatggaccagttcccacatgctcccttcctgcttgtgaacaaacagcttagaaagatgctctagagcccctgagaaggcctgtggctgttcagaagatctgagcatctggaagtgacccagtccacggtggtcccttgccgggaaggaaggaagaagcccctgtcacctcatcctatagggacaagaagagtgcctatcatggtgcctattattagtgctgtggaaggcctctgtgaagacatatggccactgctctattacatagacacactacccaagccatctttattacagtgaaaatattagctgggtgtggtgatgcatgcctttaatcccagcatccaggaggcaaaggcaggcagatctctgagttcaaggccagcctgctttgcagagcaagttccaggacaaccagggctacacagggaactctggaaaaaaaaaaaaaaaaaaaaaaaaaaagaaaaagaaaaagaaagaaagaaaagaaaaaaataattaaagcattcaaagcagttctatctaacagggccctcaggaggtagtaacagatcttggtacctatggggaactgaatctccagagccttcatgtgtcccagacacctgcaagacttggacaccctagcaagctctgccacccgaccagacaagagagaatacttcagatcctgcgcctctgctttcctagtcctggcacatggaccagcctgagattatgcctgtgacaggcgggccttcttccagacagagcaggaagcagggggccctacttggcagcctacagggatctcaggggatccagggtgaaccctcagaacagaggagcccgcctgtgtggccactagcagcacgcacggggactgccacttatctctgccatcatcaccagaagggaaccttgcaaaaaagatctgtggcgcagagtagtgtacaaggcaggcatagaaagaatgtgagacggggaaagcccagagcaggagcaaatgtggctgtgttctctggctacctcactgtggcccagtgctcagtgcagagacactgatgctgccctactacgttcctgctgactcccagctattacagctgtccatgctcacaaactcacttggccatccttattcagaggtggcctctgggactgtgtgtctaagatctctgactgaggacgaaggttgtagaggaggaggtggggaggggactcgtgaccccagcagctgggagatgccctcacggatggaaaaacaggcgacctaggtggttatcatcatcatcatcatcatcatcatcataagttttaaaagtaatggaataatataaacagtgaaatcaaagatctttaacctctaaaatgccagatatgagctttggaaagttctagaaggagacacacaatattgtcactttgaaggacttgtggagaatgggtttaggagtcctgatattgatattttttgcttttgtatttcttatgatcacacatgagtattcatcaataaaagcaataatttgtgctaatgaagcaaggtacacaaaagccagaagaaaagcaaagtcccaaagaacccctaacccaacatggagcccaagttctggggcctgaagaagctctggctgtccttgttccagtgttctctcactctgccagcagattgacacctctgcttgcctccatgacaaagtcgtgtgtgtgtgtgtgtgtgtgtgtgtgtgtgtgtgtgtgtgtgtgtgtaggctggatcaaaggctcaggtcttggggtgggcgttaacagtggatggatacagtggccggctctgcctgctttgtgagggctggcctccctgccaggctcttgctacgctgtgtgcctcacacagcctgcctgggccatgggagctggcaagggacagcagatcacctgcctcaaatgccattaatcttgtgtctctgcgggcccttgtcatcctatgccagcctgcctggcactaactgtggtggagaaggacatgacttgggccctgggcttctctccatgggaggccaggaccctggaaaataccatctgccttgtttgagtcttctgacacccattccccaggtcaggatgcattaaggagagtcctgcctggtgaaatctcattgttatccccttggcaagaccttatcattcaaggtcatggctataaggcacccttagagtcgcctgtgggtccccactacacatacctccaaggaggcttccagaggatgacctggaggctttctgcaactagctgagcagcttgcacatggagctgcagagattctagtttcctgctctggctctccctgtctagcttatcctttccccacagattgaccaagtgcagaccacaagccatctgggtaccagatagatggagtctgagcctggccatgaatatctcagcagtagcctaggaactctatcttctttacgctaagaaagccaacattaggtaggggctggagagatggctcagcagttaaaaacatcggttgctcttccagaggatctgggttcaattctcagaacccacatggcagctcactattgtctgtaattcagctttgacaccctcataacagacatacatgccggcaaaaccaccaatgcacataaaataaatcttttttttttttttgccaaagccatctgcatggtagagatacgttcctgtaattctagctcctagccctcagaacccagcacttgggaggtggaggcaagagatcagaagttcaaagtcttcctctgctacatatcaagttggaggagagcctggactacataagacccagtctcaaaggagaaataaatgaataagcgttcttgtttatgctctttaccccgtagaacgacctcttcatccgggtcaatgcgcactgttgagggagcccctggcatggtctcaccatttcactcctgatgtttgaaatgtggacagtacctcctcagcctgcttgtggccattggaaagtggttctgtggtgggggtgggggagatgggaggtaagcacaggtgtgttttactctgccccaggcacactgcagcgtgcttaactccctgttgtgcacgtacattttccttatcatggtgaggggtcgggagatggagcagtggtcccaaaggcacagagctggtttctatcacaagcctggggatggagagatgtctctgtggttaagagagtttgctgtgccagagaatctgagttctgctccaaacattagtgtatggccgtttacaactgcctgctaaactcgagcttcaaggaatctaatgccctcctctggcttctatacacacacacacacacacacacacacacacagagagagagagagagagagagagagagagagagagagagagagagagagagcacaaaaataataatgctttaattcctttttttttctttttaagagatttatttattttatttacatgagtacactgtcgctatcttcagacacaccagaagagggcatctgatcccattacagatggttgtgagccaccatgtggttgctggggattgaactcaggacctctggaagagcagtcagtgctcttaaccgctgagccatctctccagccccccccccccccccttatttaatgtcaaagcaaggatatgaacccaggtccactctggtccaccatgctgggtgcaccctcagatgacgattcctgtatccctctcccacctgatttaaattttgctcacttatgtagtgtggggtgcacatgccccagcctcagtccacaggctgaggtcagagaacaactttcaggagctccctgtgggtcatggggatggcgcccggctcatcaggtttagtaacaagggctttctctaactgagccatctcaactgcccccacccccattagacagagtgttgtgtatcccaggccctcctcaagcacaccatgtagcctaggttgactttgacttctgatccccctgcctccacctcccaagtgtggggattacaggtgtgtgccaccaaacccggtttccagggaacaggtgtgtgctttgtgcttcatgcaggccaggcgaatgagtgcctccttttgtgacattccctccacgccccaccccgctagagttcagaggccacccagagagtgagaggtctctgttttgctgctcacagactggacttgtcacctattcctagcaggggtccagtgagtgacagccttagacatcactttcccagcagttactgtgggtgccagataaattacacatggggcccttgcaacaacccctgagacagaagcacctctgttccttgtttcaagatgttgcaaatacagcgtggagaggttctttgactggcccagcgtggctcagcattacaagcacagagcgagactcaagcttgagtctggctcactagccgttcctgtgttctgtacagccagcccgctggcccccgtttgcctctttccaggcatgcccaaagcacagatgctgatgctgtggaagggactagtcaccatggtggtgcttaaaagtacaggatgggacagtttgtgggtggactggttgatacttttgttgcttttgtttttgaaagggaattttgctttgtagcccaggctggccctgaaccccaggtagtcctcctgccatcacctgccaagggttgcaattacaggcatgaactattgcatcttcattgattgttcttcaattcggggtgaaacctttgtttaaaaagaggctttgggtaatgtaaagaaagctccccgtgatggggtacaaagcctctctgggagctctggactcttagaaaggccttcatttgtaaccttgtggactcacttagagagtgggtatagcaactagctcataggagaaccaaggagacaaagcatactgtgggtaaggtatgttagacccaggtctggggttctaacagccccttcctccctctcacccccatattccctgtttcttaccctcactatgagcattgctccaactaatggtgaattctttccaggaggtggggggcagggtggggttaatgtgtccaaggtcatttataagacacggctgggggattaggtaggtgccaaagcttagcaaagtttccaggacaaaaagaggctgtgactctttctcagagaatctgacccccaaaggcagttcccaaaagaagcgtcaagaatatgaccaaaggcagcatggctgggaacagagatgtccaaggtgaccattttgaaggggactgcactctccaggtatataaatatcaccggtcacaatgggtctcctgacttcacagtcacagtggatgtcctggaccagctgtccctgcttcgtgctgtaaacttggtgggagtccgtgtaagtctccgagggaacaattacttcatgagtagctgtggcagccactggtcaggttccatccagttccatgcagaataagcgatggcccagcaagatatctgtaactttctcatcgcacctgcaaattgccagacagaacccacgctggtttggcctggaggaccaaacgagccagagctcatggagcttgctgaaggcggaggaaggatgcttagcacagtggctttcctgctccgagcccatcctctgcccttgacaattagcctggcagtgggaccccgagtgggcagctcaccccccttttctcgtactagcataagctggcattatccttctggaaaaccttctagaaaaatcatttggagaggcagagacctaggagttttgaataggaatgtaacaagcccagagatgacctcaaaagcaggcctgcaggtttgagaacagaggtagaacattgaaggcaaagaattttccagaactcacttcagctgagatgaccaatggtctagttttattctgttgatgtgatgaattctgaccagacacaacctggggaggaagggattatttggcttatactctctggtctcatcactatgggaattcagggtaggaactcaaggtaggaacctggaagcaggagtagtggagggatgctgcttgctggctgaacttctggctcttttacatgcttatgctgaaacaactttccctccctccctccctcctttcctccctccctccctccttccctccttccctccttccttccttcctacatttttgttttgtattttgagacagggtttctctgtgtatcctggaactcactctgtagaccagggtggcctcaaattcagaggtcgacttgtctctgcctcccaagtactaggaagataactttcttattacaaacagaccacctgcctaggtatggtatcacccttagtggactgggccctctgacatcaattaatattcaagacaaccccgccctcagatgtgccaacaggccaatctgatgtgggaaggtcctcatttaacgctttgctctctgctctagactatatcaagttggtgattaaagctaagtagggtaagcaccttccttattttggcaggtaaatggccttttttttttttttttttccatgaaggatggctgtgtgggcacctattcacctttaatgttgttacttgacacagtgtcatccctgtattaggggcaaagttgattgaccgtagacagagagggtaatgccctagagattgaaagataggggaatcctctcacccaaacctagcaaccagaagctaggtgaggccatgtagggagctcagaacagaaagcaaagatgtgggaacacacatttgtgtctggtgtccctgaaggtccacctatcctgcagggctctggcctacctcatgactgtgacctgcctttctgtgctgagccttcagctggttggccaaggcccgccaacacttgggatgacagcatgctttcatttgacaatgtcaactttaatcttatccagttaaaccttcaaagaaatgtgtaaaacaatggctggacaaatatgttgacattctataggccagttgagttgacacataaaataaagatataattagttaaatgtatttgtgaaatactataaactatataccatacctctgccttttgccttctaggccctgttattatataaaggctttaagaaattccatgccaggcgtggtggcacacacctttaatcccagcactcgggaggcagaggcaggtggatttctgagttcgaggccagcctggtctacaaaaaaagttccaggacagccagggctatacagggaaaccctgtctcaaaaaaacaaaaacaaaaacaaaaaacaataaaacaaagaaacaaaaaaagaaattccacagtgccaggcagtggtggcgcacgcctttaatcccagcacttgggaggcagagataggcagatttctgagttcaaggccagcctggtctacaaagtgagttccaggacagtcaggactatacagagaaaccctgtctcaaaaaaccaaccagccaaccaaccaaccaaccaaccaaccaaccaaccaaacaaacaaaaaagaaattccacagtaaaacaaacaaaagcctgtctgacttatttacttcaaataatttctttttgtctgtctgtatttctttctccttaattttttaaagatttatttattattatatctaagtacaccatagctgtcttcagatgcaccagaagagggcgtcacatctcattttggatggttgtgagccaccatgtgggtgctgggatttgaactcaggactttcagaagagcagtcagtgctcttaacctctgagccatctctccagccgttctttctcctttttaaaaattctttttcttaagacaaggtttctcggggctggtagatcaggctggcctgaaactcacagaactctgcctgcctctgcctcctaagtgctgggattaaaggtatgtgccaccactgcctggcactagtttatttatttgaacatggtacattttggggaaaagaacatattaagtcccatcgagttgggtccaaggcataatataccaggactgctaactctggcactgtgtgtactcagtgttgctcagagcctaggtttggcttctggcttgctctcttccatgctttctgctctgctgtgccaacctacgatcaaggacattgtgcaatggaagctcccgggtccccctcatgatctccggacatctagaagtgaaaggtctcagagaatttttaagagttgcttttggtttttgaaacaaagtctcaccgtgtagtccagcctggactagagctttcaggagcatcccaagcctgcctctgcctcccagcctctgggatcacaggaataaacccccactcctggctcggcacttgctaggtactcactcaggcctgaatgctcagcctggcgcacacacaatcatctttccaattagcctttgaggcccacgagagtatcctagttgacagataaacggactgagagaggctgtgggattttgccacccgtcaggttttagatcctgacccatgttgagttcagagcagtgatctggccacagccttgcccgggtgggtgtcatgggtaagggcagctctgcagagtaagggagctacccagccatactgtttgggtgactcagttcatctgaaagcccttggtcgacaagcaagcgctttggtagcagaaagggataggagagaaggtcagggctggggtgagcctagggctgtgtactaacctgatattcccacacccagaggcattgtcagaaaaataggaacactgggcacagactgtcctgagctgccatctgcctcgctggtgaaagatcttgctgagttctggtttcattagctgtgtgagggaccaggattcttcggaggcaaacatgacaatgggcagaaagaccaactaatgaggggcaggaacttctgatctagtgctaggtgtatcttggagaagtctgcctactctctagcacccagcgtgttctctgcttgtgccctaagtattctgattttcatgagagcattccatcaagaactatgtgcgtgtgcaggtgtgcatgggaatatgtgtgtgtacgaaccatgtgtatgtgagcatgtgagcctgtgtgtgtgagcatttagtgtgtatgcatgtgcagccaagttgtgtgtgtagatgtatacacaagtgactctgttacctgcttaccagggactggccttgccatcaaggttcccttaaatagtatatctacatctatagtgtgtagactatatgtagatatatccctgcctgccagtgaactttaaaactatattccaacagccttctgtccttgttcaccatctgccattcttacgactgtaaaaacacacaagtgctctaaacgtgcaaccaggctcctattatcaccacccgaacagcagccacatccccaatatacgaatgaataaccagacagatctggttacagggtgatcttttggtcagtattctagaattttgtggacatatgaactgttgtccttccaccagctcttcccaggacactgtagtttactgccttggccccaaccccagcttcttcttcactcttctgcacactgtgctccatcatgcagtgcctagaatcatcgtggccacagctcctgtctagtcttttgagtaggcctcatgatggtttggcttttctctaaaagcaacagaaatcattcagaaggaggcatttgagttggcctgctggctccttggtaaatcccaaccctagaagtgactgtagccatgaaacagttatttttgccaaatgaggctcatgcctgtaatctcagcacttgagttcaaggtcagctgggttacacagcaagatcttgtctgaggaggagggcagtgaagactgggagtggagctccgttgggagagtgcttgcttgcctagcattcacaaagccctgggtttcatctgcagcacctcacaacctgggtgtgacgatacacacctgtaatcgcagtactcataagttagagagaggaggattagaagttcaaggccactgttggcgatatagtgagctcaaggccaaccttggacccagcatgagggcagaagagaacctgggggtcctggaactggaggccacaccaacagaagtggaaactcaggcggacacacttctccaaagcaaactaagtgaggaagacgttaaggagaacgtaagttgtctggcagttggagggggaagagagttttcagagttcgtagggtcagtcctggggtaagagccagaggtgtctcaggtcagttttctcttgaagcaggaatgggactctaccttgagcctgtgagtccacaggctaaccagaagaggtatatgggtctggagagatggtgcagaggttaagagagatgtctcagggagtttgtactgccccttgcagaggacagagtttaatctgtcctcttagcaccaggattcttagcacccctgtctgtctgtagactcataactgcctataactccagttccaggagatccagtccctctagcctctgcaaggatccaactcacatgcacaccacgctacactttattaaaatataaataaataaataaataaataaataatccaacctggtctacaaactgagttccaggacagccagggctatacagagaaaccctgtctcaaaaaacaaacaaacaaacaacaacaaaagtgtgaatgaatgaatgaatgaataaataaataaataaataaataaataaataaaagctgtttctatagcagcagcacacactcatgagtacctccttcagagtgcaggaggcctattgtagccagatgtcaaatacatacagagtttagctgcctctctggtcttttcctgtcactctggacattacgaaccttcttataagaaatggtctttaaagggtggccttgaactcaccaaggtatcagaaaatgaccttgaattcttgatctttcttcctttacctccctagtagtagagctacaggtattcaatactgactgactgactgatattgattgatgatggattgatggattgattatttgagttttattagagttgcttacggagcatgggttaggggtggttaggggtgatctacaacagtgtggaaccttcctagtaactacactactgaacagaatatctctccctcccccaaaccattaactattaacctcaccatggagggtggggccttgtgagctcctccttccagattgatttttgtttgttctgagacagattttggatgctgacatgggtataaatatctccttctacccgagtgccatttgtagcttgaattttcttagaaagaatctcagaggccagcagtgggagcgcacatacataatcccagcacctcgggaggctgaggcagcagaattgctgtgagtttgggaccaaccagagttataacgtgagaccctatctcaaaaacaaaatacagtaaaagaaaggaaaaacttggtttgagactaacctccatgtcaagtttcaactcaccctggggtactttagttcttgtttaagaaagaaaaatgaaaaggaagaaagaaagcctggtgtggtgaccaagaccagtatcataggacacttggaaaacataggagaattaggagttcaaggtcaccttcagctacaaagcaggtttgaagttaccctggcctataggacactcagaccaaacaacaagaagaaggaagccattaatgttctacagacagataagcagtttaggagagtggggcatgaccctttgtcactccaagctgtcaaaagacttctcagtacaaaagtcgggtcctgttggggcactagggcagtagaatttgggctgaaacccttgcagctgatatggatgggaactgtgctgttctggaagtgtggcttctaggagtgcaaaggctcttcaggaagcgatacagctccttgaagcttccttggcctgtgtgggcggcctatggttctgtctggtctagccacagcatgggtgactgtggtacaggaccacaggctcctggcagtctagttctcagatagatgctaacaacgcatggagctgaggctctgtcagtcaccatccatgacagggcccatcttttcagtgatggggtatcaggcttgagatgtttacgtccccagagtgcctgggtcctggtcaccagacagctttgaggagccatcaggaagtgagaagggatttagtgtaacctatagtgtagggaaaaggaataagatcactttggctgagaatggttgttccagaacattctatttcctttccctgttgtccatattcccagttttcagttacacagctgcaagatcaggaaaaaaaaaatcaagttcttatctgaggccacacagtcaacaaatgaccatcaggtataatcgtgagatcaaaagatttaggggacagcaggcagtggaggtgtacaccgttagtcccagtattgggggacaccagacagtcaagatgtccacctttaatcccagcactcaggaggcaggaacaggtggatctctgactctgaggccaccctggtctatagagagagttccaggacagccagggctacacagagaaaccctgtctcagaaaccaaccaaccaaccaaccaaccaaccaacaaccaaacaaccaaacaaccaaacaaaagattttggagaaagaacatcctgattaactactgggtcccttcctggatttctggtgggcaaccttaagtgacaagagacactgtgggaagaagtcaggtttgggtgagggaagggaaggctgggaaggaaggaagaggaaggacaagggctggcaacaggcttttgcttgatccagcatggccattttatctccccagacttcactcaggcaggctctcagtaaagatttcagctcaataccattagtgtctatctgcagaggcccctcataaaactgattagaaagcgggcttttgcatgtggggtggggactgtgggcctaatcgcatttgggcatgagatgatatctaattccctgcatagagcaagcagactggggggcctcccctggagccagggaccccctaatttggtttgcgaatacattagctaagcaagctgagggcactccttaggggagtgggaacaaagcacccctggggcctgaaggagaggagtgaccactgctctcatcctgaggggtgagctgtgcccgacattgcccctggtgtatttctgatgatgagaggagcgggcattcaaaagactaaagcagccatataaggatgttgttattgattgctttgccatcttttgagcctctttgtgtattttcctgttttatttttccatataataataataataataataataataataaaaagggcccagaaaggtggctcacttgctgctcttccaaaggacctgggttcatttcccagcacccacatagcagctcacaaccatctgtaactcctgtcccaggggatccaatgccctcttctggtctctacaggcgcttgaatgaatgttgtgaccagacggacatgcagacaaaacagtcatacacataaaacgttaaaataaaatctttttaaaaagctatgccgtgatggtgccaagaagaggcagaggcaggctgatctctgagttcaaggccagcctgatctacagagtgagttccaggacagcctgggctacatagagaaacctggtctagaaaaacagcaaacaaaggaacatggtgagaggagtgtggttcagttggctaagtgcatgcctgtcaggcacaatgcccagacttcaagccccagcatcccataaaatcagtcactcaggaggtggaagcattcataggcagctttgtaaatctctccaacaagggctggcgagatggctcagcagttaagagtacttgttgctggggagtttttgtcaacttgacacaaactagaatcacccagggaaggggaagctcaattgaggaatttcctccatcagattggttgggggtggaggtgtggttgtctgtgaggcaggatctagcttaacggtagatgtaggaggctccagccccctgtgggcggtgccacccctaggcagatggtcttgggttgtacaggacacctagctgagcaagccgtgaaagcaaggcaggaagtagccgtcagccttcctccttgggctttcttcagtacctttcagctacctgctttgagtgcctgccctgatgttccttggtgatgggttgtgacctgggagctgtaagttcaaacccattcctccacaatgttgcttttggtcagggtttcatcacagcaacagagaaacaaagtagaacactgatttttccaaaggacctgagttcaattcccagcacccacatcaggtggctcgccagcacctgtaactctagattcaacagatctgaaacacaccacaaacacatatcaattaactaaaaataaaagtacctctccaataaacttataggagaaccctagatgttcccactttgcagatgggtagagtggaggctcaggttagctaggtgacaattgctgagtgacaagctgagtgacaattgccgagtgacaaggtctggtttcggatcctgggatctttcagtgattcaaggtcctcaatggtgtacacaggagactactgacaaaatgaaaggacatactttggctttcacttctagaactgttccttgctgttactttttggcttgtgctttctcagagtgggatggaaactttcaagggcttctttgtcagggtctcttttggtggggggtgtgctgcctttgatgagagcttaggggagtgacttgtgtgacattcaacagctttatctagatctgtcttctttcctgcaaaaagctgtgagttggttgagacaaaaggatgttcaggaccaataagatggctcagcaggtaaaaatgcttgcatcaaagcctgatgccctgggttggatccccggaacccaggtaaagatggaaggaaagaactaaccccctgccagttgtcctgtgacttccgcagtgcaccacaggaggatgtgcaaacacacaggagctagtcattactagtactgtgagcttccgttcctctagaaccctgccaccggtctgtttagacctcctcaggaccgcaggaggctggttttcctcttccctgtagtgaagccgttctctgatccttgtgtctcaagcacactcatctttttttttttttaaagatttatttattgattatatgtaagtacactgtagctgtcttcagacactccagaagagggagtcagatcttgttacggatggttgtgagccaccatgtggttgctgggatttgaactcctgaccttcggaagagcagtcgggtactcttacccactgagccatctcaccagccccaagcacactcatcttgaagcacactcaatctatgcccaacacaacccacccagctccatggctgcccctgtacctcctctctctctctctctctctctctctctctctctctctcacacacatacacacacacacacacacacacacacacacacacacacacacacacgcacacccttggctactggggtatatgaaaccttgtctcccagcaaacaaaaaaccaaagaacgagaagcgagaagccaggcccagcactggggacagaggcaggcagagctttgtgagccagggatacattacttccttactctgtgccagttgcttcttccgaagtgtaagaatacagttgtccttatattattctgctttcgatggcttatgtttaaaaaaaaatgcatttacgtggtaagacagtattgctttaaataaaattagcatcatgccaaggtctaggagaggcccaggaagtgtgacttctcaccccgttcccttactgtaaactttaaattcagagactggccaatcatggtgtacactttaatcccagcactcaggaggcagaggcaggcaggtctccatgagtttgaagccagcctggtctacataacaagttctaggccaaccaaagctctgtagtaaggctgtgtctcaaaaacaaacaagccaacaaataaataaatagaaactacttttactttctctgtattctgtatctgattttaggttcttcttaacacaattattgagcgcttgcggtttgctcgctgggcatctggttgtatggtggggccgcaaggttggacagtccctgaatggagcttactctggaatgcctgagtgcagagaggagctgtggggaacaacgggagcgggaggggctgggtttgggagtttggggtaaccagtacagaatggactttgcgacttgtgatgtgcatctcagttttgcattctgagaagtttggaagatgtgtatccacctggctgataacgatttttgtcctgttggggctggaagcactgagtcaggcttcttccctacaaccaagtagcgccaaccccctcaccaccctctctttgctccctccttctttgggagcctacaggctctgaaatgcttacagacctgcaggagcacaagcttcctgctcttgtagtgccctctgcccctatcctactacaacccacgcctcctggcaacctgctccgtaaaggacagacacatcttatcatcctttatccagaacccatcctccgccccacccccaccccccagtgaagaaaggtttgtagggaccaggacaccccagcctgaagctgtgctgtaaaatcctgaattgcgtaacagctgcatcatggagcgattattagccttacttaaagatgttccatttgcatgaggattagctttgcggtcctttaaatagctagctagctttgctgaagccttccttgatgctgaggagaaaggaggggctggagagaaaaggggggcctgtgaggcaagaggttttgaggcagccataggcctgagagccttcctgtcctctgaaattcaccagctagtcctattgcctaatgacaccttcttatctctcaagcctggcctcacctcctccaggaagcctcctctaacctcttctcctcaagagtgcaagtggacgcttctctgtgaataatactgcattttgtgacccaattggacacattaggacactttaccacctacctaatggctttattgtcactaattatctggtggtttttttgttgttgttgttgttttgttgttggtggttttttttttttttttttttaagatagggtctaaccaggtagctataattggcttggaactcactatgaggctacataggctgagttcaagcttagggtaatcctcctgcctcagctgaagtgagcttacctggcttccctgaacatctttaggtgcagagcctattgtatttgactcaataaatgagtggaacatcaatattaaatgcataatacctactgcttgtaggaaggacatgtgtttccccatgggtgtaagggatgtttgtggagaaccttgtatcgactcccacaagaccaagagaacaccagctctgctctggaaggtataagccctccaaaatgctatccgtgactcttcccatctatagagccaagtgctcactgaataggttttccattacagacctcagcatagcactgaatccctgcatgcccaccatgaggctttcttaagcctcgtgtcaccatggcaaacgtcaaacttatccctgctaagagacagactttgctccaccgctgtgagctgggtaaactcctcactcttctcacgttctgttggtttttctgccagatgcctccttctccaaaccccactcttacattttgttgtcatgtctcttgagtcatccctggtccgtgacattttctcagttccttagttcttgtgccactaatagttttaaggcacacaggctaggtcttttccaactcttaagttgtgatgctgaaaggccgtgaaaggttaaagttgaatccagaactcagaaacagtggctctttaggagttctgtgggtgggtccctggagcagtgatctgcagatagaagttcttagcctctccctaaactaaggtaataaaatgcagatggggaagactgagagggtgggacaactttaatggaagttgacactgtgcaaggcttttgaagataacactctaattcagtccacacaacacatattctacccttggttttgttttgttttttaatggcttattccggtttgaaaagaaaagctgggacttacagaaggtcaagcaaggactttctggaggtaagagggagagagagcaggcaggtatttgaacctggcccatgggccctggtgttcctcccttctcatgggcaaaaggttcctgggtgttgtaagtggcaaagccttgcctttggctcctaggccatggtccctggcccctaactcctggaagcatggcattttgactggccaggcacaaggaatagaagacagtaagtgtggattcccagtctctgtctgtcatattgactccagccattgttttatccggcatttgattctgtcctgtgggttttctctacctttgggtgatttcactttttgtttgtttgtttgtttgttttttcaagacaggttttctctgtgtagctttggctatcttggaactcactttgtagacaggctgacctcgaactcacagagatctgtctgccttggtctccggagtgctaggatcaaaggcctgtgcctttatgtatgtgagtacattgtagttctcttcagacacaccagaagagggcaccagatctcattacagatgattgtgagtcactatgtggttgctgggaattgaactcaggacctctggaagagcaatcagtctgtgctcttaaccactgagccatctctccagccccaagcttgggcatatagaacactgtacagatgtcaggttgtttgtttgtttgtttttctggtgtccttacaacaggccagtgccatggaattatttcctgggaccaagtttactggtgcagtatctaaggctcagtggcatgtggtggcatctgaggtattgctgcagagctgggagctcaggctggacccccaggtcctacccttgctgacatgactggcactctccttcctccctctcatgctgatttccccagaagcagcgcctcagtctcttcagtgctggcggaggataaccacctccatctccctagcttggggcaggaccacagccacaaccagcagcatccctgcaggatgagctctgagtcccgagccagccataattgaattgcggaataccattttgatggaaccaaccagctgttaatttatcagatcaatagttaaacgccgggggtcagtcagtggtgagtgacagcgtagccaagggcaatccttgctgccccagcccatcccacagcggcttggattagggaggccaaagccggtgatgatgtcactcctgcctccccttttcaagtgataaagtagggccaggagatctagcttagtgggcgagtgcctgcctagcacacacaaagccccagggtcaaactccagcactgccttaaataggcacggtggcacaagcatgaaaccctagctctcaggaagtaaaggctggaagagcagaagttcaaggctatgctcagatacatagcatgcagagcatggttgaaggctagcctgggctatatgggcttatgctctgacaaaaaaataaatattacaaatagggtgcacacacgtgcacactgcttcctcattctcttcttgtatctggttcactttgtagaccaggctggcctcaaattcagaaatctgcccagcttgagatgtctagttttaatctggcatgttaattatgtaagtcaaagggggcttttgattgctggacctcagtacttcaataactgaaccttagcggtcagcctcaggaggaggaggaagtggccaaaggaagggatagaccctggtgtctagctttaggaatgtaatgttttttagcaaggcaaagggaatgggggaagaagggtaagtaaggtctgtcagagccacgtttgccaaacctgggcctgttagagcccttggtacttcaaatgtgaagtatctaaacagagattattgggaatctgatagagtgagggggaggtagatctgatagtcactctcagaagactgggggtccagcctctgtagagcattggctgtcccccttctcagaccctgtttctgtactgatactcagcctgtgacctccacatcttctcgggactatctgaagccagtttggcacaaccagttctcagcctgtccttattacttcttattcaaataatacttgtctatgttttagttagggtttctattgctgtgataacacactatggcccaaagcaacttggggaggaaagactttcttatagcttgcagtccatcatccagggaagtcagggcaggaagtcgggaagtaggaactaatacagaggccatggagaagtgcttactggcttgctcctcatggctttctcaatcgtctttctcatacacctcagaaccaccagcatagaggtggtgccacccacaaagggcagggcccttccacatcaatcaaccaatttttaaaatgtaccaaaggtttacccataggcttcttttctcaactgaggttctctcttcccaaatgactccagtttgtcacaagttgacataaaactagccagcgcagtctatcagagttctaggcattggtggaaagcaagggagaagccaaatggaactcctagtctcatggaagaataggacttgatctacgcagccagaatagggcaggtggctgtaccttggtagagccaggaactggtgtggtgcagacccttgaccccaatcccaacacaagtgagggaggaggtgttgtgtaacaatttcctctcattaaaaacaaacaaacaagccgggcgtggtggtgcacgcctttaatcccagcactcgggaggcagaggcaggcggatttctgagttcgaggccagcctggtctacaaagtgagctccaggacagccagggctgtatacagagaaaccctgtctcgaaaaaacaaaaacaaaaacaaaacaaaccaaccaaacaaacaaacaaaccattccctcctgcagggaggttccttaagcaggtaaacaactaaaaagtagccccaggaactccctgaaattggtaggattcactaggctcctccctgccagggtgaataaaagcagagagttgcttaagagaaagtaaaagttaagctgtcaagaagactctcccaggagaacagctcagagttcttggagatcagaccagctgcctggaggaggttagaccgacaaccacctagagaggacactctccagcttgttgagctgcctgcaggctatgcagtgtgttccaggttcccagcttttgggagcgtgctgggtgggttttggtgatgcagctgtctttgagtcatctctgctcctgtgagtccttggttcatcaagctgagctttggtggtatccgtactttgctttgttgtgggttccctttctatctggggtgagaagaccaatgttatatctctccaaggaaagttttgtctcaccgcagaaggttatcaggctgagatggggcaaccctgaaggcaagtggacaggaaaaaacagcagaggcagtgggctgatcttggatggtcccaggctgggtaaaattccttgtttatgagtatgggactgtcccctttgtgcaataacacactttagtgtttctctgactttgcaacccctgccaagatattgactctttccctcctgggcctcaatttcctcagttgaaaaatgggaaaacaagagctaggcacagtcacacatgcctataatcccagttgatggtagggctgagacaagaggattgctatgagttccaggccagcctggtaaatgaagtgagttctagaccagtctggctatagaatgagatcttgtctcaaaactgttaaagggctagaatgagtgtgggaggcagtaaagagcaagggagtgacagagcccacctcagcaaattacagtgaatgaacaacctcatacatatgtgtcctattcctggcaaagagcaatccttctctaacattgtcagtgatgctgttaccaagatcaatcctggactgccagttgactgcagagcctggtcccagtctgaatgaagatgctttctcatttgcctagataacacaaagattaaaaattggccaaggaaaagggaagaatgctgagccccatacgcagctagtgtcacctgtgctgtgcataagggcacatagaaagggccacttctgagatcagagagtggatagaagtgtcctctcactgagcttgcacacactgcttttgaggactatgcatgagctggcagtagtaatacacatgagaatctggtttgtggcaggatggggcgacagctggggtgtgaggggaacagaggtcggcagtgtgcaccaagcaccttaagtgctgacttctctggctgtccctgggatccatagacagaactacagtgcctagggaaaagaaggtgcctgtcattcattgctatctttctcagcactggtcggagctaaccaggagagctcttccactttaacagccatgggtctccctggccctcctgcagcagagcttcccctgaatagcttcctcctttatttaggcctctagtagtgaaccacctaatctgagaagtctcctctctgggcacacccattgcctgttctttaggatcctcatcactgactgaatttgcaccatgtggtgccttgctattggtattaggggcagcactggctcttacatcctatagtcagagtattgtgattgtaacccaaccagaagtgggtcttgttcctctaccaattcagggagggtgtttgacagggaagctttatcaggtgatctgtgtcccaggatccttccacattgtgactctgctatctcttgagtgcccttctgaatcctctatacgtggcctgctgatgggacatggagaaaggggatacagggacagagtcagggaggatgaagtgaagaacagagtgctctgggagatttttatgtgccaataggagagtggcttacatcatctgcctgttcttatttcattggctaagacctggttgtataaactgatgacatgtcactctgtggtgtggtaggggaaggtttttttattgtagatatgagaacaagaacagccagaggtatctggaagagtccagatcagagaaagaaaaaagtagcctgagtatatatagccagcagactggatacagccaaggctgtccgtgagagagcagagtaaccatggatcaagagtagagagggctcagcaagaggagaaggagcagagcatggagaacatggtgagaatagtagggttatatggagagtgagctgctggggggaggaagcccacgagctggagggaagggaagaggtgagaagggctgggatgccagcccaggctctgaaatgtgaaacagggacttacagagcctgcaagccagcatggactttgatactgtagaggccacaggtagccatgtgtcccttctgccagaggtgaggaaaatgattccctttggaaaaggggagctagctttacatgttcctgagaaacgctagcttttatctatccaccagaaaatcctcctgtggttcaggttgagctcatttctggatagttggactgccttttggagtctggggaattggttcccctttggacctgacactagtcacatggttacttccaatgcaagggcatctgggaaggaggatggccattgggtgagctctttgctgtctcaactgcattttgtgtgtgtgtgtgtgtgtgtgtgtgtgtgtgtgtgtgatgtttcattgcattagtgacatctttgaggaaaagccccgttattttctgaaccaccatttaaactacacctcatgattaacttcaggtgcattctcgtcacccagatggcaaaatgtccggtgagggcggggcagggaatgtgctgcctagaattaatgcaatatggtattgtctgccctggagggcagaggcctgtcaactttgatgactagaggaacaaacagtaggttgtattgtagatactcaaagaacagccattgaatcatgctttcaagggcctgaagccccctgtgtggactcacctcagggatgaagccatgctccatggtttgagcagagatgcagcagaagagcctcccagaattctctgcatctgactcttgttctttgttgctgccggcttcaatagtctccttttccactgcacattggaaaggtacatggccttactcaacagtggaactctgtgccttgcaatccctggccctgaggaggcagctccaacaccagaagtcttctgggaggacttggtagcctgttgtgggtcaggtacccagccctgtcagagagagagagaagtgtgttgggattggacgccagtcagttccccagaagtgcctgaatgatggtaccttttgcctgtgggaactttctcagtggaagcagcaggtgtgtgagtctatgattaaaggggatggatggacagatatctggagacagatgcatggagagagggtaagtatagactttctcctcattgctaagtaaggatggcagaactcctcatgcggacgagaagctaccatgtgccagggtcgtctctgtgtcaaggtgttgattctcaagactgccctgagagatgtgcactctcgttcacacccccatgccatgaacgaggaagctgacggacacatcgagaggttaaataacccagatcatgaccgacagaactggggttcaagtccccactgtccaactccagttcagcgctaagtccccgcctgtggctcctgcgagaagaaagtcaagcgtattccagcagcagtctgtaaggtatctaggccacatcactaactgacccagggtgaaatatataaacaggttcaagaccggttgtaataattcacaaatgccatgtcgtcttcagtagtaggacttgagaggtgggatagaaacaattttaacatttacattttttgcattatatgtgagtgtgcccgtgcccacccacatgtggatatgtgtgtgtgtgtgagtggtttgttctaccatgagggtcctaggaatagaactctgatcatcaggcttggcagcaagcgcttttacctactaagccatcttgctggccctttgaagttttttttgttcatttatatttatttttatgtgtttgggttttggttgttttgcttttcggtccctttttttgttgtttctgttttattttgttttatttttgagacagagtttctctgtgtaggcctagctgttctggcactcactctgtagatcaggctggccctgaactcagagattggcctgcctctacttctagagtgctgggatcaaaggcaccctgcacccccccaccccgccccccagtgtttggggtgttttgcttgcatgtgtgtctgtgcaccaaatgtgtgcctcatacccgcagaggtcaaagaaagcatcatatggttgtggagctggggtcacagatcatctgagctgccacatgggtgttgagaatcaaaccatggtcctctgggctgaagtttcttaaaggtaatagtggccacctgcgccactggacagggacctcatagctgtcccaaggcagccactctgtctagtggtttcttccagacatcccttcttcctgctctggtgtatatggcctgaaaacagatggataaaaagccccaattgaaaggcgctaattacctatcattattttccctcgctgtaatttgcgtgcaacgagatttccatcagttgtctgggatcagcctggttttgactaatctttcaagcgacacggtacttaattacagatttctgcctgagctctggagcatgtgaaaggaggaaggatgtcactggtgctgttatgctgttaagcattcagttgtcctgggtcccagcgagccccaaggcgggggtgggggtgtgtgggaacaccctgttgggaaaatattcccagggaggggactaaaagtaaaatccagactttacagaggaaagtgtctgaatagcaaggtgacctggaatgatggcaggtgggtgtggcatcctctgtcagcttggtttccagggcaattcccccagctcaaggcatctaagccctacacttctggggccctgtctatcaacctgtctagtcctctagtggctgggacaagcaggtttcccaggctatggttacctaatctaaaagtggccaggttaggcagagaacttgagaacctgtggatcagtggctgctgctaggcaggtgtgtgcctgtcaaactcacagcaatgataaaaagcatcttctattaaaatgagcaattcgggctactagaattaatgaaacttccgaatttaagaaaagaactgcatctgtaattaatgaacatcagtgcatagaacctggatcatcataacgctaacatgcattatccttggcccacccatttcttctcttctccttcctcctcctcctctccttacttccatgtagtaagcaccaagaaagctgggactttgacagtcatttacatcctgtgcactgttaaaggcatgctgctttgagacagggtctaatggccttgaactttctgattggtgaggccagccttgcatttctgatctcaccacccccctccccccgcccctgcttccatcaccccagtgctgggattttaggcatgtaccaatgtgtccaaccttcaataagggctggttttaaagtgtcaggatctcatgtggttgaagctggtctggaactctctgtagagccaacctgctgtgcatcccttggcaggaagtttaggtgtgatcctcccaggtgcccgagggtctgaggctcacctaagggtccctggcttccggttaggtcagtgattactgagacgtgtgagtcagtatctcagaccccccccccccccaaggtggattcgaagtccaggtctgtcggtcctcttcatttgccaactcctcctcatactagtattttggcaaattcctttcattttaccctcaattttggatgagggtggggtttgtcagcgagcgcaagtcagctaggtgctagatttcaccggaagctctccgaggaaattaacacaaccgcagcacccgggctttgccggcttgggaccagtgctgtttggagctggttacctcctcagctctgtcatcgatacacccctgggaaatagaggctgttccactcatgagcaccccaggtccagagaaggcactacctggctactcagaaacaaacatacttggaggcaaaactggtatgcttggcacagatgtttgcccctgccctcaggtgcgaggcattgcctgagcagagagccagatggctgtagctagggagacaggtttttttttttcttttgtgactcagattctttttagtggtgggaagaccccaccccacagtagaaaacaggcaagccagtctagactgccttccacctgcccacccactaggaggtcacctcaagtagacctgtcccaggattcttcctaaatttatgagtaccagttctcttcccagcatttgaggttctcctggtccctttgtaggtaaagaatcttcagccctgtgtagtgatgtccagcaagatggaggccacatttaatcagagggtagtgacattgaggccaaggtggctcattgggctccagttaccagacggatcaaagagaaatgatgcctcgtggggcttcgaccaccaatgattgctcttgcaaaggccatgagatgggatgcctcttcccttcccacgaggagtcaatagttattgatccagccggtccccgatgagggactggcctgagcccccgcctagagcacatcagacttgcctcatactctcatcccgagacggtgcccttcctggacttgcgcgtggcaacctatccacagtcacctctaaaatcttttcatttttaattttcttctcctttgttttattttattctattttttactatgttagccctccttggcctaggactgacctgtataccaggctggccttgaattcacaaagatccacctgcttctgtgtcccaaatgctaggattaacggtatgtgacaactttttggagcagagtttccagcagccctggctagcatcctactcaactcactgtgtacctgaggctagccttgaacttctgaccctcctgtctctacctcccaagtgcagagttattggcaatcactgtcaggcatgagtttttgcagtatgggggatgaaactcaggccattatacaaactgggcaagcactctaccagctaagctatatgccccacctctcccctaccagctagctatatgccccacctctcccctaccagctagctatatgccccacctctcccctaccagctaagctatatgcccacctctcccctaccagctaagctatatgccccacctctcccctaccagctaagctatatgtcccacctctcccctaccagctaagctatatgccccacctctcccttcccttcttaatatcagtaactgacagaaagcgcagtagactctaatctgaaaatctgagatcaaaatttgcccccaaatctgaattcttgttttgttttgttgagtccaaggtatcatacacggctttcacctgaattgtatccgaagtagtaggcaagtatttctaataatttaaaacttgtagccattaagtcattagacttgtagcatcaggatagttctccaaaagtttgggatttgggggcttgctcctgggtttcatccccagaattaaaaaaaaaaaaagtataaaattactttctggcagattgatagcctttggagaaaataaatcccttgcatgtttagactttcccatcttccaggtcatattatttgtattcaaatattccaaaatctaaacaaacaaacaaacaaaaacaaaaaacctcaaatccaaaatactttttggtctgaggtattgcattacgaactactcaatcagtgatctgcagtctgtgttgagagaaatggggaggaagatttagtggggcggagctaaattagtggtcccgggaagaactgaattgcttggggaagactggaaagtatggactgttattcttaaataccttaaattctttccattctcagtgaatggcctctcatcccagatgagactcacaccagtccaaagtgcatcctgtccccacaccctgccttgtgtgtaagcaggtgctgctgacagctggtaaagaaggcacttccttccccccccctcccctaccctccccccatcctctacctccggcagccaaacttcctgaagaattgtctgccttcacttcccctctggccattgcaacaccacatccatccccaccataaaggtgagcccgctctggagccaggccacctcctaatgactaaaggaacagaggaccagccccttcttcctcggtttcaccttgtggccccatctaatgtgcttccagacagctctgaccattgcatttacagcaggctctttttagtcttttcagtgtgcatgtgtttgaagagggggtgcctgtatgtttatgggggctagaggttgacattgggtatcttaattataatacactttttttgtttgttttgagacagggtctcagccagaggaggtggcacacacctttgatctcagtactcaggaggcagagacaggtggatctcttgagtttgaggccagcctagtccacagactagtgagttccaagacagccaagaatatatagatcctgtctcaaacaaacaaacaaacaaacaaacaaacaaacaaatacttgcctactacttcggatacaattcaggtgaaagccgtgtatgataccttggactcaacaaaacaaaacaaaacaaaacgggcatggtgggtcacgcctttaatcccagcactcgagaggcagaggcaagcagatttctgagttggaggccagcctgttctacaaagtaagttctaggacagccagggctatacagagaaaccctgtctcgagacaaacaaacaaacaaacaaacaaacaaaaaacactaaagaaataaatgcaaagagagaaagagagagagggacagaggaagggaagaggagggaggggtaggtgtgggaggaaagtaaataatgacatcgttaaatcatatgcccctctactgggatacagatactaaatttctggctgcttatcctacaccaactctgactgagaccaggatccaatgaaggtttctgaatcaagacacaaggctggagaggaagccagggcttgggagcacaacctgacccctcgagtgtctttcagagcaggctgagtttcaaaactgggaaggcagtggaaaattgtggcccataccctcccaggagaagctgcagcctcccctcccctctccctcctggaaaatgcttcttgtgcctcagagatgaaggggagcaggggctcatagggcacactcaacagaagctgctactgagacttcctgtgtccggtgtaaattgggaaatctctggtgctctcagagcctttggaaagttgggtggaattacaggatttgtgagttctggttcccccaggccttcacactgagcccaaggtgctgtggagaggaacacagcccaaagcagtcaacagggaaagctagagagggtcagacattcagtcgagaggagtcagctgcccagcagaggaggacaacgctttaggccgtgtgctcagtcagactcccctccagatggtgccctgctattccctcaggataccttgttggtggttagacaaggtagccatacccaggaagatcacaaggcaccagccagagatgcagaaaggatccagaggagacccttaactggggacccgccgcttatgatgcagagaatggggggtgggggttcggaaggagaggattcccagggttaaaggaacattccatctagaacagtagggacctggggacccagtctttaccaactacgaatgtgggcttgtaagctggagtgctgggcctttagtgggcctttcattccaatacctgaagctcgccctctctagacaagttcatgtgcaggtgagtgagtgacaccctcaggaggtgtgctgagtgtcattgcactttagtgagaccaaaagcccagtcacattaccaactccgtggtctgggtttgaggctagaccaggaattgctatgtgggtgcaatgataaaggctccgtccccattccctccggagtcacccttttttgtgggcactttactaaaacgaggaactcacaagcaagttacctgcaagtggcacaggaggaacagaccgccacccacccccgcagctctgaggtcttccttcctacccaggagtctttctttctgtgttgtttcccctgctcttttccttgttctgggtgcctaagccagtacggactctctccactgaggcaggcctgggatcgaggctactttcagggatcatacctctagacagttttgtttcttggagacagggtctctctttgcagtcctggctgtcctgggatactttgtgtagaccaggctggccccaaactcgagatctttctgtctctgcctctgacgtaccacaatatttgagaccatctacttaggcctcctgcctcagacccaaatcctaactgaacatgtcgaacaaccaggttcccctgaacggtccttcaatccagtcccctttacgtgaacttggctggagagacagaactcccagtaatgggaaaggcatggttatcctacagttttcaggggtcccagatgatctgcctcattggtgaggccccaaagcattccagaaggttctgggctaacaaaacaaaacaaggtgaaaggatgatagtaggtgatgagcagagtgcttttgagctttatgtgagttaggggtgggtgggtgtttaatctctaaaagaaaaaaacaactctggctaagtattacatggtgtcatgccaggctttgaggagcatgcctttagtcccagcactcaggtggcagaggcaggcagatctctgtgagtctgagcctagcctggtctacatagtcagttctaggccagccagggctacacagagcgactctgtaaagttacacggtggtgcagacctgtagtcccagtttgttcctggctgaggcagtaggatacagagtaggatgggggggggggcttcatgcgttctcatggagacagcctttggggactgggggtgctggatgcaagctggattatctcagagctaagaaggaaaaataaaagccagagcagatcccccctccccggggcaggggcagagactgggggatctctgagtttgaggccactctgttctacagagcaagatcttggtggccagaactacacaaaggaaccctgcctcgagaaacaaaacaaaataaacaaaaaagcagaaaaagagaagacaggatcaggaatcatactttagatgggaccgccattatccagcccggaccacggggaaaaactcacttggtgccttttggttaaacggtctctctccgtccagttagaaaacttggcagtcttggtgactgtgaagtcctattgaagcaaatcccaagcttggacttcacagctctttgggacaggcacacggtcagcttccactttttgtgaggtaggcaggttggccaaatatttaggagggacagctaacatcttgccatccttaggccagcaatttgcaaaagacagggtctctgatttgaagtttacgaattcaaagtttcttagaactctgaagtcgcagacttttctggaaagcagctacagacctggccaccctcgcagctctcctacgtcatacccgtagacacgcccatgtggcccgcccactaggccatagccccgcccaacctctcacctcacttagaactgactcccgcgttctgtgttcgcaggctgctgaaccgaatgtcgtccgaagacaggcacctgggctctagttgcggctccttcatcaagacggagccatccagcccgtcctcgggcattgatgccctcagccaccacagccccagcggctcgtcggacgccagtggtggctttggcattgccctgagcacccacgccaacggtctggactcgccgcctatgttcgcaggtgcggggctgggaggcaacccgtgccgcaagagctacgaggactgtactagtggtatcatggaggactccgccatcaaatgcgagtacatgcttaacgccatccccaagcgcctgtgcctcgtgtgcggggacattgcctctggctaccactacggagtggcctcctgcgaggcttgcaaggcgttcttcaagagaaccattcaaggtgcgtggtgggcagctcaagacctggattcaggctttgggtgggggccttggtctacaggtctagttgggttattaattccaagtctcgtttcctgggggcagaggtgctctagaagtctcctgatctgtgtctctgggatcctagacaaggatttcaactctaagactcatagatataccatgtttcttcctgcttggtccctgaaacgccgtagaaagagccacaggaatacctgctcttggacagctctcaacacgcatgctgtccactgcatgaaccctccctccaaaagcctatttgtgtgtgtgtgtggggtggggtgggaggttgaggggaggaataggtgctactattatttgactcactatctcatacttttggctgtctttttgcttctatcttaatcacacctgtagaaaggtaggcccgatttcacgtgggcaggagctgactgggatcctggaagctctgggctatttttccatacatttgcatatcactagggtcacatgctgatagccctgcggtattcagctctttcatctccatgaatgtgtttgggagtcctggagcctccctctgtgcaggtgagtggaggataataatggtggatccagtcctcactgggcgatattctttctggccctgtggggctgggaacgagactcctaatgcttcaaacttagtggtgaacacttaactgacagctgttggtcagtcaaaacatctggcgagcacctcctaagcaccatctatgcaggtaacctacaagggccaattcctccagcctgggcggactcaccgccatacccaaagatgctggccattcctcccattctggctccccaccctcaccccccacctacatcccacttacctccccaccctcccatcccctactccccctccaccctaccccaccctcttgtcctgtcttttggcttcaacttcattctgttcaactagtctcacatgaccactctggaaggcattggctaagcttccctagggtgattctgtttattcaacaagcttatgtttgttaatctcattggataatgatctattagaccacttgagggcattaaatgttgggtatatttacagttctacttaaccatttggaggctgggctaacccaccaggcttctgggtcagactgacacttgaaccagctcttacctgtgagctcaaacgtgggtgtgctgcctcagttcccttatgtgctttacagagtgcgttttatttttagggttttatgtagccctctgtaggctcaatttactgtgtcagcaagactggtctccgatcgccgtctttaccttccaaatttccatgtgcagggactatgggatggtctatcaccaccacacctagattttccttcctcttcttcctttcctccttttcttttttccctatacactattgagaattgaacctaggaactgattgtctgtgcttatcaaggcatgcttgtagaagtcagaggacaacttgctggagcaggtccttcctttaacacgtgggcaaacgcgtatcaggagccttggcagtaagtgtctctcgccactgagccatcatgctggcccctagcttaatgttcattgctatttttacttttaacaatatcacttaccgtacacttttactataacatcaagtttcattgttcagaacaagctttgtcataggtgtatatttaaataaagtagtataattactttgatctaataaaatttagattactaaactattttagggcctctgagattgcctagtgtaaatatgcccgtcaccaagcctaatgacctttcggtcccagtgacccacgtggtgggtaacttatgacctcacatgcacacacacgtgcacacaaaataactaaactacatttagtccattgtggtcatgaatgatatttatttggtgttttgtgacaggatctttctgtatagtcctagctcagccaaaacacatgagacccacctgcctcagtttcctgagtactgggattaaaggaatacactagccgggcagtggtggcgcatgcctttaatcccagcacttggaaggcagaggcaggtggatttctgagttcgaggccagcctggtctacagagtgagttccaggacagccagggctacacagagaaaccctgtctcaaaaaaaaaaaaaaaaaaaaaaaaaaaaaaagaggactacactaacaggcctggccacaaatgattctccccttcctacagagttttgctctgtagcccttgctgtcctggaacttgctgtgtagaccaggctggcctcaaactcaaagacctctgtttgcccctgcttcccgagtgctgggacttcaggcctgtgtcaccacagtgagatatgaacaaaatctcccttagaatctttttgccgagccagcctgcctatgtgtaggctgaacacatagggccatcttgttgtatactaggagcagaggcaggcagtaaatgccccctgggctgctcctgccttgtagcccccttttgttgctggggtgtgactcaggatatggcacctggggcttttgctgctctatacccccacccttgggtggaggggacctcaaggtgaaatgaatggtatggcagacagttgtgtctcttgcttcagccggtgcctagagcttacattgagcaagtgctggccacgtatgtttgaagcatggcatgccaccgaaacacgggcttttcctggttaaattgggaagtgaccttgcaggtttgttttatactccttaaaataattttttttttgaaaatgggattttagaagacagtcacgttttctcctttccgtgggtttctttaaatggggcagagatattctagatccggtttttctagaaaccaaggctggtatgtatagacccagctcctctgctaccccctttcccagggacctagggaagatctgtaaacagtattaattacgtgctaccgtgaaaaggatacagatcttcttcctagaagttggctgaataccgtggcccttatctccgggagaggtctgaactcattacaggactcgctcctctccagagtcggggaaagctagcttgaggccagaagttggccggatgctctcgccttattaactctttagttttgtgctgacggaagattgctatcgccctgtagcccttgcgggctagctgttctgcctctgcctctcaccccgtggtcccgtggtttcgcaattctctgggatggtttgattgtttccaaatggagtcagcagcacaggagtgaagcaatcacctagacattcctacacagtacccagcaggaatttgagaccggagatgtagtgtctccaaaaaaaaaaaaaaaaaaaaaaaaaaaaaagacaatgctaagtgcctagggtctgcaggatctgcaggtgtgacagtcagctgcagaacacggcagctttctcctaagcagggcgatccagaccatttttctttgtgtgcacggtcagggagggtatttccaggactgaggcgctgtgtgggctcagttttgtttgtttgcttaacttttgagacctggttagcccagaattttgctatgtagtccaggctggccctgaattcatagatccagctgcctccttcccgtgagctgggattggagccagcacatgggaagtgccagactggaacctaaacttccttgagggcaaagctagagttctatggaactacacacctcagctgcgggccctcttttaaaagtctggctttgtgagctggtgtagtgatagaagcctctgaaaccctgggaggcagtgggaaagccagcctggtctatattagcacgtttaaggccaacctgggctacgtagaaaaaggcttagtctgtgggttgacatccaagcacctgtaaaaaaaaaacatctgtaggctctgagcacagcagaggccccgactctgctatcccttccagtttgaaatttctgtctgttccttcctttaaggaaggaagtttacagaaaccagcacgtgatgacagactttgggagaccacccctggtggttcatcctctgggcttggctgcagatgaagaaagaggggtggctcgcctggactagcgactagtgactagcctgccttcaacttttgtaaatcaagtagttgctgggacccagacactagcattgacttactgtccccaacacgtgactgagttgaaacagctgtctgttggaccccaaaagcctagacctttattttactaaccaccccttctagagagcaaggcacggtctgtcccccagcttctgccctttcaaatcaactccagcggtgtaagtggaatgtcagagctgggagctgttaggagcatagcccagaacagatgagctcagagataatcaaaggcaccttactgctgacagaccagtggctccaggcagagggaagatgggggtctgattgaatttgctagcatatctaaaggagggtttgtgactgtccaggacgattagcctgcccttggagcagagagactggcaaaggtgccctcctgcccagggaaagggaagctgaagctaggggcagcctgggtgtgatgtattaaacgttcatgtgatatgattaatatcttcctgattatgacctagttctctcagtcaagttatgaactttctagctaggtagacagatcagtttctcaagttacaggctttgtttctttctgtctctggggcttagacatcaggctcttgaacttgggcaatgggagtctgccccctcacagacaagcccctttctgtggctggtatcatctgacttgtggggccttagggatcagattcctgcctgtgacgctgaccccaatcccatactgatgaaggctgtagatgttaggtctgaagagcagctccagggccctggcagtcaaccttgaccacactagcagtgactgcctaccttttcaccgagcgggatccttcttttgcttttaaatgcatacgaaggcgcctccagtcctcaaaatgtcctcaaccctcagcctccctcccttcttcccttcctcctttcagttatttttagtggttacgatagaggggccattttcagtgaggttccctcttggagcctctaagtctttacccatttccagcccttaggataactcagacactgttagcactggtctgatttcctgagagggtaggaagcttagatttggaatctcgtgatgcaagacagttattttttagacagaacttcaaacttgcagtaattctctcctgcctcagcctcctgagtgctgggatcaccatgcacagattttgttgttgttgttggtggtggtatttttattacatttgtttactgtgtaccaccacagtttgtgtcgaggtcagaggataaccaccctgcgggagtcagccagccctctgtgtagatcctgaggatcccacataggttttcgatcatggcagcaagtgcctttacttgctgggctgtctccagtccttcaaaaattaagtgtgtgtgtgtcccaatgtgtaagaagccctggcaggcctcaaattttctgcagctcatctgcaagtggagagtggcgccacacccaactgatactttgttttgttttgagatagtctcctgcatcgctggcttccttccactttccaagtactagggcctgttttcatttttgaaaagctttcctgtgcgcattttgtggggtagactttatcgagtttgccctttgaatcttgggtctttgccagcctttcgagctacattttgagttgttagtgtttcaggtccctctatccttccgggttaattgaatgtgtgtgatgctcttgtttaggttttttaaaaaaagccataacacatgtgtgtgtgtgtgtgtgtgtacaccattaggaaaaattcttttacgtgttagtttccaggtgttgggcttaactaggcagtacagtgcttttgactcccaacacttcaactcacaatcctgagggtactaaaatttgcctcacatttctttgtttgcttgttgttgctgattcatgcaggtgaccagtgttgattgcagtcttcagacagtgccattgatttctaggaagttactgaaaggccaggcatgttggtgcatacctttaatcccagtactctggaggtagaggcagacagatcagagttcaaggccagcctggtctttagtgggagattttatgtatgtatatatatgagtttgtgttgagtgccaatcattgcactggggactgagccagggcccctactctagcctctccgatgtgacaaagaagtcaaggaacagactgagatggatcagcctttagtgacagatggagaccaaaggtgagggagggtctgggaagaaatagctctcagggtaagttgaggcccaggtaagaactctgggatccagtgctgtgagcagaggaaacttcaggtgtttcaaggaccaaactgtgactttgtgagccagtcagtgaaagcttcatctcagctgctccagaggccgaagcaggattgcttgaatcccggacgttcaaggccagcttggatgtgaggtatcataaaaaacatctccttaaaaatgatacttgtgcacctgggggaaggttgtctgcacatgcatgcctggtgcctatggaggccaaaggaggtcctcagatctcaggagctggagtgagaggcagttgtgacacacacacacacacacacacctttttatttgagactgattttctctgagtagcactggctgtcctggaacttgctctgtagatcagactggccttaaactttgagatcctcctgcctctacctcccgagtgctgggattaaggacacctggctaaagttgtgagccctttaatgtaggttctaggaacggaacttgggtcctctgcaatagcagtatgtgtcctgactcgctgagccatctttccagcggccacctccaccccttcattttctttcctttcctttgctttgctttagggataaggtctctttgtggtctcggctggtctagaacttgacatgtagagcagatcttcctgcttccaccttccaagtgctgggatcaaaggtgtgcattacctacgacctctgcactgattttttttccccaagagtgggaactgagagtgtggcctagtggtgggacagatacttagcatgtgtgaggcttgggttcagtccccagcgcaggaaagaagggcagtgtggggcacgaagccaatctgtacccacccagaccgcctggaagaggtgatcaatgcagcaggagtgagacaccctgctgacacctacctggatctgtcatttaagactaggagcaagtgaggagtcctggcttggagcgcctgcccaccagaggcacagctgcaggctcagctcagtggggaaagtctccacggagcagggctgagccatgactgatgggttgttctgtctgggaccacctccaggccttttgtcttagagaatgaggctggtaggtgaatcctgggggaacccaggacaggcatggggacaaagcccaggatctgaagcagcttgcaggccagtgacaagccagctggctgaccttggacaggggctcgagtcccctggcctcaaattccctgccatcagagtctgttaaaatggagccaccagaaaatgggaagagcagctcatgatcctctgttgaagaccggtggatgcactcaggatgtggctttgacttggtgagagtccaaggagggcagtttaaacaaattcacaatcatatccatacagttttgtgtttttgttttttgagctgtatccttgtgaactgtatccttgtgaactagtgactctttgaactttcatttctttattagcaagacactgctattaaatatctccgccccctcaagtgttattgctgaaactgagccatgggcataatgtgtgtaacttactgcccgcccggtttgtaatctctaggaaatgaacagttcactgggcttgacctaaggaagcgttgaaggtttctgaatagggaataagatgtcctcttagcaaaagaattttggcagtgatgggaaggaaggatctagatgccaagtatatctgagggaagaggatggagttaggtaccattcagtcagaggagagtccagaagggaggagagcggcagagggttcagagcacagtggctggtgacactctgctagaggcaggtgcaagggcatgtgggaaaagaaacatagatggtgggatcgaggctgaagggtgaggaatagaggaaagttatgaaatagataagattctggatgcacacaaatctgatcagttcagggacagttgagagacactggagtccaggaccatgtgctctgagctttaggtaaaaaaaaaaagagatccagggctgtggctatctctcgttgtgtgttgtccccccacccaccaccacctatttggcttccttggaaatgcaaatttagggtcctaccccctggactgaacaacttgtgagagacttgtgactaccacgcccagccagctctgtgggcaggtagggaggtggaggggtgatgggaaggaggggtgatgggaaggagggagggagagccctaaaaggagttgagaacaccatcccatcagttctgaaacactggctcgccctgtttgtggctgagcacgcacacctgtccggatgatggtgaggtgagcagcctcatgtgcacacaggaaactcctagaatctggggaagactgaggtagcagtggttgctcctgtaaaggaacagattgtccactcctccttaggaagttaaggcctgtgaactgatgaccttagtaagcaaatacaaataaaaaactccttagaaggagccaggcgtggtggcgcatgccttttaatcccagcactcgggaggcagaggcaggaggatttctgagtttgaggccagcctggtctacatacagagtgagttccaggacagccagggggatacagagaaaccctgtctcgaaaaaaacaaaaccaaaacaaaactccttagagcatataaatatatatgacagggtctctctacacagtctggctgtgctgaaacttgcactgtagaccaggcagggtggatctctgccttcagggtgctgggattaaaggagtgcacaccacactgcctggagcagaggttttaactggtggagttctctttttctttcttggcgccacattgaaagttcattttaagacctgtggtggcaccttcaaggtcaatggctacacagcaagtttgaagccagctggtcataaatgagaccctgactcaaaaatatcgagtgtttttaatcccagcatgcaagaggcagaggcaggcagatctctatgagtttgaggccaacctggtctatagtgtgagttacaggacaaccggggcagcacagggccatcttgaaaaaccaaactaaaccaaacaaaaccacaaaggactctaaagtccttacagaattcttcagttcagatagggagggagagcaacacagccgaattacatcagttgctgtcagtgggaaagatggaagggaggaaggaattgtcctgaaggccacatggacagacccagaactgggaggagattgcctggagggacaaatgaaggagtttggggtgtagggagttgacaggttccaggtttcacgggcgtcatagatggtattggttattcaggttttcccggagcctctgtgaggaaggataaggttaccctggtcagaggtccccgcataaagggctttgctctggcgttttgatttcttcctttgcatgaccgactgatatgctgttctcttagttcagagtttgcagaggaccaaacctagggctctcggcctgccaggtaaaaggcctctctatcacagagctacaccccaggccacagaatttcttaagttttcatcaggtatcatttaaagataactaaagaccatatagaaacactggttctcttttttaaaattggtgttccgctttgtttatcatgtgtgcgcccttatgccacagcgcacacgcacacatgtagagatcagaacttggaggacttggtagatctctgccccggaagtcttgatccttctcaggttctcaggcctggacacaaacacctttactcacagagctatcttatctcggtggtcttagaaatacaaatgtctaagggaagataagagcagagcccggcccatctcggtaccttatccaaagataatctttaaagaaacccaacccaaccaaaccaaaccaaacaacaaccaaaccaaaacaaacaaacctaacaacaacaaccaaacccctctagcatattctctgttactgtctttatcgcttccctccggtacttactgccttagatagcttaactttttcaaaatagggtcacttgcagttcaggcttgccttgaactcccaaccgcttagccctgaagttatagttatatgtgtgtgtcattacacccagtcttcctgtttgtctgtccctacccttgtccaccaccccccccccaatcatttcctccacttattcggttaaaacctattttcctgttttccttcttgctttgccatcctcttgtttctaggttaaatgatggttttggtttcttccaccttttgtagtttttgttccctgtgaggcccgggctgcttgagcatgctggagaggactcgcttcttttcttttcttttcttttcttttcttttcttttcttttcttttcttttcttttctcttctctttttaaaagatttatttatttgagtacactgtagctgtctaaaaaacacagtagaagagggcatcagatcccattacagatggttgtgagccaccatgtgattgctgggaattgaactcaggacctctggaagtgctcttaaccactgagccatttctccagcctggaaaggactgtatatatatttttttaacccttggactcctactatattcacaccttggtttatgtgggattctggctgactgtcaccaccacctgccactctcctaacctggacacttgttgttaaggagaaaagcaagggcagggaacgcgatgcaggtacttcccctgagagcaaagtgcagctcaggttgatctggggctcaccgtgtagcctgtgctggctgggaactccattccaatccttctgctgtgatatccccagagcttggctgacataacctttataactcttgcacaccctggaaatcggtagagatgcagttcccaggttgccctctctctggcatggggttctgagtgtgacagggcatgaaaggtgttcctttgcttatcttaccctgtgcacatgctgttcctgcagagcagagccctctgtatccctctcttggtgtgtgggggagtcctctggtttggctatggagggggccgagcagtcccaccgtccattcccgttttgtctcccgcttccctgcttcacttatctttgcctttgatcctgtgtctaggacatctttggttcatgttctccactgactgtcagtttcctcctgtgtagaccttggagggacccttggtggccaggaggaggctgcagagctggtttgcttcagccagacactccctctgcacacacttccaggaaatctgttttccgctcgggccgccacctatcttgcattatcttgaatcttctgtgcctgaggccctgtgagggagcggatcttcctccttccaggtccttcctttttgaagctattccctttatcctgttttgttttgttttgtttttcgagacagggtttctctctatagccctggctatcctggatctcactctgtagaccaggctggcctcgaactcagaaatccgcctgcttctgcctcccgagtgctgggattaaaggcacgagccaccacgcccggctttatcctttatttttatcttgtgtctgtatgtgtgcgtggaggtcagagtacagctttcacgtgtctgttccctccttccgtgggttccaaggatgaaatccaagtcttccagcttagaggcaagctcttttaccaaatgggaggtggtctcgaagatccgacagcttctcatctgcatccatttgagctttgggactttttactttctcctctgtcctgttcctctccccaccctcccttccttttgagaaagggtctcccgtatcccagacatgcctcgtactcagtacatagccaagagtggcctcaactcttggtcctcatttttttttactgggatcatgggtgtgccatgctcatgctattttggtgaacatcacagggcctgacaaagctagacaaggactctgacaactgaggtacatgcctagtgcctctacctgctccattccccaaactctccctgttggggcaacctttaacaagcttggggaaggtacggagatgtgtgtttcattgtggctgcctggaagggacggagatagcagaggccacactgctttacaacacagactgagtgagaactggcccattggaatgtcgcctctggggaagaaggaggctggaaagggccttgggagcaaattgtgtaagactccagaaacttccttcctcagtgttggacccaagaggcaggctggggagtcactctctttgacatgccgaggaaaatggagcaggacttcccgaggatggtttcaatttgaggaagctgagaagcccagaggcagtgtgcaagtccaggacagacagaccatctgtcccagtgcagagcactgccacggtgtgatggagaatccacacaggacagagggttgaggccaggggaccacacagacagaaagggatgtctgtggcctacaggactgaggtgagtgagagctaagcctttctctgcagctgctcaccacagcccttgaggtcagctggggccttggaaccgtttgagcttaacagctcctcggagcctgagcgggatggggctgctggcttgcttacagccacaaggacagctgctggggcttcccctggggttcccttctcagggtggcctaggatcaaagagactaccccctctgcctcagggtcacactgagttccagctcagctccgaatgttcctcaggcacaaacaggagctgaggtccagccacacccatagatagattatagtgctctcaagtgtccttgggtggacaggacagcctctgtgtggcactgatgggccagatgccagcatcctctgcatctattccagcagatctgcctggatgtacgattcagtttgctagccttgcctgcttggatgccaggggtctggtgtgctgagctcatccaactttgagatggaaactatacccattttatagatgaggaaactgaggctcagacaagttaggagactcagtttgggacctgagcttgtgctagctgttggctaatgtccctgtcctatgaggatctgttcactaacttagtcacagctgagtcaatggtgatgtgtgtgcgcgtatgtgccccaccaatgtcccctccctgtgctgagttctcccagacttcccttgagacctcgggaacaatgatgaattaatctcatcactttatcaaggaggcacttagagaaattacaagaggaggccaccagcctggttttgctggcagccagccgccgggcccataaaacaaattgaaaggaaccaaataaataagtagaattagggacacacacacatgcactcccgtgtgtctgtgggtatgcgtgcgcacacttgtaccctgaaaggtcaagagcattgttagcactctggccccaggaagccctcttgtcctgtttgtcaccttgccttaggaggacagcacaatcaaacccaccccaaccccgttctgagcaatagcccatggccctgcagctgagagcagggcacagaggtttgcactgtgcaagtcccaagcaggccaccagggttcagtccttaggctgtttcggctaaggacaacaaaatccccagactctcatggtataacctaccccagcctgatgtggccttcctaccacactatccctgactctcatctgtaagaagtgtgggatgttaagttaaagacaatttatgttgatcagggctgcagctgggttactcaacgcctggttatttagtggttagcgtcccatgggtacttatgagtgtcaggtacttgatctgtcaagaggaagtggcagcctgcatgaggaaatagaggacacagacagctgggcagcgtggcgaggtcagcacagagaagcaataccttcccagtgggctctggattggtggctgcaggcctgggacagagggtacttggtgggcctgcctgtttgccagttccagaattaggcatgtacagtgctggggagtgggaggagcttggggctgtgcatgctgtggggatggtggggtgggataggggacagcctaccgagcctcaatacctacacacatggaacagatgcatcagcggagcctgtgtgcctcctctcatttatcttttaatattaccatgcatagcctggtgtagagacacatctgtaatccaactactgagtttgaggacagcctgggctacagagtaagaccttgtctcaaaaattaaagattactgaaaaacccccaacaaacagaaactgcatttatataggttgacattactaccacacctcagttgacttcctacaaaatttcacaagtgagttctaagaaataacactagaggggttggcgagaaggctctgtgggtgcttgctgctaaggttgatgatgacctgagtttgattgagcctcagggtccacatgttggaaggagagaaccagaagttgtgctctgatcatgcaacagagagagagagagagagagagagggagagagggagagagagagagagagagagggagagggagagagagagagagagagatcattggttgagggctggggaaaggaatgagaacatgtgtgagaaaatagtcccaatgtccacaggggttggggggttccccggcctgtgctgtggagctaaggggatgctgcagtgctgtggtaacttgggcccatccctgacactgcgtcagagcccttatggtccaggagtcatagacctggcagagttcccatatcccacaccaggaggctgtggtgtgcaaaatgccctgggccacttacctcccctcccagtcaccaggccacccgagctgtaggttatcaacagcctgcctctgttggtgaggtacttcccaattctgtcaagttccttgggaggtacaggggaggggtgtatatagggtttctgggcctggggtagttcattttggcttcctgagtctctgtcttagtcagggtttctattcctgcacaaacatcatgaccaagaagcaagttgggaaggaaagggtttattcggcttacatttcgatacgctgttcatcaccaaggaactcaaacaggtcaggaagcaggagctaatgcagaggccatggagggatattccttactggcttacctcccctggcttgctcagcctgccctcttatatccaatattaccagcccagagatggtcccacccacaagggctctttctcccttgatcactaattgagaaaatgccttacagttggatctcatgaaggcatttcctcaactgaagctcctttctctgtgataactccagctgtgtcaagttgacacaaaactagccagtacaatctccattccttggtctgtgaattgggcactgataggccagctcagagttgtgctaagggtctagagagctgatccagaggctgcacatagtaggtagacggggagccagggcaggtccccagcttctccctcgatctctgggatggattgaggacctggtgcctttctgttgttcctcttctagtaccaggcgtgttgtaggcacatagcccacatttgttaaataggtgttgaatagacagggaagccagagtagacactgtccctgtgtcaggaaggcagccatatttgcaggatgaacatgtgtttataaaccaaccagcccatgtgctgagtggtttgttgtttgagacagtctggatgtgtagctctggttgccctccaactattgagcatccttcgttatctccccaggtgctgggacaaagtgaatgggttgccgtacttagacagtggttctgtatgagacaggctatgtagttttttgtgttttttttttttgttttttgttttttttttgagataggctgtgtatctatggtatgtgtatatctagactgccctccgactcctggtctgtagctaatggtgaccttgaatttctcaccctcctgcctctacctccatgtgctagatcaccagcaggcctggtgtatgtgttgtaacccgcaaccaaggacttcgagacattaagcaagtacttacagccgagtgatgtcttcagacccattttgttctgaagacagggtctcctaattcaggctggccttgtacttgattcctagacaagaatgacttgacccctgaccttcttcctgcctccacttcccacccagctgctgaaattgcagagccagtgagatggctcactgggtgaaggcagtgtgccggcaagcctgaagacctaagtacaatccccacgaacctcgtggtgggtggagaaaaccatctcctcaaaggttgtcttcacacacacacacacacacacacacacacataaccaaatgtttaatagtaaaaaaaaaaaaaaaaaaagacaggaacataaactatcatgtctaatctgggctacaatttttatttttatttttttgagacagggtctcactgtgtagtcctggctgacctcaaactcagagattggcctgcttctgcaggcattaaaggtgggcaccaccacatccaacctaggctacaattttttcaagacagggtttctctgcagccctggctgtcttggaattcaggctggccttgaactcacagagatctgcctcctggatgctgggatgaaaggcatgtgccaaggctacattttttgttgttgttgttgtttttccttctttttcttttggttttttgagacagggtttctctgtgtagccctggctgtcctagaactcactttatagaccaggctggcctcgaactcagaaatctgtctgcctttgccttccgagtgctgagattaaaggtgtgcgccaccactgcccagctgtttttggtttttcaagacagggtttctctgtgtagtccctggctgtcctggaacgcactctgtagaccaggctggcctcaaactgagaaatctgcctgcctctgcctcccaagtgttggggattaaaggcatgcatgtgccatcactgcctggccaaggctgcagtttttaaaaagtgatctttcacataagattttgcttaacccttccttcaggagctaacaactgttttgtagatgagagaactaaggctaggtgaccagaaagtgtttcctagacccagtgggggacagagtccaggtccttccagagtttcctgggcttttcctagtgactggtgcaaggcagcgtctggaggaggagctggggtggtctgtgttaatgttcagctctgcaaggtggctcttttcctgaggtaaaatgctgactcagcatattttgattccacccctcccccaaatctcgtggccgtttcagaactctgagagaccattctcagaagaacatttttctgcaggtggctttttggcctccccctgctcactggctggaattggcataggagagtttgaagcattctgacagccacttaggaccctgcttctagaaacaattcccgatgcaaccctggggtggggggagggcaagtcagctctggccaattaatgcccagattgtcaacctaattggtcggggatcctggacaaaccacagatacctggcaaccatctctctgtcattgcaggcaacatcgagtacaactgcccggccaccaatgaatgtgagatcaccaaacggaggcgcaagtcctgtcaggcctgccgattcatgaaatgcctcaaagtggggatgctgaaggaaggtaagaggcccatagccaagcaccagggtcggggctccacttggtttgtcttggtggggagggtcagacctgtgtaagggtgctataggctgagggcctcaccaaggaccttcccaagggcagtatgtgcgtacatgcagctataggctgctttgcatcatagctgtcatatcatagcctgctgggcatctcttcttagaaagctgtgggccagcagtatggaagcccagaggtcctaaggatccttttgggacttcagaccctatttggagcctcagctgtaagcttgtcattctgggacatcctcatttggactagcagcctctcacccacatctacccccacccatcttgtcaagtgaccttagactggtcctcactcaggtttgcaggtaagcccttgcactctccagagttgctccatgccataggtgacccaagtgccaactgagttttatttagttccatggagcccgggtgtttggttcttttattttatttatatctttggctctatgaatagcttttatccttcatagattttttttaagatagctttctaaggaaattagccttacaagtttgtatttattctgtgtgtgtgtgtgagtacctgcatgtttgtgtgcatacctggtgctcttggaggtcagaagagggcatccatgccctgggagtagttgtaagttgcccagtgggtgctgggaactgaatcctggtccttggttgagttaactgaagcgcagtgaagctaacaacctgtgagtctttttccttttaaatgtggctcctaggaactgtgaagtgatgtccgacttactctatggctgctgtaaggcccttctttcttcatcatctctgtggatgggcctggtttgaatcttattcagtaccattttgggaatggcatgcgtgcgtacatatgtccatgtgtatgtgtgtgcacgcgcggttgcatgtgcacacatgcacatccgttgcatgtgcccacatctttgcatgtgcacactttgtctccctcagagagagccagagtaaattcttacagatcagcttctgagtcttgatccttcttaacacggaaggaaacaggggatgaggaacagggcaggcaacaagaaaggggcacgctggggggtgcggtcttccctgagaagggcaagatggggtcactcacctcccaaacctagctcagccttcagcaggctggggactttctccacccctctcctgtgccctggagacatgtctgcctctgagctgttttgcctatgagacagcttgggctggaccttctagtgtgagggaaaattccgggtcctttctctcctcacctgggctcagcttagcatctgcaccgatgaagaagctctcggggcagatcccaaatgcctcatgggtctgcggtgtgatgaaacaacaccacgaccaaagcaagttggagaggaaagggttttattaggcttacacttccacattgtagtccatcattgaaggaagtcaggacgggaactcaagcagggctggcacctggaggctgtgctgcttactggcttcctcctcatggcttgctcagcctgctttcttatacaacccaggatcaccagcccaaggatggccccacccacagtgggctgggccctcccacatcaatcactaattaagagaatgccctgcaggcttgcctgcagactgattttatggaggcattttcttaattgaggttccttcccctcagataactttatagcttgtatcgagttgatgtaaaactattcgccacaactcccttcttaaccccttggtgatgtgttggctgtggttcggagggctctgtggaggaaacagcttccttctcctttgaaatgggctgtgttgggcctgctgtatggaagaccgaggcataggtttggtcttggttgtatgtgggtgtgactaagatggaggttggattcgatccgctgctgcccacaccagactctctctctggtgagagcttcctggtgttcacagatgaggaggcccacagaggcaggcctggttggtctccttacacaccatctttggtgccgggagccggagagtttctaggatttgaagagccataagcctcctaagccgcagagatagagctgccatcttgttctggaagcggagtcagacaccagtccaggctggagcccgtgagcagatacttccttgtctggagtgtgcctcattctctgccggttctccacatctaaggaaatcaaggcaaaggcagcctctcacccttagagagatgatgggctgttgcacttcagccaccctctcgcttgagaagatcaggcctgggtctggacttcctgttccatgccttctgctctcccctattccccatgacagaagccatgaatgcgggaatggctactcagcctcttgacagctagctggaatgctcaggattctctttaggagttaaccagtgctggaaagaggaggatactttctagtggtccccaggaaggtttcctgtcatgtcaccaatgacaggagaggcatgaccaagcacactgaagggtggcggtggcagcgggcagaggcggtggtggggagatccctgggctggcccctgaaagataagcccatggataatgcaggcctccaatggtgggagtcgtgctgggaggatgcacactggccaagtgggaggacttgcagggtgatcccagagttgcctcccctccaggagtggctttccccatgggcagccagatgtctctctgtcctgatatactgagcctgatttggctattagggagctttacttgagggaggaagagacagtcaccagggcacatcccaccacacctccagtgctggcaggcctgtatctgaaagagaaaaactgacaggaagccccctgcgtgtggatgaagctgagctcttggcttggtgtgggtccccatagagctctgtggtacctggcatcagaaaccccacagggaccctgccttggaggagcctgcaggagtctgggtctctgccaggaagagcttttggcagtagtcctggctcctgctttgtttgggtgtccctccttgcttacatgttcaaggtctagtccctgggggctagcctgggctcctgccccactctgacttgattctggaaacaaacggcccacttggctgtgctgcttgctccctgtgttagggtctcacagtcagtggaataacagtggttcccgagtcttcagggaagcagggaatagaaacatgccctcccctgcccctgcccctgcccctgcccctgttctacatgtcacaaatgtcagaaccatattttccattatagggagtattttttttgctaccctgctttaagctgctgggctcttctaatctctcacagctattgtgcccttcccagtactcttagctcagcaccctacagcagttcaatacgccaccaataactttcttagtaaaatagttcatgtcactgatccatgatttgggggctccagccattactagggataatgtcagatgtgtggtgtctctctgttgtgggatcaaagctgtcccattccttagctggttggagatggatcctgttccccacgtggcttcctttggcattgccctctctatcctggggtgattggaatagtcagtgagtgaaggcggtgtcctagagtctttgtgcagatcctttgaatggcaattcatattttcttggaaagtcgacctttttcagagtgtagaattgaatataaagtgtgacttgggttcggagccggtgactggcatttgtggttcctgtacggaacactggaccctttcttcacttgtattgatacctgctgttcaccaggtgtgtcagctccctggcgccagttcagctagctgttaaattcactcaggctctgcttgtctttccttcggctgcccacagagctgagtgaggtcaacaggacccattgatctcctttggatctgttgggggcactctaaagggggtggcattactttaagcagatcctctctaagttctgggatcagaatggaatgagacaggcctccagaagaactctgaaaatcaatccacttgctgcctctaccaggcacccccacctcctggacttgcatacgacaaccgtcccccctcccccgccaccctcccccaccgccgtgccccccacagctacgcccccacccaggcaggttgtccctgccagccccaccttctcctctcccgacctacccactctccagccactcctgctgtttcctccctgttcagccctgcctgtctcttcccaagtgttttctgagagaaatttgatttcagcgagagctgggctgacggccatgcaatatgctttcacttgttccgtgcgcgatggaaaagtggaaagatcctccagggattctgggtaattgggttagtggccagctcatgtcaggaaattaaaagggggcctgatcaggttcctgctgcatgggctctaatagttttgtatttatagagtgctctgcctctagtctgccagaaatactactgctcttctggtcttgtgaatgaaggaagagacgttctcttgcttttccaaaatatattaatgttttgaaacaaaccaactctccagcatgtcagaggacagacagtgttgaactactttctgcctatacacatgtgccctccagcgccgcccccccccccaaatctgatagctcagaaggtctccccaaagcatcctggacatgcaggtacaatgacctctggctggacaggtgttgattgaatacagacagctgcttctggctgtgtggaattcttattacctttcactccaggcatttgacaccagagcattggatcacaagctcagcccatctcttcagaccctgcttgaccatttagcagctccctgggaaagctacttagacctccctaggctttgcttccctccaggaaaatgagagtcatggtgtgcccattgtcatcttgggatgactcctgggatggctcttggattccaccatgatgtacaatgttgatttttttttttcttgataagagataagtgtaatagcattgattttttttttttttttttttttttttttgctgttgttgttttgtttttaactggtgggtagctttaggtatatactatatgaagatagtattcaagcaaattagtgaacatacctatcgcattgccacttcattttgtctggttaagaacatgaaagtcctttgttagcagacatctgagtgcagtgctttggtcgttgtggatccaggtagtgcagggcacagactaagctttccagactcaccagactctgtctggtgtttgaatcttccctttcccaaaaccccccaaagtgatttttctcttttttgtatctagcaagcagtttggggtccccatacatacacacttagctaatgagccctgcttcatgttgtcttgaaaatagaaatagtaaaatagaatttctcaatggtagtactgggataaaacccaggaccaagtatatactagacagctgctctacctatctgagctacaacccaacatggtttcactaagtttcttgggcaggccttgaaccctgactttctctgcctctgcttcccaagtagctgggatgccaccacgctgggccaagtggaaactttttatcccgctaccatggagtcttcccagtttgagtagtaggtcttctgcctcagtcccttgtatagatttctgttgtttgttttgagacagggtttctttatgcaaccccagctgtcctggagtatggcactgtagacaaggctggccttgaactcacaaagatcctcctgcctctgcctcccaagtgctggaattgcaggcataagccactaccactcagctccattagtgtcaatttcctgattctctttaatagtaatgtagtcgtccaaaggtctctggctgtacaggacgggtagcagctccacagtccactcaagcctgtgacccacacctatgactccagttctccaggcaggacagtcaggacacagggtcctttcattcacagacttggcaaagtctaatcacatgggcgtcccgctcagtactctggggatcgtttttagctgggatgttgtgggctcagcaaaagcctggttggtatggaagaaagtacacccatcttcaaatatactttcttacctttatttcgtgtgtgtgtgtgtgtgtgtgtgtgtgtgtgtgtgtgtatagatactatggcatgtgtatggaggtcagaggtcaactctcgggagtcagttctttccttctaatgtgtgggccacaggttgtcaggttggttggtgatgtccttctctgctgggccatctcaggcgaggccaggtgtgagcatatgccaagcaggaaaaatacctacacccctaccacaggaaggcagaagcgccattaaaggtcccgtcgtcattctgtctgtcgtttcttttcttcattcttggaggaaactgttatcctggcttttatgtttccctgcaggttcatctggaggtttttgtttgtcagaatgggttttcattctgtagctcaaaatagtgttgtcagcaaccctcttgcctcagtttcccaaaggctggaattggaattggaaggctggaagatggatgagccatcttacccagcttctagttttattctattattttggcttttagtttttaatgactttataagtgattttttttgggggggggaatgggattgggtggttgtttttttgagatagggctacgtagctctggctgtcctggaatatacgcatgagtttgtctttaattattatgtatgctgggtgtagccccacacgcaggtctttaatcccagcatttgggaagtagaggcagccagcttatggaaacttattaaatttccatacagtctgagaccctgcctcaagacaaaacaaaagttgtgtctgtgtgccatgtgttcattgggtacccttggaagccagaagaaggccttggatcccctggagctggaatagctgggagccacttgacactgctgctgggatttgaactcaggtccactgatcctagccttaggatcctggaccaaggtagccagtagaaactcctaggcggtgctgcttctcacaaggtttgtttatcttttgtttctctgaagtagaagccactaaacaggatgttttttcataagtactcaacaccactgatgtaatgataggccgagccgtgttttcataaagggcagaggttggacttgaccagcggactggagtttactaactcctttgcttagttagacccacacaactgggccatgacggagctgggtgtagactaggctgtcatagaagcattgtgcttctgtttgtctcccagatgtgtatgtggaagagttaatctcccaggagaagggcctggaatacatcttcagctcctgtgtgtgtgtgtgtgtgtgtgtgtgtgtgtgtgtggtggtggtggtggtgatggggtgtagtatacagtatatatatggtatatggtatatagcacatagtacatagtatgtatataccaatgcccaggccagaagaggacactgaccaccctgctttctcactttttcccttattctcttagactgtctacagagcttggagctaagcaggcaagctgcagtggtcttcccatctctgctcccatgcagtgctgagttagaaaccatgctagcttgtgtgtgggggtggggtgggatggggtgattcaagataaaaggtttctctggctgtcctgggactcactctgtagactaggctagcctcaaactcagagatttcccctacatctgcctcccaagtgctgagattatcgataatgtgccacctcagccagctcagaacagtcttttaaaagccttagtgagagtctgccatcttgttttccatcctcttagagttctccattgcacttagaataatgccaagaatctgacagcaaggttcaggtgtgccctgctactctgccatcatccgtgccaccatgtcctatccgagttccttcagctccagcctcaagggcttgctttcagtcaacttctctccttagaaaatctccatactgccctcccttggagtgcgttcctgaaggcaggtttcttgtcctttcagtctccgtgtagatgtcaccctccccatcactggctgtcacagacccccatcactggctgtcacagccccctgtagaccttgtcattgaacttcccctcctcaagaaatgaccttgtttgtttgtttatgcacttgccttattttgtttactctgcggtctcctaacacctccgttctcaattcaagaagcaaggtggcaaattacctttccactggactgtcagctccagggtggtagtgtgcatgattgaaaggccccagtggagtatctgagaccagccggccgtggtgctgtgattgattaacagtgtctatcacaggcaagaaaatgcaaagcggtggccctgggatgagacctgccttgcttgatctggcccaggtgcacttgggtagttttttttccccctagacccacacagaggggacatgacagctgggtgtggtctaggctccttgtagggagctggtcctaacctcagggtgctttccatgcccagcaggagtctgcagttcttccacagcaagcttagatcaggtcttggctggactgacttttccatggtaggtgtagttttaggcattggccagtgggaacacagggatgacacaggcgaaatgtgcgcactggtgtgatgtcatcgaccagaagggtctaggggagagagagtgatggtaaatagacattgatagctagaatactggagttcccccttagatgtttgggtagctggaatccacagaagagttggcaggagcgcccccctccattcccccccaatccccatccctaggtgtattggttagttttttgtcaacttgacacaaacctatctgggaacacgtatctgggaagaggtaatcttaactgagaaaatttctccatcacattggtctgtaggcaagtctatggggtgtgttgtcttgactatttatatagaagcacctagcccactgtgaatgataccatccctgggctggtggacctgggttgtatatgaaagcaagcggagcaatctgagaggagcaagccagtaagcagcattcattcctccatggcctctgcttcagttcctgcctccaggttcctgcctggagttcattccttgggtttcccccagtcactgtagcccgtaagccaaataaaccctttctccccaagttgcttttaaccataagcttgtttatcacagcaaactgggacactaggttaagcttcaacccctaatccctccaggaaagactactcagagcaaataaatgtatcctaaagacccagatccagtattcaaccaccaaagagctttgaacagatacttgttctagacaagaccccagatcccccagacttcaaggaacaagtcctccagtctccagggggttctcgccatgcaggactgaaatggaatggcatttggtcacccacaaatccaagtgcagagcctttggacttcctggctgtgtggccctgaccaggtcctatgtatcccaggctagcctttgaacttcgctatgcatccaagaatgagcctgcattcctgatcatcttgcctcagccttcgagagtactgggattacaggcagaccccatcacacaggtttatgccagagcggagaccgaatgaaaggctttacgtgttagtgtgttagtacacataaagtggccaggactccactgcccaggctacatcctcaagtccacctgacctttctctagtcttcttgttgtctccccatgacagccatgaacaaccccttctcaagagttgccgtgcagatcaaaaatgagatgatcagctttgtaagcagagtcccgttcagttcaggacctgcttcacttcatagagaaacagaaggtggtatagtcagtggtgctgctgggttttggagaggaaacatgtcaaccctgaatacttcagcaaggtcaacagggatttttcctgggacagaaatgagggaaggatactggcttccaggcctgccacccccaccccatcgccccgagggtagagagagagacacctgatagtcagagggcagcaccaggacaggcttggggccaggtggtgggaccgagcttcagctggctatttttagtgtaaatgaaagaaactttaaactggctgctgccccagtgcaatcagctatttttgcatctgaaagactgggatcctgtccagccttgggggagggggttgcgattgagaagcaaggcaggaggtggcgggaagtgggaagtgttgctattccattaagaaagaacagtagcccaactggagtaaagatgtccatttaatccgtgtaggggatctggagctctgaggtgcctgcagtgaatggcagaggccagcaggtgggcatagtttgagacccttccctcctctagtgaatcttttttttttcttggttttttgagactaggtttctctgtgtagccctggctgttcctctagtgaatcttgtgtgctgatttctgggctctgaactgggcccctgcaggtccctgggctagtgtcacaaggctggtgaagggtgacttagagcaagagtgacttagccaaggccaacagttctgttcttgggttggacagaggtggctgctgggttctgttgctgtcctgtctgacaacctgacatttttacttttactttttttttatggttggaaaggccaaatggaagcctttagagttgcctctgccaaagaaaatagtgaatcaaaaacagtatcgtattcctggaggaattgcagaaattactgccactatcaaggacttgaaagatgcaggggtggtggttcccaccacatctccatttaactctcctatctggccagtgcagaaaacagatggatcatggagaatgacagttgattaccgaaaactaaatcaggtagtaactccaattgcagctgctgtaccagatgtagtttccttacttgagcaaattaacacatctcctggcacctggtatgcggctattgatttggcaaatgccttcttctcagtacctgtccataaggaccaccagaagcaatttgctttcagttggcaaggccaacagtataccttcacagttttgcctcaaggatatattaactctcctgccctgtgtcataatttagttagaagggatcttgatcgtttggatcttccacaaaatatcacattggtgcactatattgatgacattatgctgattggaccaagtgagcaggaagtagcaaccactttggactcattggtaacacatatgcgtatcagaggatgggaaataaatccaaccaaaattcaaggaccatctacctcagtgaaattcttaggagtccagtggtgtggggcatgcagagatattccttctaaggtgaaagataagttattgcacctggcccctcctacaaccaagaaagaagcacaacgtttagtgggtctatttggattctggagacaacacatccctcacttgggtgtgttacttaggcctatttaccaagtggaggtctcaaactgtagctgaggctgacctggaacactgtaactcccaagctaacttggagctcatgttgatcctcctgcctcagcttttcaagtgctgggaccacaagcacaaaaccctcatgcttgctcttagtgggactaagtctacattctagattcccaactctcccttccccaggttttctgtgtctgaccatgctgactccagaaacctcaaaggcagagctaggcagtagctgcctttctgtcttatttcactcaggatgactaagtcgtagacaagtactttaggccacatttgtttgcctgtggcatctgacggccacaaggctgctccctgcttggagcgtccatgaattgtgctgcagctaacactgggttatttccatcttcagttctatgttggagtggaaacccaggagtggggtttgtggtgatgctgggaagttttttgagctaccagcacacacactattctacacctccaccagaattttctagaagtttttaaacttttcattttgagatcattgagttatagtcgtcagaaaattcagatgccacatacttacccttcacccagtttccccatcatggtgtcttgggggggaaaaaaaaatatatatatatatatatatactatgcaatcaagacgctggtgttggtaacagcagcaacacagaacctccttcaggttgaggtattttgttactagcatgcatttaacagatactgtttgccactgaaggttttcaaattcccacatgaagtcacataaggattaagtgagctgttggccctgtgaggttgcctattaccccaccttagaggccaagaaatggagatacaagaagtgtgtgtgtgtgtgtgtgtgtgtgtattcatgaggtactgtctaagcattaaagttctctgtacatctgaaggggttaaacagtatccaacagtagttaggacaagggccacgtgttactaagttaagtatttggagatcagcaaggattttcatattagcattattaatacctttttatatttggaaagtctcaatgagatgatagactctactaatctgagaccgcaactataagttaattagtattttatttgttcctcctgactgctttttaaaatatatatatgtatatatatatatatatatacacacacacacacacacacacacacaataagacatttttatttaaagactcccattttctctctccccaggtttgaagtcatattctaatttagaagtaattgtctattgtatcagtcagtagggataactctttactgccacaccctttgaaaatggagatgtttaccccctctgtccctagtagcccagacgagcctcaaacttggctgtatagctgagcatgaccttgaactgttgctccttctgtcccggattcccaagggctggcattaccggctggtatcacctgatttacgaggttgctttcttttgctggtggtattcaactgcaaagttgagctatcaagtcattggcaaagaggacaaagcctttggatttggaggtggcccacgaattccacagatccgggaagcacaggcccacgtcctccactccaaaggatcattaacagatcctgactgtagtggtgctgacggcagggagtatagaacccacaacgtgaccggaacaagcctgtggtgattgcccggaaagcagccaggccacctgcagcatccctgcttcaaggtcaactgaaaagcctgggctccagcagagtggctttgaccactgctgcctcctttagccagagggtgacactggagcgttgacccacctcctccaagggtcaggagttagatcagcctgaacaggaccactgggtcctcataggctttgtaggtttgaatgggacaggagtttcgaatgagaacagacccattttgtaccagtccttgatgtgcaatccttgattagttccagtcgacacattcatcctttggatggctacctggctataaaagatctgaggtgttagtgcagaggagagtttgagcccggcggtggtggcccacgcttttaatcctagcactcgggaggcagaggcaggcggatttctgagttcgaggccagcctggtctacagagtgagcgccaggacagcagggctatacagagaaaccctgtcttgaaaaaccaaaacaaaaaaacaaaaaaaaaagtttgagaggtgtcctgggaggtcactcctcagaatggcaaaggagcatgggcaaaaggtactgacacttactgggccaaccagctagctcctcagtctgtctgttcctgttgagggtaaccacagccactccacgttgtgggttaaacagtgtatatgtaaagtcctctgtgaaccatgctgttaaccattgttgatatgacttacgagggagttgaacacagtctttcttcttaagcaccaatggttaccagatgccatggcagaacctgaccttaagggacacctccctagccagcaggggaggccccggtgctgtgaagaaacacatggtgtgtggggtatgggttggggatggggacaggggatgaacagccactttagggttaggaaagataggggaagaggcgacccccttggagtgacttctgggcaaaaggagtcgggaaagcagattcagagcagagagccaatcagttgctggtacatgctgggcacctgggggttctcagattcagagcagagagccaatcagctgctggtacatgctgggcacctgggggttctcgatgtccactgtgaagttggtagtagcgcttcttaggttgtgttgccatttcaaggagtgagcggagctttagtgggagaaccgttaagcaggagtctcctgtctactcctgtctctgcctctactgcaggggatttcaggagtgagacaaaggcctgtgctaggaggatggagctgtttcctttgtccctaatgtccaggacgatggaggtggaagctggagcaggtccaccagagtgtcctgtggcggttacccacacaggccctgcacatcatagctcatcttgataagatgctcattctggggctggggatatagcttggttagcagggtctttgcccagcatgcacaaagctctgactggaaccccaggtattgcataaagcgcatggtgtcccaagcctaaaatcccagccctggggaggcacaggccggaggatccgaagatcaaggtcacccttgatccttcacttctcagcagttaggaggtcagctagaggggcatgagagtgacaggtttatttgatcctcctgcctggggcctgagaaattggtttgctcttctaacaagccccagatgttggtgatgctactggtctgtggatcacaccttgagaaggcgacgaccacccttctcacctgtcagcactagccatcctctgtgtgtgctgatttagcatcctgtggccacagttctgccccagcgctttggctaccaactggctcggcctgggccagaccaccagttactgaccgcagtgtgggctgacagagctagcggcggagtccagaacaggcctttctcttctccctcacagcctcctgcttgttaatcctttactcaggttctgctcttagagagatcaacgcagaggcagtgggttatcaccatttgaccctctgaacagaggtagggagttgctggtagcttctcaagaggtccaaggatcagacttagaatgtggaatgagagtaacctggatggtgcggcctgaggctgctgtcatactctgtaccattcttgcttcccattggatgggcctgtgtcatcggtctcacctataagggtagaaataaagagcccatttcagtggagtgcagcacaggccctccaacaagaccaccctccctccatatgggagttgttagcattaaggagaatgggggggggggatcctgagatactcccccccccagcccctatccagcgttcattatagccttgtgcctcacctgttacagaagttccagtgagggattaaaaggctgagggtgtagcttccttggagagttttcctagcgcagaaggagccttgccctgccctcagtccccacctcaccccctgcattgtgtaaacctggggtggtggcacacacacattgctttctgaggtgaaatctggcagatccaaagttcaaggtcagttttggaggccagcctgggctggatgtggctgggaagtaattggttcagtaagaagtggttcttgccggttatggctccagcaccttctttccgctcagggagaggatgttagttacagcctttaattggaaactgggtgtggatgtgtggacatcttcccccccacttcttcccccccccccaaaggagttgccccaccttcaaaatctttgcactttcaattgctctctttctctggtcccttcctcttttctcttagactgcttgcacataactagttgtatgtactatcaaagaggtaaccagaggcatgaatgggatgcaaatcttccctctatcaatggcctctttagctttctcttctgcagggtggtaagagtcgagtattggcgaaggccgctgacaaccacccaccatctttttatttccagatctgcaagtcttcctggagaaggaagggccgacttttgaggcgcactaccttcaggggaaagtacataagcacttaggctcggaggcagtaacctgttttctcctcaggattctttctccatccacctttttacttttgaggcaatctcatgtagcccaggctggtcataatttccctctgttgctgaggctgaccatgggctcctggtcccccatcttcaccgagtgctgggattacaggcatttgttgacatctcccccttttaaaaggtgtggtgttagggattggacccagagctttgggtatgccaggcaaacacggtaccaactgacctacatctctagccctcctttcccagcttaacgaacccagctctccctggatgcagagcagaactgagacacttggttggcagagagctttgttgagcctccgcttgaggtctcagaggctagaggtgtcaaggtgatttttaggatggagctgtacctggaaaggcagagccaggctagctggtgggacggacttcagatggtacttcttgtggcatgacgctggccatctgggcatggccatgaaactctcagtcagggccgcagttctaaagtcagggcccattcacctggagatttggaacaactcttttgttgttgttgttgtcgttcttgttttgttttgttttattttgttttgtgtgttttcgagacagggtttctctgtgtagccctggctgtcctggaacgcactctgtagaccaggctggcctcgaactcagaaatctgcctgcctctgcctcccaagtgctgggattatggaacaactcttgatgccaatatctttcttgtctgacaggtgtgcgccttgaccgagttcgaggaggccgccagaagtacaagcgacggctggattcggagaacagcccctacctgaacctgccgatttccccacctgctaaaaagccatgtgtgtatcaggcaggcctgctgcctctctcagcccggaccacctggcatcttcctggggcggctctgtcttccctccactgggtggtgggcagtgtggatctaaagatggccaacagtgcctgcttgctattgcctggcttcatccgaaggcctgtctatatgggatgacataaaccctatttccatgtgaaataagagccccagtatacagaccttgtctccatggccaccctctccagttcagggtcctctcagcagcttcccattgcaggaacatctcagtgctctcatccttgttactagcagctttgtgatgctagcagacagacagacagaccccagccatatttgacctccccatgggctctgtccccactcttccccaggcattgactgtttgctccctgtttggtcgttacagtgactaagatcgtctcgaatctactaggggttgagcaggacaagctgtatgctatgcctcccaacgatatccccgagggagatatcaaggccctgaccactctctgtgaattggcagatcgggagcttgtgttcctcatcaactgggccaagcacatcccaggtgagtcacggtaggggtggggtcagggcaagagtgctaaggggctctctagattcatcctgtcccatagctgtgcctctggtgcctggtacctgtcccaacaaagcctagaagacctttgccagcccatgtttctaaaaggcctctttctcttctgtgggattgaagggagtagcatttggaaggttcagcagtgtttatgaactgccagggcacattagaaccacttaatccagggctggagagatggctcaccggttaaaagcactgactgcttttccaaaggtcctgagttcaaatcttagcaaccatatggtggctcacaaccaatgaaatctgattccttctcctggagtctctgaagacagctacagtgtgtttacatataataagtaaataaatcttaaaagaatcattttggtagattttgcaattagaagttcacaaatggaacccccaagaaaacagtagattttccctgtagagttcacagcaatggtaatggaagacagccctcttccttcccattagctgcaggcagatagaaggagttaggagcaggttggagagtcggctcagattctgattctaggcctagaagctgggggcctgagcctaccactcatcctgtcacatgggagtataagaaaatgaccttttcagtttaacccaagggccaaatgaggtcgtgagtcccaggtgtggcatctggctggcatgagccagtgtcacttgcatgctcaccatggccacctgctagatctttgccttgagatgccatggcagaaagtgcatgcgtactgtgtttcaggcccctgggcctttcactgtctggacccaggccctactgtaaacctctggctgagtccaggtgaacagtgggcgcctatgtgattccgtattgccctcacatgggggcttctctgtacagttcaagtcctgcccctgcggattgtgtgggagacatgctgtaagctctggcagcgagcccctctcctgtggcctcttcctagctgtgtggcacatgggttctttctgtgggcagttattttttccctcagctgtggcccttaaagatgagcatagcacatagcagaggtctcctggcctgtggatacagcagttaactgaggtgcttcaagtggctcgcaggtcccactggaaggcaccaacttgtggacaggagatgctgctgctgacactaagcttcgggaagccgagaggtttctgacatggtctccactccaggctctttcacccctgagtgggtgtgccaggagcctgactagtacgtcctctgtaagatgctcagtctcctgggattatacactccgtagttttgaaatccggcctgtgctgactcagcacagatgtggcatcaggctggcgcttaagacacctcagcctggattgctccactaaccccaagccaaattgggcacagccctagagactactattcccggtcagacaggtccaggtacagagatgactctggagtgacacctggcggtctcctggacattccttttgtcgcccttacttacctgcgtaacacctggaggaagggagtgtcctacgtcttacagatggttttcacatctatgccaagtaagaggaataggcgagtagggtggtttctgggtacataggctctggagccagacaaggagggctcctgtcccggctctgcccgtggtgaccttgtgtaagctttttctgagcttcattgttcccatctgtaaaatgggaaccacagaagcccccactaggagtctcaggaggatgttgcacactcagaactgccatacccgccatggttgtcatggattctaagagtgacacaagccttcaccaccccggtacttcatctccaaatcctgtggattagaggcactagctggtgtggtggctcacccctgtcatctctgaactctggaaacagaggcagtgggctagccaaagggttgaggccaatctgttctgcatagccagttccaggccagccagagaggaagcaggcgcttgcttgcttgcttgcttgtcccataccctcatgcctattttgcataaatttgcatgttgaatcactgggacttgactttcaggtgtttaaggtaaagctaattaataagggtctcccgccgctggttgtaaacctcacactaagggcaaagaaagagcaagtgtcttttagaaacaattttcttttatgtctttgggcaggtgttttgcctgcatatcaacctgtgcactgtgtgcatgcagtgcctaaggaaaccagaagagggcgtcatcccctggaactggagttacaaatgctagtgatcttccatgtgggtactgggagtctaccctgagctctcactataggagcagcaagtgaccttgcctagtgaccatctctcttagcctcatgtctagtatcttatttttaaactgttgactgaatcctatttctgattacagggaagacaggcttacagagggagtaagtgaaggttggttagagggctaatatagtagagcctaccccaagaccatgtttgagtctgtttattctggtcagggacactgagaagggaggacttcagactgcctaggactgtggcttgtccttcagggtctttatcctatagtctgcaaccagcgacacagaaggtgcttcatgcttgtggagtaagcctgggaccgtgggtctctcccaagatgtggcttagacaaagttgtaggcgtgcccactcattgaccagagatgattggagacccccgcctcaagctcagaagcctgaaacccatacctactgtatttttataatcccactgctctagattttatttatcctttatgtgcctgtgtcccggtgcctcctcttgcacctggggccattagtgagtaaaatgaggtccacctgagcatagctgtgcactgcgttaccctgatgcttcacaaccgaggtggctttgtgggacagcctgggaggcagcacacacaacttggctacatcagagaacagctggattgatgtgggggtgggggatgacccatgggagccagagatgagagtcagagcctgcagcggctgtagctaggctgctggcagtactcagtgagtttcagtctcctgcatcattgtctgcccctccccaggcagcctggattccaccttggccagcagagcccttcctcaggagtcaccactgctgccccagcccaggctgctgtgtgcaagggggatccccagaggccacttcagggaggctctttggacagcctgctcccagggaaccgctgtctggctggatgaaggatgagctgcccgcgcagcagcagcagctgtgtctgaagtggccccagatcctataattacatctccctttattacctctctaatggccctccaggtcggcagagaccatcataaattagcagattatgaactccacttgctacaaattatgtgcctttttttttcttttaaattctaggagcacatagtgtcagtggggggatgggggcctgctgtcataagatccactggtgcagataacgcagttttcctggggctgaggcgcatacggaggagacctgagagccaggggtcctgggctgggcagaaccacccagggtgagttgcagggagggcaggccagccttgctggtccggagccctggccacctgagcctctctcagactttctcctccttgctggcctagatcccgatgagttgttcaaggcccagcctgattggaaacactagtggagggtgttttcccaaagttgcttgtgttttacacgactggagaatctactctgctaatgccaggtgtaacagaagtgaacgcaaaaagcctggagtcttggggggtgggggggatgagccagcagccaaggtgtattccctcccctcatgggctcgcatttaacactctattactctactttatcacccaatgatagtaaatacttgagcacttcctctgtgctaagcagaccaataagtcttatgtgtgtgcgcacacatttaacctctgcacctctaacatgggcactgttggccccatttgacaggggagtgtagagacagaaggtggccttgcctagggtcacctttggtggccagcagagtgactactttgaccagtagttggctctggagtctgtgcctccaatgtgtctttgcacatctacataaatagtcctccctcccgtgttggatttatataataatacatgtatcacattacatttccatagtttcctgcctggcattttctgcatgtgagctagcaacaaccccttcctcacctccaccctggtccctcctggagttgactatccccgttttctcttgtagtgtttcttttctcaactgttagaaagcattccaatggtttcaagtagtgccagcacgcacttgctgctgcctggtggctaggaggccgcatgtgtgttggcgtttttttggggacctctcagatgttggagaggaggaagggactctttcccagggatgagcccgctgctcagacctcccagccagccggcccagcggtatgagagtaaagccttcggcacgttctctcccacagcagcctagaaatttccaggtggctgttgtgcccccaccccttcccatggcactccagcctcttacaggggatctaatggggtctctaagcaaatgttttaggttgttttcctgctgtcccagggtcaggctgtggcatctgtctgtccttcactgtgactgcttttgaggctgggtgggtaggaaggcaagcttaaggctcgggagtttcccttcagagctcagccccccaggttgcttgtgcagggattcactccctggactgtccttagttagcatcgatacgggttgcatgttctcagaaccttccagtccaaaagtcttctgaatttttttctttctttttaaaagtctatttattttttggtgggttttttgagacagggtttctctgggtaactctccctggttgtcctggaacctactctgtaaaccaggctggcctcaaactcagagattcactcggcctctgcctcccagtgctgggataaaaggtgtgggtcaccccgttggttggtgacatttagtgactgtgacgtcatctccaccagtgggagttatggtttgggcaagccatcagtcttgcagaggccatgccttgagagatgagcctcaccagcctgtccccatgcccagagcctggcagtaccccactcccagcatgcctgatgccttccagctcatttgtctgttcacttcaccctgtgtgcctcctcctccctcctcggtcggtccttctgctcggagactgcccctccctgtgcggtccacttcttccccacccacatcctcccacgccagctgattggtatctgttaattaatgtcacccaaagcctctcatggacctgataagggaaattggatgcccgtttctatctatcttttattacctccagctttctgccccatcctcccaacccccacccctacccccatccccgcagccacataccctccgtggtactactgagaatgtgggcagatacacagtttaacccccgtgttctgtcctgtgtcctctacccccagtcccaaggatgcatgtcaccaaagcattccgtgattggtcacccatggagtctgactgctaggaggtaatccaagacaaaggcccatgatggttggacttagaaaatggaggcgagataattggccttcaacctcaggttccctcaagagggaagcgacttatcttgggtaggtaacgagaaaaaaaaaagagaccacacaggccctaaaggtcatccagaaactgggcaaatccaaagaggagaaggaagaaataatgactgtaaggatgttggcagcctcctcggtcatccttggcagtgggatgctggcctactgtatgccagaagtggtgtgaggtcttcccacgtgccattcatcctcaggccatgagcagtgactaggtggggctaagttctactccagcaaattccttcactggcagggattacccagaaacaaatcccttgatttcaaattgcacacggcacattgtgcaaatggtggactcttcctgggagttgagttcatagccttacaaatgacctatagtctcagccctgttttgtttgttttgcttgagacaaagtctggctttgaactccagctcctcccaagtactgggattataggcctatatccttcatgtccagctatccccttctcttaataaatgcttaaaatttgactaacctgcgtgagcccccccccccaacttactgcctcctgtttagtggttatgatggttgaaacttacccttttctgttggcttctcataaatcatgctgttaggtaactttgcctaaatcaagtccacacagtccagtctcggtgtgtcatcctcatctggcagacatagacctttgttttgtctcaccattaataagaggagcttatgttttctataattgtcttcccgtatagtgcacagccagccactctaaagcacactctgctcttgggaccgctcatctgttcattccagtgacaaagaggtccaggtttgcagaggttacatgccctaatcaagttccacccacagctagtatttgggccgtcagggtcaagcccaggcaatctttcatagcacattggacaaagcagtgtcctgattctagagactactgtcttagttggggtctctattgctgtgacaaaacaccacaaccgaaaagcaagtggaggaggaaagggtttatttggcttacacttacaaatcatggtacattgttggaggaagtcaggacagaactcaagtggggcagagatctggaggcagagctgatacagaggtcatgaagggatgctgcttattggcttgctcctattggcttgctcagccttcttatagagcccaggaccacttgcccagggatggcaccacacaccatgggtgggctgggccctcccccatcagtcactaattgacaaaaagctttacagctggatctcatggaggcatttcctcaagagactacttcctctctgataactctagcttgtgtcaaactgataacacaaaaccagccagtataccctcttagctcccatttcccctctctggagggaggaggtcgcgttcctgagtagtagtgtccagagcacatctgctgagtcttctcaaggcagagtgacgacagtccaggcagccagagtacgcacaggctgtctttggagccttgccctcccagtagccttggcccaggccatgggcaactgaatccaccttcctggctgcaaggatctggtattaaagcagagagctttcctggagcttgcagtatgttggagacacccatcttgccacccccaaatcctgctattaattcagcagctccttcaattacaaatgcaccttattaatcagtgttgtctccccatgctgggaaagacctagctagacccaatgggcatggtgataataactgtcaatattgactcaactcttattatgtaagtcttttccatgaattccagtgtgactgattgactaaggggatagcaacaggcacccccagggctccccccattactccccacccctgcctccagctgggtctgaggatgcaaggacacagctcaccctcccttgaggctgccctccagcaagcgccaaggaagcccctgggaccatttctgatcattggcttcttccccttctgcaggcttccccagtctgacacttggggaccagatgagcctgctgcagagtgcctggatggagattctcatcttgggcatcgtgtaccgctcgctcccatacgatgacaagctggcatacgccgaggactatatcatggatgaggaacactctcgcctggtagggctgctggacctttaccgagccatcctgcagctggtgcgcaggtacaagaaactcaaggtagagaaggaagagtttatgatcctcaaggccctggccctcgccaactcaggtaagggtggcacgtgaccctcagagggcttcaggggttctgtgggagcctaacaagcgccgcaagcgccgcaccgctgctcagtctgtgggcggggctggcttacggatgtgggaatgaccagcattgcttttatcagcggaacacggcattagttacttttcttttctggtgatgaaaagcaacttacagaagaaagggtttaattttgtcttaggattcctgagggatagaggaggtactggagcagggagcgaaggttccgtgtggcagccggaagtggagggatagcgttttattcacacacagggagcagagggagcgaactggaagtggaatgaggttataaacctcaaagctggtcttccagcaagtctatgcttctgaggttccataacttctatatacaccaccagctggggatcaaatgctcaaatccaggatcctatggggaccgcgcccatttaagccactacatcccgcaagggtagcctggagttcaaaggacagtagtcatggaggccagcactggtttaggattttctaggactttgacttgcacagataccaaaggacattgattattgctaaaggttaggtctgtgtctactgctcttatgatttgcatcactctgagcccaagtgaccataagtagttcctattccacaatttatttatatataattatgttcaccgcataagtaacacacagtagtgagggctcagcttgctaagttggctaggacattatgtacacaactcttattataatcccattttacagatgtggacaccgaggctgggaaagttgtaaatttgtccagggtaacactgtttaaagatgtcagggtaagttcaggcctttaatcctagcattaaacaggctgagaggcaggaggatctctgagttttaagccagcctggtttatgcagtgaggtccaggtcaggcaaggttacacagtgggattccatatatatgaaaaaaaaaagtcagaattaggatccaagccacaatcatgcaattctcagagaacattggctattggctactcttagaatcttcccatcacagatcacccaggtggaacacatccaacttctcatgtggtggcttaacctagtattaaaaagttcgtaaattattctgagttttaagccagcctggtttatgcagtgaggtccaggtcaggcaaggttacacagtgggattccatatatatgaaaaaaaaaagtcagaattaggatccaagccacaatcatgcaattctcagagaacattggctattggctactcttagaatcttcccatcacagatcacccaggtggaacacatccaacttctcatgtggtggcttaacctagtattaaaaagttcgtaaattattcactatttcctaagcttcctacaacttcaactggattatctgggtaactggcagatctgcctgtgcttggagcctctatcctactggaggtactctgggtgctggggaaagagagacatacagggtctctatgtgcatgagagtaacattagaaacacgcacatacaattgtaattccactgcaggggcactacgtggcagagttcttgctctggacagggccaggtggacctgagttcaaatcctgtctctgaggctgaagagagagatggtttagcaattaagagcaccggctgctcttgcagaggaccagagtttagttcccagcactcacaaacttccaattctaactccaaaggatccaatgccctcttttggccttcactggcactgcatacacatggcatatatacatactggcacacacacacacactctgtcacactaacagcatgaccttggttagctctgtccttgagtaggaggtattcccagatacctcaagtacctgtgagctttaaagatcaatttcggataatgcagtccagtgcctggcctagaggagcactcagtaaatattgattattgtccctgctgttacaatgtcatgagaaatggtgttcccagcacatgatgcaggaaagctgactcccaggtagagacactcgtaccagcagactaccgcttcactgtttgtgctgggctttccccgaaagtctcttatctcaggaacacccaatccttagcaacttggctttgctgctgttagctccccagaaacaccctctgctgcctttcctgaggtcaggcattgtcagccgatggagacttcacacagcccagcagtctgccttggacatctgtgttggttcaggccttgacattgtattgttccttttgacttcctgcctccttttccttctgtaatcctcttccactccctccccctttcccctcctcctttcccctccccttccccctccataaatctttaaccctaaacccctgccttaggctttgctcctaaggacctaacctaatacctgttgttgcgttttcttttttgctgtagctgtgtaaacgaacagcgcatggaattccatgtgtcctccctgtccctccccatcctctgtacactctctccactcttcctgttaggtaatttgctgcaattagtaagctaatgaggactgacgcctctccagtttttgagacagtttcaatctgtcgcccaggctggcctgggattgactctatatctcaggctgattcgaaactcacagaaatcctcctgcatcagccttccaagtattgtaattataggtgtttaccaaccactcatggcagtggcccttgcctgctaccagagactccttactcctgccttccataggtttctaaaacccagtaccttgtggtctaggaagggagatctggatggacatgcccctgcaggtcacagtcctgaggcagaacagtgacccaggagcctacagagcatattggatggagaagggatgtctaggagaccaatcagacgcccccaccccccatggctaaagtggatagggtgactcaggtacctggcagaagagcaaagctcatcagaggctgaccgggtccccttgagaatgtgccagctgtcactcacttgcatcccagccatctctagggctctctgacagcagaaaaaaaaaattcatagccattgattttgtaattaacagtttatcaatgccattgatacagacttgctgatggattgcaaagaaattgatcttgcaatgttattttatttcatttttggttgaaagcacctgccaattgtggctccttggggagggtgacaggatggaaaatggggtcagaggtggctggggcccagccctgtaggaattccggaaagtacaggctgggaggagatccccagggggcatgagcaagcatcgctatgcccagccagctgatgcagctgcctcggcgctttggttcaggcgagctctgaacttgtgcactccaatgaacacagaaggctggctcattgccctgtgtccacacagcaagctttgaggctccagttcatgcaggcatcacgggttgttttaaaaaaagtgtttgggtagttctcccacaagactgggaggttccctttgttttgctcagacctagctgtatcccaatgtttcagacggccggccgagttcatgggctgtaagcatcccaagccgatggtgctaaggatccagattcaagcaaggccaagcaagggatacactcatccctgaacgatatccccgccggctccctctatcagcacaccctcccctcgcccccaaacacctagacattgacttccatccctttatatctgttctgagttgtaaggttggtggctgtactgcatgtgagtggtacccatggcccagcatcatcatgaagacgtgatgatgtcagggttaggtgatagccgtgaggttcctaagacccaggtgcttaattgttgctgtataactgtatgaggtaggtatggctaggaaaatgggggacagagaagttatataatgtctcacataactcaaaagggactgccagccagatcccagagtcccccgaacgcctctgagacatccaataggtctgcccatgttcatcggcagtgccctcctggtggtctctctatgagatctgagctcagttctaccctcctcagtctctgactcagccctgcatcaaagatcctcattctactctgaatagtcagtcagcagacagacagacagagacaggctggctgctggtctgtcctccactccagaaatgccttccgtgttggggggtggcagccagcccctgctgacactgcccctctcctgtgtccacagattcgatgtacattgagaacctggaggcggtgcagaagctccaggacctgctgcacgaggcgctgcaggactatgagctgagtcagcgccacgaggagccgcggagggccggcaagctgctgctgacgctgcccctgctgaggcagacagccgccaaagccgtgcaacacttctacagtgtgaaactgcagggcaaggtgcccatgcacaaactcttcctggagatgctggaggccaaggtgtgatggcccagcacatggacggacggacacgatccaagtggagacctccacagccaccagcctcgacttttttcacacccgcatcggggctctgagctgtcccagaagaaggggtcttcttgcttcctggccatgtgcagactcctggggacagcagatggggaggtggggatggggagggtaggggcggggggctcatctgtcacccgcattttctttggaattttttttttccttctccatgggcagtgctaaggcttgggccagggacgacttcccttagagctggagaccaccagaggaagcagccttcctgcaagggatccatttctggacctctccctatttaggacctggaggtatctggatgggcagtgcttagtgcccgggacccaagagacatagattgggggctcctgaaggtgttggtgtcacggtgggcagtcccttggggcagaacgtctctgtggcctatcccgaggctctgttcctcctccatctagctggctccctccactttcccctttcttattgtcccagtacacccagttctcagtggatgctcctgctagagtagccacatccccaccccgaagaacccctcccctgcttcctgcccctacctcagccagccggaactcactggctcagaaaagagttgggttctgtacccactgctctttttgcctgctgtttctccttctcctcttgggcatggccagtctagaaacctatggagaattcaggacctggccccaccagaggtcacttgagggactctcaaggtcagtagcttaggttggggtgtaggatagcagagagacccagcggtagagggaaagtctcattgcacctcggaaaggaaggagctctaaaggtcccccttggcccctcccttacctcataaaaaggcaaggcttggctttgtgccataggagggcagcctcctggcatttgcaccagggatgtttgatgcagccctcctgggtcaattcccggcaagaccctgcagtctggttgtcgtatagggtgctccaccaacccaccgcagtcctaaaacccctcagccctaggcacatgaatgcacctttcacccacccaaaaggcagtcccaggctcatgctgtgtgtgtccttgggtttgggttgacaggatgtcctaaagatgaagcggttcattctggaaaatggacacgccactttcatgacaagtcctccggctttacctgctctgatcccttcctggagtgcaagggtcccctctttcaggcgttctggcacctgccactactgctggctctgcctcccgggtgacacctctaggagactggtcacttcacagacttaatgctaaacttccccagagagcctttccctgcccttttgcccacaaaggggttcatgcctctgcatgggctctccttgcccatgatccaaggtagataccacttttgtgttaaactgggttaactcttaggggctgggtttagctatcctggcttctgaaaactccccccagccacactgtggagagggggtgtcacctaaaattccacctagttctcagaatgtcttctgggcctatgaacacaccagcaagggttggacaaacacccacagctgcctgagcggacacactgctttgaagcagcagcagcagcagttaaatgggcacctcggctcggctccttgatctagtgatgcaagcaccccatacggctgcttacctgccgaagagaatggaccagtgacagttgggtgccctgtagggaagctgggtgccctgggcacctggagtcagagggtagagcccacttgttcaaagactagccagatgagagacatctgtgatgccagggtgctcaaaacaggaaaaagcaagagagaccctctcctattcccacctccccccagtcagagcaaaaacccaggctaccttccatatccatttctggaacccatggagaggaggcctctctctgctagtgtgtattcagataaagattatttcaacccagaaatataaacatagctaaccttgtaccttgtagaaggaggtgctggctgggatctctttctctcgttccctaacctttctgaagattctggatggttctggcgtgcctcccaggttttgcatccgtgaacagatgacttcccatggacagagcttgagaaatacgaggctctcatttgggcctagcagggtcagagcctttactatctgtgcctggtccttccctccagacttgactactcatgagaaacaggtggcaggcaaggatgacagacgtgtgacaaggagacaggagggcccagagtccaagcccatggaacagcaccaaagagaagcactatgtggagagattgctttattttctgataatgacgttgtggctggaatgacttaagatgtatatattttttaaccggcagtccttcgtgctgtctcacccccctgtatggacatgtcctcccacggccctcatgtaaactacatgccctgggattatctcccatccagtcccatgtatctgaaatctaataaataaggaaaggtctgctga

SEQ ID NO: 53 - DNA, 104672 bp, Homo sapiens
  source 1..104672: mol_type = genomic DNA
aggcgaggcttccccttccccgcccctcccccggcctccagtccctcccagggccgcttcgcagagcggctaggagcacggcggcggcggcactttccccggcaggagctggagctgggctctggtgcgcgcgcggctgtgccgcccgagccggagggactggttggttgagagagagagaggaagggaatcccgggctgccgaaccgcacgttcagcccgctccgctcctgcagggcagcctttcggctctctgcgcgcgaagccgagtcccgggcgggtggggcgggggtccactgagaccgctaccggcccctcggcgctgacgggaccgcgcggggcgcacccgctgaaggcagccccggggcccgcggcccggacttggtcctgcgcagcgggcgcggggcagcgcagcgggaggaagcgagaggtgctgccctccccccggagttggaagcgcgttacccgggtccaaaatgcccaagaagaagccgacgcccatccagctgaacccggcccccgacggctctgcagttaacgggaccagctctgcggagtaagtatggggcgggcggtgaacctcggggcccggctggggaggcccgagccggggagcaggagcgcgcgccaggctccgatctggtttgtcacgtacgtctggggctggcagggggcgagaaactcccggccgccgaggtatcggtgactaagcactgattgtgttcctgactcagaccagttagcggatcccgcgggtctccattcctctctgtaccccttttcccgaccgttttagtggttcctggccactgtacagtcttctcccaagaaaataaaagctagcacgtctcccctgcctcctcccagttctgttctaaatgtgatcatctgggagtctggcctgtaacggggagaggaggctaatgttttggaaagaattaagatcgcatctgtgcttttgagaccagctcagggtattaagtgtggagcatcatcctcaccttcatgcctgacacctgtggggcctgagtgccttgttgcaggccaactgcctggccagcgggggcgtgctggaagtccgtgtggacttcgtggcttttccttgctgactttggaggttcctggtacttggccttcctgggaaattgctcaagaaagcggctttcttcttcatcctactcttcattcattcattgaacaaaccattttctcactaatgatttcctagctttccgtacttcaccaggagcccctaaactcctgacctgaggcatgaacaccatgacctagaaaccacatgctaggtgctccatctctgcagcttccagcgttgcttacaaacgagcactttatttcattaaataatcatgagtctgtttcctgggggtttctgagctcccacaactctcttgggttctaggtaagggacaagactatgtgagggaaagctgcttagctagctagagaaatagccagaaaagattaggttattattatttttttgcctttttttggttgttgtttgcccaaccttcaataaggattgggttcttaatcttttacctgcacactgcagactttaggaagctaattgatgaaatcagaataggcttggaccttatgctctttggtgatttctgtaacctcccttcctttctctagatttttagaaaattttattttttaaacttttatacagatggggtcttgctatattgcttaggctggtcttgaactcctggactctagcgatcctcccaaagtgctgggattacaggcatgagccactatgcccagccaactttctctagattttaataacccggggacctgttggcttgatgacttgttccatccctgtaatgatcacaaggtcgatggtggacctgtggtgtgtgttcagctgtgtttttcagacctgctcccaacagactctcttctttagtcccctctcaatcctgtggggtctattttgcataatactgacttgtataggtagttggattgcattattgcattgcaaacatttgttctttttttttttttttttttgagtcggagtttcactcttgttgcccaggctggagtgcaatggtgcgatcttggctaactgcagcctctgcctcccgggttcaagcgactctcctgcctcagcctcccgagtagctgggattacaggcatgcgccaccatgcccggctaattttgtatttttagtagagatggggtttctccaagttgttcaggctggtggcaaactcccgtcctcaggtgatccacctgcctcggcctccgaaaatgctgggattacaggcatgagccaccgtgcccagcccatttgttcagttttagtatacagtgtttcaccctcttaaaatagactgaaagtcatgactgttgttaggacaagttttgaccacagtggattctggctgagtgttatggcctcattatcctttcctatttgatttggaagtggatactgagtagaagtacctgttatcattctgttgtaatcgtgataccacaactgtattctctcaaggaggaggaatttcattaaaacagtaaaagcaggatgagaagaaactaccccagatttggtggcagaaaaatttggatggtactgggagagtctaaacagtggttaaaaggtaagggctctggagtcaggctaagtttgaagcctagctctgttgtggttttttttttttttttttttttttgacagtctcgctctgttgcccaggccagagtgcagtggtgcgatctcggctcaccacaacctccacctcccggcttcaagcgattctcctgcctcagcctcctaactagctgagactacaggcacgtgcaaccgtgcctggctaatttttgtattttaatagagacagggttttaccctgttggtcaggctggtctcaaactcctgacctcgtgatcctcccacctcagcctcctaaagtgctgggattacagcccggcctctgttgtggttttgtgacctggttcaagtcttttagtctaaggcttaggtttagtttttttcatctgcaaaaatggggctaatgatagaacctacttagcatagttgtgaagattaaatgaggtagtacatagtaaacttccaaagctgttggctgctggtgcctttgttactgcctaagtgttggaccaaaggaaactggaaggtgattttcattcatggtggtagattatgtgttaaggtgcctttgcttctggacaatcaactctccctagtttggttttttgtaccatctgcatctacctctatgactcattgctgtgttacaataggaggcatctttgtgtaggctgcccaagacaaacagggactgtttccctgtgtttcatagcactaatgagagggaaagctgtacacatcttcatctttcacttctgagagtgttcctcaagcaaaatgttccctatcttgggctaccagcagaaagaattctgttgctttcatgatttctgtgattagaccagggcacaattttgaacgttatcagacaatgtgaactaaagaggaagaaaatccattttgacagtaaagaactcttggtaccaaattggcaaggttgcttttcccttggcacctgtgcttacctctaacatagcccttacccagttcagagatggagttgggtaatacgggacctgaagttgatgcaagttgtaggggtcctcaaagaaaaatcatgcaaaaatagctttcttttgtgtattttgcagaaacatgtgagcatattactagggtcttaagtgttagaatgagataatgagataatattgttcctctgtttaaaatgttcttctggttctattgcagttacacaaaatccaaactccttatattggactatgagactgagtgatctgcctgttgtccccaccaccccctcccaccaatctctttaaccacatttcctgccactcctttcttccaccacactagtcctctttcacttcctctatgggatggtctatacgcactgcaggcctctgtacatgctgttccctttgcctggaatgaatcactcctccttccctaggtaggcaggaagcagtcttcacctatttgcctaaatgtcacttcctctgagatgtttataagcatctcagaggaatgtggtccctctttgtcatgtcacctgagctgctgcttttttttttttttttggtatgggggtcttggtatgttgcccaggctggttcttgaactcctggactccagtgattctaccacctcagcctcttgagtagctgggactataggtgggtactactgtgcctggcgctcacctgagcttttaataagacttaatcattgtaatttttcattggggtgttcttaatatttatctctcctgtacactataaactttaagcacagcactgcctttttgttttttgagacggagtctcgctctatcgcccaggctggaatgcagtggcactacctcggctcactgcaagctccgcctcccaggttcatgccattctcctgcctcagcctcccaagtagctgggactacaggcgcccaccactgcgtccagctaattttttgtatttttagtagagatggggtttcaccatgttagccaggatggtctcgatctcctgatctcgtgatcccaaagtgctgggattacaggcgtgagccactgtgcccagcctgcactgcctttttttgactcaccactctgtaagtacacccaaaatagttctggcacataataggtccatagatgtttgttgagtcagtgagtgaatgaaatttctaatatttgcacaacgggtttaataaacctttttatgtcttttccttttcttttcccctttatgctcattccttttttccccattttcttttgttttagtcacccactcaaccattctaagatatttatatggttttataattccacctgttagtctggttatgtgtatacccttgggaagtagaaggatggttttgtatgtatctgcttaggattctaaaatgttattgtgctacaaatctgcatttcatagacaggatagaataggttatgttgaggtaacaaccacaaaatctcagtaatttaacacactttcaggtcagtgggaggctctgtagattggagtcctttagggatccaggctgatcgaggcatcgtctctcaagtatacctacatgaggagggaatcttgtgaagagctacattcaggctcttaaagttttgcctagaggtgagccttgtcatttttgctgccatttctttggccagagcaaatcatgtggccatgttgaccttcaaggagggcagtgacctttttggaagggggagaaccacgaatatttgtgtgttttttttgggttttttttttttttttttttttttaagaaagggtttcgctcccactgcccaggctggagtataatggtgcgtgccaccacgccctgctaagttttgattgttttgtagagatggggtttcaccatgttgctcaggctggtcttgaactcttgggctcaagcgatctgcccacctcatcttcccaaagtgctgaaattataggtatgagccactgtgctggtgcaccaggagtatttgaacagaagcaatgaccatccctaaattttatatcagtttcttctttgttttcttttcttttcttttttttttttttttgagatggagttttgctcttgttgcccaggctggagtgcaatggcatgatctcggctcaccgcaacctccgccccccaggttcaagctattctcctgcctcagcctcctgagtagctgggattacaggcatgtgccaccgtgcctggctaattttgtatttttagtagagacagggtttcaccatgttggtcaggctggtctcgaactcctgacctcagatgatccgcctgcctcagcctcccaaagtgttgggcttacaggcgtgagccaccatgcctggccttagtttctttttttaaccaattttgttttgagctctattcatgatgctatacaatatgtgtctagttcattatttctcttggttgtagagcagtcatgtttgcctgccacattttacttatttatttctctagaattagacatctttgttgtttcccaaccccttgctgcctcaaacagtcatgaccatgcccatccttgcacatccttgtctcctttggatgttgtgagagagtttcctgtggaatgtactcagaagtggaattgctgggtcttagggtacattgtctctccttccaggataaggcatgttatctctttctctctctctttttttttttttgagaccgagtctcactctgttgcccaggctggagtgcagtgttgcaatcctggctcactgcaacccctccccacaaggttcaagcaattctcctgccttagcctcctgagtagctgggattacaggtgcctgacaccatgcccagctaatttttatatttttagtagagacagggtttcattatattgctcaggctggtctccaagtcctgaccttgtgatctgccctccttggcctcccaaagtgctgggattacaggtgtgaaccaccgcaccggctattaatctctttctttaaaacaataccgttaatccagttgcagtagtgaggcagggtacctctcaagatctcactttttctttgaccttgggcaagtcctttctactttctgactcttggtttccttaatctgtaaagtggaggtgataattgtttacaaaatctttaccatggtggcctacaaggccctacctgaccaggtccttagttttcttccagtgttctcttcactcatgcactctagccacactgtcctttgtgctgttgggttgtaggttgggcacattcttatcttagaatctttgcatttgccattcctgctgcctggaaagcttgtctctcaaataccgtatgacttgcttcctcacttccttcacccctctgttgaaatgtctcttcacagaggccatctttgatcactgtaatacagaactccctgtcattttctaccctttgattttgccttatttttctttgtagcgctgatcactaactgatgttacatcgtgtataagtatttatcttcttctgccaccccaagtgtaagcttcatgatggttggggctttgccttgttcattgctcagtgtgtagaacagattctggcacatagaaaatactcagtagatacctgttgattaaatgattgactagatcctacctcagaggaatacctttgaagatgtataaaatttctttgaaggctataaggtgccgaataaccttaggagggttcactgcttggccttagtagcgttcatgattttggattttgaattgtttctatgtaaccctgaaacactcagacttacttattgcattcagggtgtagttcatagcatcagcagttctgccaggtttgtaaggaacacacatctgttagagtgtgaaggccctggaggaagaaaggttgagacaggttgatgtgcttttttttgtctcttatggctctttctgagatgtgtaccatgatgataaccaggaactttttttttttttttttttttgagagacagggtcttgctcagacactcaggctggagtgcattggtgctcactataaccttgaactcctgggttcagggaatcctcctgcttcagcctcctaagtagctagtactaccggcatgtaccaccatgcctggctaattttaaaatttagagatagggtcttgctgtattgcccaggctgggctcaaactccttgcctcatgcaatcctccctccttggcctcccaaaagtgctgggtttacaggcatgagccaccatgtctggcctgataagtaggagcttttgaagtggtttcacactgattttgtagttttgaacttggatgcttcttttgggtagttgatgcagtaactaatactggtgctgtctttcagaacagcttcatgtgaaaaaggcctgcttaagcctgtgtctttgggaagaacatctctgccgctgttacagcagatacagtaatagcaaagaaagtcttaaagatgatttagcccatggcaaggaaatatatgggactcttgtttgaatataaacactcacagaattccagtttcacttatttatgcacctttcaaagaaaggaagaagatactgtggtagagtacagtagtcctcccttatctgagtggcatatgttccaagacccctagtggatgcctgaaaccacagatatcaatagtaccaaaccctgcatatactgtgttttttcctatgcagtatatgcctatgatgaagtttaatttataaattaggcatagtaagagattaacaataataaccaataaaaaagaattataacaatatattgtaatgacagttacatgaatgtggttactgtactcactgtgggtaactggaattgtcaaagcaaaactacatttaagtgggtactcctgtagctgttggccctgccttgcctatctagcttaattttcctctgtttttccgttcacctgctgtggtccacttaccactttctttactctcctcactgtgccaccagcatactgttgcttaccttcttacatctgtctggtcttgctgacatggtttttttttttgtctgaaatgccctcctccactttcttgcatgatttttttttttttttttttgagacggagtctcactctgtcacccaggctagagtgtgcagtcacatgatcttggctcactgcaacctctgcccactgggctcaagtgagtatcgtgcctcagcctcccgagtagctgggattacaggcgcacaccaccacgccgggctaattcttgttatttttagtagagacggcgtctcaccatgttgcccagcctggtctcgaacccctgacctcaggtgatccactgcctcagcctcccaaactgctgggattacaggcgcctggccctcttgcatgtttttatttttgttttatacttgccactacactttaacttctgtgaaaacagggactgtgattgtcttgtgtactggtatttctccaccgtctgctgtggggcctagaataaaataaatggtacccatcttttttgttttgttttgtttttggagatgagtctcactctgtccccagactggagtgcagtggcgcgatctcgcctcagtgcaacctatgcctcccgggttcaagcgattctcctgcctcagcctcccaagtagctgggctacaggtatgcgccaccacatctggctaatttttgtatttttagtacaaaatttaaaaatgatggcctcgatgtcgtgatccgccctcctcggcctcccaaagtgctgggattacaggtgtgagtcaccgtgcccggcccttttgtttttttgagatggagtttcactcttctcatccaggctggagtgcagtggcatgatcttggctcacggccacctccgcctcccacattttcctgcctcggcctcccaagtagctatgataacaggcacacaccaccatggccggctaatttttttatttttagtagagacaggatttcaccatgttggtcaggctggtctcgaactcctgacctcaggtgatatgcctgcctcagccccacaaggtgctgggattacaggcgtgagacaccgtatctgccccggatggtaccgatctttcaagatcttacataaagcttatctccaatgtgtgtagtcttttctgagcaactccatgccatgctcagttacatcactccctacttagttataatagttcttttttctttttttgagacagagttttgctcttgttgcccaagctggagtgcaatggcgtgatctcggctcactgcaacctctgcctcctgggttcaagcgattctcctgcctcagcctcccaagtagctatgattataggcgcacaccaccactcccagctaatttttgtatttttagtagaggcagggtttcaccatgttggccaggctggtcttgaactcctgacctcagttgatctgcccacctcggcctcccaaagtgctgggattacaggcatgagctaccatgcctggcctgtaacgcttctttttttttttttttttttttttttttgagatggagtcttgctctgtcgcccaggctggagtgcagtggcacaatctcggctcactgcaagctccgcctcctgggttcacgccattctcctgcctcagcttcccgagtagctgggactacaggcgcctgccaccacgcccggctaattttttgtatttttagtagagacaaggtttcaccgtgtagccaggatggtctcgatctcctgacctcgtgatccgcctgcctcggcctcccaaagtgctgggattacaggcgtgagccacggcgcccggcctgtaacacttcttaatggtgtgacctcggtcatatcacttaacctcactgagcctagttttcctcattagtagagtaaggctggtaataagaaacccatgagggaagtagggtgggagagcatcatccaaaataacatacacggaagcactttatggggaggcaagagtgggaaaagaaaaaagcactttatgatcactggaatgctatgcaaatggatgtgttaatgatgccggcttttgatttcttccttcttagaaggctgaatggttccttttgttcttaatagcaaattgtaaatgttgataaatcatgttgatttagatatttcatacgctgcttgtccttcaaatctagcccaaacctacatctaatcaagcctttagacctaacttcctgtttatagcaaatacggggatagaggaatgagttaatggcaccaagaggaaacaatcagacaaacctaggatgtggaacattctctaagacaactgacctagtctcttaaaaagtcagtataggccatttgcggtggctcacgcctgtaatcccagcacttcgggaggccgaggcgtgcagatcacgagctcaggagttcgagaccagcctggccaacatagtgaaaccccatctctactaaaaatacaaaaattagccaggtgtggtggcacgtgcctgtggtcctagctacttgggaggctgaggtgggagaattgcttaaatccaggaggcggaggttgcagtgagccaagagcatgccattgcactccagcctgggtgacagagtgagattccatctaaaaaaaaaaaagtcagtataagggtgggcatggtggcacacacctgtaatcccagcacttgggcacttggggagacctgccaagtcaggaggattgcttgagcccaagagctagagaccagcctgggcaacatggtgagaccttgtctctacaaaaatacaaaaattagccagatgtggtggtgcgtgcgtgtagtccctgctatttgggaggctgaggcgggaggattgcttgagcccaggtggcgagattgcagtgagcggtaatcgtgccactgcactctagcctgggtgagagtgggaccctgtctccaaagaaaaggtgatatcaagggaaaaaaaggagagtggtgctgttctaggataggagactaaggagacatacagatcaaatgtactgcatgggttgggcatggtggctcacacctgtaatctcagccctttgggaggctggggcaggaggatcatttgagcttgggaggtccaagctgcagttagctatgattgtaccactgcacaccagcctgggtgacagagtgagaccctgtctcaaaaacaaaacagaaaaaaaaatgtactgcatgaatcccaattgtgtaccggatcaaaaaatagttataaaatgcattgttgagacagttggggaaatgtgagtagagtattgctaattttttttttttctttttttttttgagacagtctcactcttgtcgtccaggctagagtgcagtggtgcgatctcggctcactgcaacctccgtctcccgggttcaagtgattcttgtggctcagcctcgaagtggctgggattacaggcacgtgctaccatgcccagctaatttttgtatttttagaagagacggtgtttcaccatgttggccaggctggtctcaaactcctgacctgaagtgatccgcctgccgcggcctcccaaagtgctgggattacaggcgtgagccaccgtgcctggctgtattgctaaatttttaatgtaatgatggtacagatattatataggagaattcatattcatacataatgcacaaaacttactctgaggttcaggaaaaaaactcaaacatacacaaacagtggataaagcaaatggaacggaatgttcacagttgttttgtttagttagagttttacttttattctttcaatttttctgtatgtttgaaaaaaatttgtaatacatttaaaaagtaccccaaaagcaaaactcattccaagtcttatgtactttaatgtcaactaatatttgctctttcccatccctagattcctttgtgctgcttgtctacattgtatgataaacatcacattaaatgcaatctctcccctcccaccccctctttttttttgagataggatctcgcttgctgtgttgcccaggctgcagcgcagtggtgtggatcgtggctcactgcagcctcaccgtctgggctcaagtgatccctccccagagcctccacttcccagtacccgggactataggcacgtgccaatacacccagctattttttttcactctcgcccaggctggagtgcagtggcacgatctcatgtcactgcagcctccacctcccgggttcaagtgatcctcctgcctcagccttctgagaagctgggactacaggcatgtgccaccatgcctgggtaatttttgtatttttagtagagatggggtttcaccttgttggccaggctggtctggaactcttgacctcgtgatccgcccacctcagcctcccaaagtgctgggattacaggtgtgagccaccatgcctggctatcgcccagctgtttttgtatttaattttagattcagggggtatatgtgcaggtttgagcatgatgctgaggttttggcttcttgcataagtactttattatattactatataatttttattcactaaatctactttatgaatctttttcttattaggaaacatactttttttgtgtacagtgtacaattgaatgtacagcattgctgattcgatatatcattattggtagatttgagaacaccaaaatacatttaaacaaacaaactagcaaaaaaaaaccttttctgctggcttttcttttcttttcatttaagacaggttctcactctgttgcccaggctggtctcaaactctttggctcaagcgatccacctggctcaacctcccaaagtgctgggattacaggtgtcagccactgtgcccagacactttctctttttttcttaactccctctttggaactttttgctagcatttctctgtgtggatattccaccacatccccctgaagtatgagtcaagcagtggtgaatctttctgacacattgagaaagcaaatccagagaacacagagactaggaacaaaatgaggcaaacctgagaaaaaagcttagggttccagctttgtttctgttgttcacttccagaaactgccaatttcgaaaaatcgtcctggtctcttgctgcaacttgattgtgtttttacttcatgtcctgtgcccttgttgctcagaatcccaagagagctgtttagaggctcagttacatgtttgctaagttttcgtcttctcctcccaagatgaatagtgttttgttttgaaatagcaggtgttttctgaatcccatgaagggccaaaagctaaaagtgctgatcctgactctgatttcgctgcataactcccaggggcatcctgctctgatgtcaggaagggagtcaggttaagaagaggtcacctggaggttgaagagaaaatggacaaggtagaaagaccttgagcccctccctttgaatagttgcctgcttaaggacaatgctttaaaatttttgaatgtatgaataccttctaaagaaaaaacctatagacattacattctccagtttaactgtgtttattccattgtatatgtttttggatagtcgagatcagttgattttttcctgatttttacacatggacataatcctcatccttgtcatttttattggctgaagagtagagtttgataggatctggctaagcaaatgacactttgttgattattaggtggcttccagattcttattatttaatgataggcttgtaaatgtttttgagtccatttattttgttttgcttctagatgaattcatctaccaaatcagaggcaatggaccgtgctactgctgttgttacatattaacagaatatgttccaaaaaaagattgaaccaatttacaatgtatatttcaactgtttcctcaagcctcagaactttttttttcagtttagtggtttttgatagtttaataggcagtttaagggctcctttaaaggtcagcttgcttccctttaattgttgtatttttgaattgcatcaattcagtttaaactcatatttattgaatgcttactgaatgtaaatcactattctgggagctgcaggtaggtgactcaagatgagtaacattatctcagccttcaaggatcttaaaatctaatatgagagtgtagggggagattttaggagcacaagaaggaggaaacaatggctgcagagtaagaaaagtgccacagaaaagctacaaagcaagcactgttggagcttggcctgaggagggagtgtgcgcatccaggaggggagatgaagagagccttcatggaggagatgacagttgaactgggtcttgaaggatggctaggattccatgggaatggaggggcgtggcaggaagagagcacgggatgagcaacttcacacaagtgggaaagcctgggatgtgcagagaagccagcaagtagttgagtgtgacgggtgcatcggttcgggtcgaaggaaatgaagctggagaggtaggctgaggtggttttgtggttccaggctgaacattttgaaaaatcacatgcaaatttttcttcctttctgatcattttaaagtatttctgagtagtttttatatgctttgtattttgaagttttataaatgatgtggttactacattgttccattgtgtgtaatgtattaagaaaaaatatttcatttttaaatattcaaaagcgtgttttttgactgggcattatgtatagcatacttttcattagcggtttaacatctgtcatctctacacaactagcaggaatatgtggcttcattttcttctaacctttttcccccttttgtgattaactctttttcccatgtggaattaatatgctcggtatgaggtgtatgtctaagttaatttttctccacagtgaagtctagtgtcttactggagtttactaaacatgatgcatttatccatctgttgtattttcaggtttaccttggtctttatgatatttttatctactaaaacttttaacccactcttacgtagttttgagagtcatatatattttttaatttggtggggttaaggaaaacttcagcaattttcgtggggtatctttccatttgttcatgtgttcctctttctcattttagggtattatagtttcttaataattctcttgcgtcctgagttaatatttcaaatacgtaacattttgatgctgttgttattgaacatttttaagtttgtattttccatctcgactatggtttgttttgtatgaactggttatatccagcagctttgttaaatccacttaatctatctagtaacgttttttgattgaatatatatgcatttgtagatttactagtgtcatctgcaaaacaactttttcttttcaatgtgatagatattttatagctgtctcatcttgcgttgctctcagtagcagttctggtgtctcagggaacactattaagtgtaacgaggtttctcaaggacctcctgggccagggacttttctgttctttccaaggagctgtgaaaaaaggaagcagctgcccagatttatagaagcagagcttattagggctggatgggacctaacaggttctctagacctgggccttcatttgagagatgaggaaaccagacctagagaggtgtgaatttgccagagttcacactgctgcagtggaaggaggtggttgagcttttactcttatttttttatggtacatattacatacagtacatgttttcatttgggaaagttacttggtttgacagttttccaagtttacccaacattaaattttggtaactatgcaatatccttaaaaaaattattttcaagtaattatctgaagctctagaaaaggttacccctctatatcctcactctcctaggtggttgagggaaaagagaataaagaaaagttgtggggttggggctgggacagggaggaaagggtattttagtccttgatccttagtaggagggcctatttttaagcttcataatgtcagttttaaaagcagtggttttcaaaataaccgcagacgaaagtccccttgaaatggatgcctttctggaattgacctattttgagtttagctgttaccagaagggttcagaatctcgaatgctcttaaatgcatttacttttcagacaaagtggaaattgagtgcataatccacgtgggttccagattcaggttaaatttagaaatttggggagttgtggagagaagacatgaaatgagtcaatcgttgttttacaggtttgtccgaatccaggttaattatatttccttctttattgaattataatttgtatatccaggttagttttacaaattagatcagaccctcagtccatttgagagtagactcagagtcagaattatttgccccctttgctgctttcataccaccctttagtaaacagtcctcaagaatgtccttatgtcggggagggcagacctcagaagttagcaagaattccaagctcactgtaaaccttttgtttaatggtttactcaaatccagatagaaattctaccaaaatgccagcctgtatttcagctcctctttcttggagtctttaggatggtgggaaaacaggcagaagaaagctgtttaacattccaataattattaataatagaaaatgtatcctgctaatcaggcactcatttgcgtccactgataaaactaggtcattggagccaaggaaaggtaccgttcactaaaggaaagaccagtagatagtcaggcatggtggcgtgtgtctgtagtcccagccactcgggggctgaggcaggagaatcacttgaaccagggaggtggtggttgcagtgagcggagatcgcgccactgcactccagcctgggtaacagagtgagtgagactctgtctcagaaaaaaacaaaacaaacaaaaacagtggaatattgggctaagctcttaacacattatatttagagattgcaacacttcaatatttactggaatactcctataaaacggtctcttttgccttgttttattttggtaactaagtgaatgctgggttagccataaaggtagcttgctgcatttctatttcttgtgttctaaatcactgaataattttttaaaaaagtagttctaaagcatttccagttaaaaaggaaggcgtaacatttattaggggaagtcaaggggagaggtagtgaggaaagtaccagaaaccaccaacaggtgtttcggttacgttgaacaaagaatcagcttgatatgcagtccctgggaagagtttgtaaattcctgaaggagggtgagagctggaggggacacggtgagcggaaatggtgagcggaaatcagtggttcctgaggcacagaggacttgggttaccggaggcttgccctcagctgaggacctgggaacaattcctgagcaagttgcttttttgatagacaaggatgcatctgtaggaccactgctgttaatctgtggggcaataagaattgatcctactgcaagaaagagagtaggataagtcagaagacatggaacttgtatccctagaggacatcgcaactggaaaaatagctaccatttatgaaggcctacctcatctctttgcattcattatcttgaatttgcactaaaattctgcaagaaaggtcatagtattctattttacaaataaggaaaattaagctcagggaagttatttcataaggttgcacaactagtaggtggtagagctaagtttagactcaggtctgtcctactctgataggcatgctttttccacacggccctctcagtactgtgtaaaatgccagagggctttctggatcttcacttcccaaaactgctaaatttaaattaattaaaattaaagttgaaaaatcagttcctaggttgcactgcccacatttcaagggctcagtgtccatgtgtggctagtggctactatactggaccagcacggattagaatgctttcttcattgcagaaagttctattagtgctggtctagaggtcattcagttttgcccctttatttaattttttcccccttttattccacaaaggagaaaatgagggacaaagaaaggaagtaacgttcagcatcagacagctaattaatccagttttttggactggttgcctgttagattttcccatgccccacattcttcccttaaaaaaatgaacagaatggaaatgtgagaaatggagtgactccgctactctcccagctttgcctggcctttaaactagattctttctcccaaagaatcctgcattttaccaagttcaaagggcatgtccggattagtttccccaaaggaaatgaaatatatttgttggaaaggaattccattcttaatgtatgaaatagcacttggattccctctggttctttctctgacttcctaccaagcgctttgtaattgaacttgcagctgctaaccatttgtcttccaaaggagaccaacttcaaacagttcaaatgacagagggatgtatactttgaatgcaagcagctgcctattatttgccattgattcaaatggcatttatgttagagtcaaatagatttagattatggccaaaattacaacaatagatttctaacttgtatgttaagagtaagatgtattaacagtcattgaactgatgtttagtgtttaactcatacataccaggcactgggttgcaacatgaactaaaaggacttttgctgaaatggaaaaagatgtcttattatggacaagttgaatgcattttaaattcctgtctgaattatattgctggtatttgccatccatgtaccttcctgtttagccttgaaattcagtaaaagcctcagtgtggatcatacttcatagctctgaagtaaagtgaggagtcatgtgcaaatgtccttttagtagatgctattaaaaggcatttaaattatacactccagtgtctaaatgacagtctgaagtgtatgtgtgtttggaggatgggcaagtgggagcaaaaggaggcattgtgctggggcgattgatatttttaggaagcctaaatgtaatgtttgatttcggtataactaacagactcatggtttagaaaagttgtctatcaaaaactgagaaattgaggttttggtttcttcttaaagaaatgttcaagtcatgtgcatgagtatgctcagagagattaaaaatggagagaaattggaatggtggcaaggtatccaggaaagtacctgtcttctctgagagtccaagggcaggagcagaaaggactttaaagatggtggcaacaggctgggtgcggtggctcacacctgtaatcccagcactttgggaggctgaggcgggcggatcacctgagctccgcagtttgagaccagcctgaccaacatggagaaaccccatctctgctaaaaatacaaaaaattagccgggcgtggtggtgcatgcctataatcccagctacttgggaggctgaggcaggagaatcaattgtgccattgcagtccagcctaggcaacaagagtgaaactctgtctcaaaacaaaacaaaacaaaaaaaaagattgtggcaacagctggaaggggtccccaggagctctgacacagggttttccaactgcccaacatcacggggttggggagcagagcatccagagggctccgtgtattgttttgtagtatagggtctaacttctagaaagttgggaataggcttctgagagttttggagtcaacaggcctgaatgcagaatgatcaaaagaagatggctattcctctcagagtggtgctggttttgggggccagcagtgcagtgaaaagcccaatttcccaatcctattttgaatatttctgcccccacaagcgtttcatttgactccagagactaaccactcttccagagggtctagaagtcttcaggcttcagaatttttaggccatagtgctttggaataacagtcccttgtgtagaaaagtgtgagatctgagctcttttcctggtcaacctgtgaagtcactgcatgaccaactctgtgcctcaggttttttctctgcaaagtgggagtgatggtaatggcttcctacctttcagggtttgtatatgagctgcacatagtttcatgggttaccactcagcatgctttcacgcaagtagagattacattttattgttgaaagaaatcttggttgtcttctgttgtaatcttaccttgaatccagggctacaaagaagggttaaagctagatatggctcatgcctgtatttccagctacttagaaggctgaggcgggaggattacttgagcccagaaggttgaggctgcagcgagctgtggtagtgccactacaccccagcctggccaacagagcaagacttcgtctgttaaaaacaaaacaaaagaaaagaaaaaccaaagtaaggttaagagaagttggctatgtcacacagtatgttctatttggaattttgtgacttttgagtaacataacctaaaggccgtgtggcacagtggaaaggctttgtagccagcagactttgagtttgaattctgaccctgccttactatgtctgtggtcttgtgcaagtgcttttacatccttgggtctgttcccacatctgtaaaatgggcataacaacatttatccaacagaaaggattcatacactctgtgtgtaaactgctttttgtgattaacaagactaatgataacagccaagattagatccccagtgcaggttgccttactttctatcaggtgagaaggagagaaaattcttatttcccaaagaacttacagtgacggggctcttcagctgctctttatccaacagacttagaatagagacaacaccgggcatacttgcaattttttaggatgtgcaggaagcaaaagaattattttcagtgaaacaggagtctgcaaaaggtgccttaggaaacaactgccacacagtacatcccaatatagactcctcccagcttctctagggcagccatctgcctgacaggccccacccagataagcccagctttcttctcccaagagtttaaggaagatttcctgatgtatgtgtgcgtgtgtgtgggggtggtatggggttgtgttgggcgggggtcaagaggggtgttaatttgggatgggtagtcactggcttttggtggcataactggaaggtaacactccctgtggctgaatcctgatccctgtggggatcagcgcatggttcatccagacatcttcctcagtgggtcctggcctctgctcatactatgtcttctactggggattcccgtctccacctccaatatacgtatgttgaaatcttcatcttacgtcaaagctcaacttggaggtcatgtcttatgtaaatccatcacagacctctcctccaccccatctgggcagcggtcatctgctccaccctccggagcactctgtacatattccatcacacttcagttacttatgtaattgtctagtcagcagaagatactcctctccaaagggcaaggttctgctaaccgctgtgaagcctggctttgagtttatgaggggtgattcttttcagtttataatttcttggcacaggagggtcacagtgttgttggtaaccgtagcatctgtcctgggaggctctgtatgctcttcattgttcatacatccatttatttcttcactcagccacatgaggcatgtgggatgtatgttatctctgcttgatacatgaggaaactgattctggttaaaggacttgtgcctgtcatacaggcagctaagagtgcctatagtcctttgtattgccttttcagccaacagtcccatcccagcccaaaggaggaaacatttggggagcatatactggtgagaacatcttccctattctgtggcgttctcttagccttatgcctggcacagaggaaggctctgggaatgtttgggccggatggatctgggagcctcttttgcatgccaagctgcatacttatccctagcaaatgctggtctccttgatggatatgtgacatgggtggctgaatttacatggcacctggtggcttctcacactcctccgccacgcctctggggactaggataggacagatggccacagacaggattctcagctctgcaaatcacatttgggaaaaagttaagtttgtgcaataacacaattttggtaacatggtttcatgctgctggtaaattctataacactctctggataaatcacacttcagcagaactcacttgggaacagagtttaatttcactgtaggtggctgtgattcccacccaccagtcttcacacccccgctaatatatctaggctgataaggtgaatgctgtgctaagcaggctatttctgggcccaggatagaattacattgtggtttttaaagaatttttttctgtatatttttctattcacagaccctttgaaagaagaattacattatgttaatcatccgtttccccatcagcacctttaattccttctccccagagtataaccacttgtccttaaaatgacagaggtggaaaagatcttgatagttcagcctcctgtatgtatatatgaagaggttgaggcccagagagactgggcagcctactcagttgtcagatggctggtgaagacctgcatccggatccgttgacttctctcctgtgcagggcccttgttttttgccctgccctactgcttaaccttgtcttctgtcttacaactaggggagagtctatggcatgttcagtttgaaatgaataaaagtgaatacttgttcattgttaaaggaccccaacacagaactaatttcctgttaacccttacattttctcttgacatatctttggtgaggaccattaaaggcttaacacatttctgtacagtgacatgcagtcctaggggttaactgtgtgggtttgagcgataggatttaacttttaggaaaaaggggaaaaaagagagaaggttgataagtgtatttggagagagagaaaaaatagttaatttttctcttaacagttaatctgaaatgataacacaattgtgccttttggctctaaaatcaccatatttttgatatataatccaaaggcaggtatccagactgctgaaggcttattaaaatgtaacaataggtccaagtctagaacttgaaaaaacttctcatttgtcaaagaagttccagtattctacattctcttgctaatgaatttggggagccttggaagctcagcaactgggatgccatcgacaggtttgcggtcctctctagtctggggtaggtcttaaggggaaacttttgggagggacacacatacagtacagtgaaactgtacatgaactactcaggagacagatcacttggcagggatgtggcgatctttgtacatatttgttctgctttactagctacattgtaagcttctgcagatgaagagttcagccttgatgtcccatctcccgcccaggcctgccatgtactagttgatcagtaaaagtggaatgaatgaaagccagtgttagtttacagagcttctgtgggacagaagctttgttcagttgagtttccatcaatatcaaatgcaatgttatgtgcgttgagtttcttgataactgttcttgaggtttctttttttttttggtcctttttgactgattaagcaaggctggactggttggagaccccagatgggaccaagaaatgcgaatcctgcctggattgttgtaggtagagtgcttaatatggggcctggcatgaaggaagttgggagtattatctggtcaactggagtttagttattaggttgtaaatgactatggtaggtacagatgtcatgaatatactagggtctcagggtctgaaagagttaaagctcctctcagaatagcccaggcagttcccaggaagtagcttcttaggcaggatgtggcaaaccagtgggtaaatgagagcccttctcctttggaagaaaaggaagtaggtggggagaagtgaagaggaagagcttggtagacaaatctttttatctgcttcttttttaagtgccagacagaccctgcagatttttgatccaaagtgaccaaagtcctaagaatgccaataatattggttttgctattgtcttttccctgcagctaataactcaagtttaagatccactagagtgttgtttcaatagattttgttttctaattttgatcattggtgtattcttcagtgcgctttcaagattcacagtgaatgtggtgtcatccaaaatcacattcttttctaaccaaggataagtcagaagaaaagatatatatatgtatattagaaaagtgtctctttaatgtgtttacctatttatccattttaaaacacattcccacccattctctgtccaggtgctcataacagtcccttgtgatacaggacaagagtgtgcttccatttaaggcaggagagagatcttgcccatggttagatgaccagttaccagcagagttaatagagggctccagaccctctgacttcaagttcagggttgtttccacaattttggtcctttttgttaagaatatagtttatacattggagacaaattattgatggaggctgcaattttgcaaataaaaataaccctcaaaaatccagtaatgtgtatgtgaaatgaaataggtgaactgaatttggtgagctttagtgtcgctgtaaaagcaactatcctttgtaaacttactgcatagctaataatgtaaatcagtgttgtgtttaggaatcagctccaggactgtggtttgatatgtggaaacacctctgcgtttgctgtgggctggtagacagaatgggctggacctggctgtactgtgaaaggcttctttgagctggttctttgaccaggtaatgaaaacgttaagcatctaaaaacgaagtctttaggaggcttccaaggatctggaaagctgaactcagcaatttttagacttcagttttctggacaggacagctcttctagtcaaggaagccagtatctcctgcatttgtgtagctcttgactccatttctttgaaggtttcaaatgataatttttacacttacccagataatctactctgcctgagcacataattggtaatttggcccaaagactgcatacttagattgcatcctggtcacactgatatcttacatgcattttagatatttaaatattaaaacaaatattcttatggcaatttttgtttgttttgagatggggtcttgccgtattgcccaggctggagggcagtggctattcacaggtgcagtcatagtgcactgcagcctgaaactcctggcttcaagccatccttacatctcagcctcctgagtagctgggactacaggcgcatgccactgtgcctggcccttgtggaaattttatttatttatttattttattattttattattattattattttttgacacagtctctctctgtcgccctggctggagtacagtggcgtgatctcggctcactgcaacctccacctcccaggttcaagcaattctcgtgcctcagcctctaaagtagctgggactacaggtgctcgccaccacgcccagctaatttttgtatttttagtagagacagggtttcaccatgttggccaggctggcctcgaactcctgacctcaggtgatccacctgcctcggcctcccaaagtgctgggattacaggcatgagccaccacgcttggccccttgtgtcaatttttagaagctaggatgtcaggctgctctttactgaaccctaaatatcctgaagcattctgggctggtgtctaggaccatcttgatcctaagggaataagcttgactcttctcctcttggtgcttcagcactgcattttcctcagtgggattggaacaagcattaaagcaaaacaaaaagttgtaaatgagacttagggcaactaacctgctctagccagaatgaaaaatttgttgacgtttaaagttctctgacctccctgtgtctacctgttcataatactaaaacaaattatgaacttaagtaataagaaaaaagattatggcagatttcacacagctaaaataattacaagaattcagcaaccacaaaaatatttctcactgcaaattctcatccatttctgtattgtaggcatttttttttttcttttggttttagtgtttattgtatacctcacactgggttagactcaagtttgggggatacttccagcttaattgagggtatgagcatgtaattgcaaggcattgtgacacatgctctaactctggtgtgtgatacagcacaggctatgggaactcaaagggtgagtgactaacgctgtcttgaggagtgaaggactgtatccccaaagcagggatctgggcctgtcttggggtttttgggtcttctgttttgttcttatttttttcttcttcttcttttttttttttttttcctgtaaccttatttatggtgaagggacttttttttttttaattgtttacacttgcccttttgatatcctctgcattcgtggctcttatcatcatcttagacttgtgaacctgcctcaggtctctgttaggagtttctggcctatctggtcagccatatactgagtagctccacacgtagagcctgcaggttatctccaactcaccttttccaaaaaatagatttataatcctcttgtcgcctgtgatgacctctcatgctaactacccagagtcaggcagacctcataggttaaacacacagtcctctgtaagactgcccttcataagactgttacaatctaaggggtttcctgaccacacacacttctgttgaactagctacaaattggggttttcactatcctctcaggttccatagtttgctagagcaattcacagaactcaggaatgcactgtacttctgattacaattttattatagcaaaaagggtacaaatcaggagcagccaaaagaagaggcatatagggtaaggcctgggagggtcccagatgtaaagcttctggtgtcttcacctcttggaatcagggcacagtcactctcctagtacattgatgtgtaacaatatgcacagagtattattaaccagggaagctcccctgagcttcagtgtccagagtttttactggggccccattacataggcatgattaattgaatcattggccatgtgattgaactgaatctctagcccttttactcactgcaggttaggctgtattacatggctcagagccccaaccttgtaatcacatgattggtctttctggtatggccagcccccatcctgtgtctttttttttttttttcccccagtcatcttttatttggaggttaattcccattaggatatgaaaggattcagcaacgatcgagactgtgttccttatggaggggctcgggccaagaaggtcatggcggggagtgcagagcatgccctcttcttcagtggtacttgcatagccacttgtgcttgagctccttgtaggaaaggcagtagctgaagagcacgtagcttgccagcaccatggtaacccctgagatgctccccttcttcatgtcaatgcactgcttgtagtaccagtaataacctcttcaaaatgctccggtagtgccactattgctgaagtcctgcatcaagctccagcttggcagctcccctagtttgacctccagaagtttcttgttcttcactggtatgactgatgccatcttggagtcctggtgtccactgtccctgtgtcatctttttaagcaaactgtgggcccacattgaatcaccttattggcgtaaactatcagggcccactgtgaataacaaagacactcctattacttgagaaattccaaagatttagaggttacctccagaaaccagggacaaaggccagccaaattctttattatacaacatcctcctaacccccaaagctgtctagtcctcatctttgtgatgtggtaagtcagatccctctggatgcccagccagaaacctggcatcaccctcaactcctccctccctccccccatatccagatcatcacccagtcttgccaactctgccttcagtttctgtcccagctctttattgcctggctgctgtggtgttcaaattctcatcttgtcttgttttccttgttgccttcaagctgactttcctggcttggctctcccatttctaagttgccagactcttggttccaaaatataaaactgatcttgtcactttctttagaatttgctgttgcagaacaatgtgtgtattataattccattttcgttaaacaaaacatactatatatattcactggaaatgtatttcaaagaaatctagaagtgtatatattctacagtgttaagagtagttatctgagggaaggtggaacatagagttttactttagactatatatttctagactagttggattttttcatactgagcacacattagtttttttaggcctggtaatattacagaagtcaaattacagaagtcaccctagctccccactcgccttctaaacctaattctttagcatggtgtgctgtgcccttcatggtctagctcagtttacctgcagccccatctcatcactcacctggatgcatccactctcaggatattctcaggattaaacttggggattacattttctgaccttcactttccctcccttatcttagatggaattagggagtttttctgtatgttcccatagctcccaatgcctaccttgcttttagcattttgacctaccctaccctgtagattgttgttacacttgtatagttgttgctgtacttcttcttagtatcctttcctatgtttggcttacattgtgatacacacccccctacaatcccccccaaacacacacacccacccacacacccacctttcagactgccttgtgaggacagggatcttgttgtcttcatagcctagcctctagtatacatagtgcttgtcatggagtagacgcttcatagtaaatctgcattgtattttcacagctgtaggcataaatggatgtaacccagagattcactcaagttacctatcccatgcccttttctagattggagcactccccgaggtttagattctcatcatcagttctgctgtgggactcacatttccctttctatgttttttctctttttgctctgttcttgaactagcttggaatttggctccttttccttggtttccactataacaacagtgagaacaaagtatacacaaagctatttgtgtgcacagcagattggacttggaaggtttggggtggggagggtatattatattacagcaatacaggtaacttaaaatctaatggtgttaggtgtctttggtcttaaatgacctttgctaccctgccatggtacctcctttccttctgctcttgctgctcttaacgagtccccaaacaagcttttctcattttattttgcaacgtaattcagctctccagctgcacctctacatgctgttcagggctgcttctgcccaccccaaggctgaggagcaggcccttctaaactatgggcaagctttctggttctctagtaggaccagatcccactgtgaacaggtattgttagcccaaagacttatttccccaccccacatcttttttcagaagacagaagcaagcactatcagttttggttttaattaagtttctttctgtgatattacttcttctaggtaggttttgactttactagaccaattgctgttaatttgatggtctaactagtaattttctacccctagtttaacatgttgaatgttgaccaggtgcagtgtcttacgcctgtaatccccgcactttgggaggcttaggtgggtggatcacctgagccctagaagtttgagaccaatctgggcaacatagtgaaaccctgtctctacagaaaattacaaaaattagccaggcatggtggcacgtgcctgtagtccagttacttgagaaactgaggtgggagggaggatcgcctgagcccaggagattgaggctgcagtgagccatgattgcaccactacaccccagtctgcgcaacaaaatgagaccctgtctcaaaaaaacaaaaaacctatgcttaagtgagcacctgcattgacttccagtcctgatcctgaaatcaggattccctgaaggttgttggaaagtgatctgggggtagggttttttcccagaggtgatacgtgctcagggatgagatttgctgaccctcctgtgtgtatttgggcagggagaagggtccagctgtaacaaacagctgttcttgtatataagggggaagcaagtctggagaattgacaatttctcctgtggactagaattggagacatattttgagtgctgtgtttcatctgactgtatcttcctgcccttgggtgtgcttctgggcactggctactgaccttttgccttggggacccgaccgtacttatggttctgttaaagttggagggtgtccaggttcttggcatcttcaacaaagaattggacaaaatgcacaaagcaaggaagggacgaagggatttattgaaaatgaaagtaccctccacaatgtgggagcggtcccaagcataggagctcaaaaggccccgttgcagagttttggggaatttaaataccccctagaggattccatttgttattttgggtacgctgtatgtaaatggagaggttgaagtaaagttacaaagtcatttgcggcctatgacctatggagaggatatttcctgttatagctgaagagtgaattggccttatgttccctacctccagacccaattttcctgcctcagttctgagttatgaggtttaactgattgggtcacattggatcctgtaccttctccctcattgaagagcaaactgcattcctgattgatagaccagcatgggccattattatacagggattttctaaaaagctctttttctttttttaaatttatttaaactattttttcctcattatgactggaaggataaaagatatttttctatatcagcttctcaagaacagggaatgggtaatgtccagtacgtcatctttctaaggccatagccagcttgtcttttcagtaacagccagccccactgtttagtggtcaccaccagacccagggctccctttgtttttctgatgctgaccacattttttttttttttgagacggagtctcgctctgtcgcccaggctggagtgcagtggcgggatctcagctcactgcaagctccgcctcccgggttcacgccattctcctgcctcagcctcccgagcacccgccaccacgcctggctaattttttgtgtttttagtagagagagggtttcaatgtgttagccaggatggtctcgatctcctgaccttgtgatccgcccacctcagcctctcaaagtgctgggattagaggtgtgatccactgtgcccggccttttttttttttttttttttttccttttttcttttttttgagacagagtttcactttgttgcccaggctggagtgcaatggcgcaatcttggctcactgcaacctctgcctcctgggttcaagcgattctcctgcctcatcctcccaagtagctgggattacaggcgtgcaccaccatgcctggcttcttttttgtcttataacttctgtttttttttcccccctctccctccaaactccatcacttttccttttgtacttctacagaagcctgatcctttaaaaattatctggctgggcgcggtggctcacacctgtaattctagcactttgggaggccgaggcggatggatcacctgaggtcagggattcaagaccagcctggccaacatggcaaaaccccgtctctactaaaaatacaaaaattagtcgggcgtggtggtgcatgcctgtaatcccagctactggggaggctgaggaaggagaattgcttgaacctgggaggtggaggttgcagtgagctgagattgtgccactgcactccagcctgtgtgacgggagcgagactccatctcaaaaaaaaaaaaatttcatatgcggctaatatgaaacacattttatatactgggacagaaggaaccataggctgtcacttgttttaagcaacaatatgacaccccctgtctgattcaggatgttattcaatatttgaggaaagtctttgtgagtgggtggtcctcatgactccagaggctcctctgtgtgtgtgtatgtgtgtgtttttcaacatgactgcagaaacatgttgtgggaaggtaatttatgtgatttcagaagactgtttgattcccagggggtgtttttgtttgtttgtttctttttaaaggataggaatatgtgattcttattctacctgggattctttttaatcaaacctgtttttatgacataaacaaaaaaaaagtctgttggcttggaaactacctgatttacagtgaaattaaaaataaatgccttggccaggtgtggtggctcacacctgtagtcccagcactttgggaggtgaggtgggtggatcacctgaggtcaggagttcgagaccaccctggccaatgtggtgaaatcctgtctctactaaaaatacaaaaattagctgggcatggtggtgggcacctgtagtcccagctactcgggaggctgaggaatgagaatcacttgaaccggggaggcggaggttgtggtgaaccgagatcacaccactgcacttcagcctgggtgacagagcaagactctgtcaaataaatgaatgaacgaatgaatgaatgaatgaatgcctttcagccgtgcacagtggctcacacctgtaatcccagcactttgggaggccaaggtgggtggaccacttgagcccaggagtttgagaccagcctgggcaacatggcgaaacccagtctctacaaaaagtacaaaaattaaccaggcatggtggcccagctaccccaaacgctgaggtgggaggatcacctgagcctgggagatcaaggctgcaatgagctgtgactgcactgctgcactccagcctgggtgacagagtaacaccctgtctcaaaaataaaataaaataaatgtctttcaacctggggaagccgattgaaaaggtaaataaatttaccttatttatttttcaaaataaatttacctgtcctttcattttcttatttttttattttaagctttattcccctaatacttactcttggcatatatatatatatatgtgtgtgtgtgtgtgtgtgtgtgtgtgtgtgtgtgtgtatgtgtgtatatatatgtgtatatatatgtgtgtatatatatgtgtatatatatgtgtatatatatatgtgtatatatatgtgtgtatatatatgtgtgtatatatatgtgtgtatatatatgtgtatatatacacatacatacatacacacacatacatacatatatatacacacatacatatatacatacacatacatatatacacacacatacatacacacacatacatacatatatacacgtgcatatatatacttataatttttatatgtacaattttatatatatgtacacacatacacacacacatatatacacatacacacacatacacacacacacacacacacacacacacacacatatatatatatataaatttttttttctgaaacagggtctcactttatcacctagactggagtgcagtagtgtggtcttggctcactgcaaccttgacctcccgggttcaagcgatccttctgccttggccccccaagtagttgagactacaggtgcatgccactacacctggtgcatttttgtattttttgtagagatagggttttgccatgttgcccaggctggtctcaaactcctgagctcaagcgatccgctttggccttccaaagtgccaggattacaggtttgagccaccttgcctggcctggcttataatcttttttttttttccttaagtgctaactgcgagttaatggtttataatattcctaatcctaattctataccattgtcgctgggtgcagtggttcacgcctgtaatctcagcactttgggaggccgaggtgggcagatcacttgaggtcaggaattggggacgagcctagccaacatggtgaaatcctgtctctactaaaaaaaatacaaaaattagcctggcatagtggggcctgtaatcccagctacttgggaggctgaggtgggaggaacacttgaaccaggaggtggaggttgcagtgagctgagatcgtatcactgcacttcagcttgggtgacagagtgactccatctcaaaaaaaaaaaaccaacaaaaaacagcaacaaaccaattctataccattgttcacagattagcccctactagaatgccctctttctctttttttttttttgctatctcattattttatatcattctagaccagtttgagcctcatatccccacaaaacttactctagcatatcctcaactacacagctgcctgtgttctaggccctttgtgagaattaggcgaactgtggtacagtcattgccccagaatcacttttgaagttggtggtgaaaccataaaagcaataaaggtaattaactacattgtgcattttccccagattatttattgcatgaacaacatgaaaacgtggggattaaatcaccttctaccctgccacagcaactgatttcatttatctatgtttctttgcagtgcttgttcgtatacattcatttttcccccataggtaatacaatataattcatttgcacctgagagtgtttgtcaaaatttctgatacctataagtgtgtgtgactttggataagtcacttctcctgagacccagtttctccgtctaaaccaggggtttagactacatgtcctgtaaggcaataatcatgaaaatatcttctgttgtggagtatttcacagttgcttgaacatttgtattgttattctttaccataactacatgggattgagtggaatatgatattccttttttacggattgggaaactgaaactgaggtagccaaagaaaacactcttaggtgaaaatgaattatattgtagtacctatgacgggaaaaaaatgaacgtatatgaacaagcactggaaggaaacatagataaatgactttaaggttgactttttatctctggtttttagcagtttgactatgatgtgtctaggtgtgggatttttctttttttaagtattgcttagggtgccctgtgttttttcgatctggatgtttgttgttttttgttaattttgggaaattcttggcctttatctcttcaagtatttcttctgtcctgttccctcttgttcatccaagaccccaactacatatatgttagacgattggatcttgtcctacaactcttggatgctctgttctgatttcttttattctttttttttgctttagtttggttaatttcttttttgtttttttgtttttttgagacaagctggtcccaaagtctgggcctcaagtggtcaagctggtctcaaactctgggcctcaagtggtcctcctgccttggcctcccaaaatattggtattacaagcatgagccaccgtgcccagcctccatttaaaaagttctgtcgacctatcttcagggtcactgattgttccctcagctccatgtaatcggctaatgagcctgttgacctctgatgccacgtttttaaaatttctagcattttaatttgattctatttttagttttcacctttgctgaaattcctcatttgttcatacatgttgtcacctttaacatattaatcatagttattttaaggcctctgtctgatagttccaacatctgggtcatctgagtctggttctgtttatagcttatctcttgataaggttgttcccccccatcccacttcccaacccttcttgatttttgtgtttttctttccttttttttttttttgaaacagagtctcactcttttcacccaggctagagtacagtggtgcaatcttggttcactgcaacctccctcccggtattaagcaattcttctgccttagcctcctgagtagctgggattacaggtgcctgccaccatgccaggctaattttttttttttttttttttgagatggagtttcactcttgttgaccaggctggagtgcaatggcgcaatctcggctcacggcaacctctgcctcccaggttcaagtgtttcttctgcctcagcctcccgagtagctgggattacaggcatgcaccaccatgcccggctaattttgtatttttagtagagatggggtttcaccatgttggtcaggctggtctcaaactcccaacctcaggtgatctgcccaccttgacctcccaaagtgctgggattacaggtgtgagccactgtgccccacccatgcctggctgattgttttatttttagcagagatggggtttcaccatgttagccaggctggtctggaactcctgacctcaggtgatccacctgccttggcctcccaaagtgctgagattatggatgtgagccaccgcacccagccatgtcttgtgcattttttttttgaggtggagtttttcttttgttgcccatgctggagtgcaatggtactgtcttggctcactgcagcctctgcctcctgggttcaaatgactctcctgtctcagcctcctgagtagctgagattacaggcatatgccaccatgcccagctaatttttatattttcagtagaggtggggtttcgccatgttggccaggctgatgtcgaactcctgacctcaagtgatctgcctgcctcggcctcccaaagtgctgggattacaggcatgagccaccgtgtccagcccgtgtcttgtaatttttgattgaattttggatattatgtggtagaacagagaattaggtaaattgtctttatcctcagaaatgggcatgcttttctgtcatgctgttagtttgtgttaggctgttagccagatttgagctgggtttgggctttctttttaatattaacttaaatgcatcacatgcttcaaatttctccagtaatgggtttttatcttgcacttagcggggagcctgagttgcatacatttattttttttctcagtctttctactgcttcttcagctctgaactgtcccttaatcctttgccacaaagggactctttctctacactcttgcccctttcctaggggtaagctgcagttgctttttagtggttcttggcttgaagtagaggtagggaggttctcattgtcttgatccaatctcaatctttttttttttttttttttttttgcgatggaatttcactcttgttgctgaggctggagtgcagtggtgcaatctcggctcactacaacctctgcctcctgggttcaagcgattctcccgcctcagcctcccgagtagctgggattacaggatgtgccaccaagcccggctaattttgtatttttagtagagacagggtttctccatgttcgtcaggctgttctcaaactcccaaccttaggtgatctgcccgcctcggcctcctaaagtgctgggattacaggcatgagccactgtgcccagcctcccgtctccatctttagcagaccctgtgagtatagaccttgggtttggggttttcccagcattctttcccttcctgtgtatggcagccagactttgccttgtatctgcggcaggtcttgggcaggagaaagttttgtatacctccttcagcagttagtagacttttgctttctgttggtgttgagcacagctttaggcttagattcttcatcaactaggagaagctgtgcttcaatacagttattcgtttgcatggttcctaatgtgcttcactcaatttagcagaatttttttttttaacctcttccttgacgctagctgcttgtgcaaatcacatcttggccgcctactcttcttcacttgctgacagatgtgtaggtgagaaaagtctcatagtcattgttcctgaaagaagcttccagacccacttctagggccagtgacatatgcaggaaatcagctgcttctgggccaggacagagctggtcttttttttagtgggggatggcgggcagtggggcaggggacattcaaaatttattttccaacagacagatagcatcagcaggtacaactacaagggtatctacatagatcatacattcacaaggcattattagttcaacagtgagaaagccactcgtgggttttctgtaacaatatcccacttcatagtgtaaacaggtactattttgttcacttacaattccggaaggaagggcacaccttgcaggggggaagaaaaggggaatcctaaagtaaggtgcaacaattaagagacaacactttggctaacaatcttggatccacatttcagtcagggccttccacatagaggggaaagacttttctctcagaagttagaatctttcttcctcctttcttgttaaactgagagcagtgttttgtttgctcaatattacatgtacaaaaggagattagaagaaaatgcatcacaaaaccatcttgaacgttcagctcttcctgccaatacatcacaactcttaggttttagacggggcctgggaatacgtaagtgttttttcttttttttttttttttaagtgaaagcaagtttattacgaaagcaaagggataaaagaatggctgctccataggcagagagcagcccagtaatcttaaaataggaaaatagacactatggctacaaaaaataaaaaataaatgaggtagataaaattttcacacccaggacttgcctgttccaacttcatagccttcatgaaatattcatcaagaagacaaaaaaaaaaaaaacctttataattacttggcataagtcgcaacaagaaaattcaacaaaaaaattagcatgtatacctgtgataggaaacacatccttccatgagtttcttctcaagaatgaaaacctagttcttcagtagagtaggcactggcaaactaagtcacctgagatttcctgctcaggtgccctcttcttctggggttcaggaagaggaaggcatctaagaagtgtgggaaaggacattggcactctcagggcagagctggtctttcacattgtggtgaaactactagaaagaagaaaaacatgcttgtggctactctgtgcctgcgaaataggtgtgaagcctttaggagtcagaagacctgggttcaactctaatagtcacttactctgtgaacttgtgcaagtcacttctctgtagtttttcttacagttaaaactttaaagttttgtccagtgctaaaattctctaatcctaacatatccttctgtagtgttacaaggatagaactctccaggtaaataccaaggctgtgcttttctgcaagcatagtggttagcttctcgtgttatatggtttgaagccctagttgttacttcttgcctgcatataaaccccattgacgatgatctcattttgtttttcctttgagaataaattgattgttttgtcttcccaggtctttgagaatgcgtaagttccggcactagaaggccctcagtaaagtaactaaaggagtatatacagctaagggcaatttaagtcaaaatgtgataataagtaaaaagtggttgtagaaattaaatgagagtgaaatatttttttaaaagttggaatcatctaaatgctaaatgcatatttaatattgttttgctactgtaatctaattagttaaaaagaataacatttgggctgggggtggtggctcatgcctgtaatcccagcactttaggaggccgaggcgggcagatcacgaggtcaggagatcgagaccatcctggccaacacagtgaaaccccgtctttactaaaaatacaaaaaattagccgggtgtggtggcgggcgcctgtagtcccagttgctcaggaggctgaggcaggagaattgtgtgaacccaggaggcggagcttgcagtgagccaagatgcaccactgcactccagcctgggtgacagagcaagactccatctccaaaaaaaaaaataataataataacatttgatagtatttattgagcacctactgtgagctagatgagtgtgggtgagctcctttagtctcctgacaaccccaagatgtgtttactactgttagccccattttactgatgaaaaacctgaagcttaaggcttttaagaaacctctctggccaggcatggtggctcacccctgtaatcccagcactttgggacgctgagcctggcggatcccaaagtcaggagttagagaccagcctggccaacatggtgaaaccctgtctctactaaaaatacaaaaattagccgggcgtggtggcaggcacccataaacccagctacttggaaagctgaggcaggagaatcgtttgaacccaggaggtgaaggttgcagtaaaccgagattgcgccattgcattccagcctaggcaacagggcaagactctgtctccaaaaaaaagaaacctctccaacttgacgtggctattcagtggccaaatagggcttcatacccagatagcctgactcccaggttcgggtcagggtacatttttatgtatcataaaagcatagttgatgaattctcagaaaccgaacacaccatataaccagccctcagatcaagaacagggcattactagcacccaggaattcccctccttccctatattagggttcaccagagaaacagaaccaacagcagttgtgcgtgtgtgtgtgtgtgtgtgtgtgtgtgtgtgtgtgtgtgtgtgtgtgtgtgtgtatgagagggttattgatgtttattttagggaattggctcatgtgattatggaggtctggtaagcctaaaatctgcagggataagccagcaagctgaagacccagggtagggttgcatgcggttcaagtccagaggcaggctaccagcagaattccttcttttgggcaggtcagtctttgttctcttaaggttttcaactgattggctgaggcccattcacattatggagagtaattcactttaagtttaccaatttaaatgttaatctcatccaaaaaacccccacaaaaaccaaaaacattttcacagaaacaccatggcccagccaagttgacacgtaaaattaaccatcacacaccccctcttagttacttccccctgaagggtaatcactttcctaatttataattgcaaagattagtgttgcccttttttgaattttctttccttttttttttttttttttttttttttgagacagggtctcattgtcacccaggctagagtgcagtgacgcgatcttggcttactgcgacctccgcctcccaggctctggtaattctctcacctcagcctcctgagtagctgtgattacaagcacacgccaccacgcctggctaatttttctattttttgtagagatggggtttcactatgttggccaggctggtctcaaacaactgggcttaagtgatcctcccgcctcggcctcccagagtactaggattacaggtgtgagccagcatgcctggccttgaatttttgacagatggaatgacatagtgtattagtctgttttcacactggtttataaagaactgcacaagactgggtaatttataaagtaaagaggtttaattgaattacggttctttatggctggggaggcctcagtaaacatacactcacggcataaggcaaaggggaagcaaggaccttcttcacatggtggcaagagagagaagtgccagtaggggaaatgccagacacttataaaaccatcagctctcatgagaattcactcactgtcacaggaacaatgtggggaaaactgcccccatgactcaatcacctccctctctcaacacatggggattacaatttaagatgagatttgggtgggaacgcagagccaaaccatatcatatagtacatactcttttcgtgcctggcttctttcacagagcacatatacacattcctagaatttgatttcctataggtagttgaacagcctctcctagagtaacctgaaggattgaggtatgggaaggtatagaacgccttccccaagatgttgactggggctgtcccttgccactgggtctgcactgcggcgccccccccccccccgtcccccccaacacagatgggctagcctggggtggaatctggaagttggtaagctgtgcttttggcactctctgccttcctctttcaggtccattctcctttcctgtcttactactccttatacgcctaactctcaatcctcagccatccatggtttgactgttcagagacccatggtgccagttctttttgttctcatattgccccctgtccattgaagctcctcagcccctcaacttgaacacgcccccgttcttattctgtacctcctcagattactgtcacattgacggacttgaacctcagagatagacaacttttcccttccctcctctcctccttcccatatacttttcttatggatatggaactgaggaccagaaaggaaggtaacttacccaagatctcacagatgggtaaataggggtagaaggtgtggatcaagggattgtatgcagcctttatctctaggtgctggtctctcttaccttgggtctgtctcttttgcctctcctttcctctttccctgctacttgacttgtttcctaccctggtagcattcctgcttgccagatgccacaggggaaggagaactttacaactccctgggctctctggtaagaacacccacctgcacggggacccttcctctccttcctacagtgattggttgtcatcctcttcccttcctgcagtgtaccctcctggcagaggcaaggctgccatcgaggctagagcaaggctcagattgggtggcatgcagttgtggcctatttctgtttgctgtgtggcagtttggagatcccatttctttttctggatatcacccccctacctcctcctgtcattccttaggccagcctctaaattcagtgaccatcagggttgaaaagggcagtgtggggcctagaaaggagctctctcctaggagttaggagacctgccagcagtgaactgtgtgaacttgtccctttgggcctcagttttctcatctgtaaaatgagaattggataagttggtcttcaaggtccctccctgagatacattttatgctgctgcttgatttaaaccactgagccacaaatgaaaggttccagttgcaacagtgtaattaggcttagcagatgggtgagatgaaaggaaggacatgttcttgcccataggattatcctttcccacccatttccttgcacctcactggtgtttccaaaaagcaaatgacaacccttgtttttctctgcattcccattcaaacctttaatcttcttttatcttgatgaacttgtatttaccgttagacagccatgatgcagaattcacattacagtgtgtggttctaactctgccatggtgaatgtgatggaggttggagccgatcacagctggtccctggagagagggctgtgtgtgtcagatttattgtgctgcagctccagttttgttttggtttagtttttaaatccccagtgtcagttttgctgatttcagttaaaactaaagattgtgaagggagacagagacaggttcatgccctctgagttttagagattggtgatatagtcgttgggtgagggccctctgtcttatatcctttgcttaaaacatttcaccttggaaaggcagaaattagccttgttgaacttcaactccctctgcaagaggaagaaatactgaatactgtttcattattgatatctttttaatgagtactgaaagccactacaggatctttgtttcaccttcagataaaatgtttcatctttcattctctgaaaaaaaaaattgagtattttaagaataattaaaggaaaggcagtagtttctggatcctgccgttgctgccttggcctctcctgccttttctccacttccactcctctccctctatattagtgtagaaatgtgtcaaaaatttcttgcttcttccattagtttctattttgacccaccccagtgaatgaaataagcatagaattgttacttctattttacagaagagaaattcttatttttttgttgtttttatttttaagttcaggggcacatgtgcaggatgtgcagatttgttaacataggtggacctgtgccatggtagttttctgcacagatcatcccatcacctaggttttaaggccagcatctattagctattcttcctgatgctctctctcctcccccactgacaggccccagtgtgtgttgttcccgcccctgtgcccctgtgttctcaccattcagttcccacttactagtgagaacatgcggtatttggttttgtatacctgcgttagtttgctgagaataatgacctccagctccacccatgttcccgcaaaggacgtgatctcgttcctttttatgtctgcatagtattccatgatatatagaggagaaatctgaaatgtggcaaggttaagtgacttgtccatggtcacacagctggttgatgaacaatttgtgataagaatccaggactcttgaatactagtgatttgtcaacacgattccatctccagtcctcatccatacacacctgccattaggaaagtctttaccaccccagcctatagtctttgtcatttctctcactggccagcttctgaaagtacaggtcagaagccagttcattagctggtagggtgggtggttaaacggcaaggcataggaggtagaggagggagaaaggaagcacaaagctcaggcttagtttttcctccagaaggtgtaagaattacttatttcaaagagtcagaaaagtgaacagagtcagcattcccttttcctttgcaaattgattgaatttctatggcgagtattagctgcaaggcagtgttaatctgctccagcagatccatcatcagattgatgtgcaggggagacaggattgtctctggtgcaaaggcctttttgtgtagggcacaccatctttatgtatgattgaggcctggtgtgttaaatgcctcacactgggatcttacccatgtttgtcagttgcctcccttgaaagtattgagctttttgaagataatatagcatcatggttaaggtaagacattcgttctctctgcctgaatttgaaacgtggctgtgccacttaccagctctttgacctttgacatcttagttcacctgtctgtgcttgagtttgctcatctgttctaattaggggttgtggattaaatgacttaataaatgtaaagcactgaggagagttacacagtgttgtgaggaaagcagtttttcttccatgcagccctccttccattcccccatcatgcacagtgtgtgtgtgtgtgtgtgtgtgtgtgtgtgtgtgtgtgtgttgacagcttttcgaatctgcatttctagctggcctgctgagcctgtcaggcagctgtaacctcactcaggttttagctgtggggtccatctacatttgacatgtgtttctaaatgtggtcctcagtaagctcctttgtggggagaccttggagaaaggaaaccagagagtgtgcactgtgcacccccagccacacatgttctgggttcccacaccttagggactggggacactgcaagacatagccgaaccttggatgaaaatattgagtagctgcctcagtttgcttggactgctatgataacatatcatagactaagtagcttagacaacaatagtttattttcccactgttctggaggctgaaagtctaagagcagggtgccagcatggttgggttttggcaagagccctcttcctggcttgcagatagctgccttcctactgtgtgcttgcatggcctttctttgatgtgtgcagcaggtggggtggggggaaaatcagtgaggaaaatcagtaacctcggccttgcatcttctttggtcccatgcatgatgttatttgtaaggcagtgtcagatctcctcatacatggagaggcattaagtcttcatttccctgtcttctagaggtttgggatagagggtgtgaaggaagagcagattatgcttactctatcttttaagctcagaactggggtgtgtgtgttggcaggaacaccaacatgatgatgtataatgaaggcctatcttgtcacctgtgtcacttcagccaccccacacaattgtcactgacatgcttcacctcccgggacttcaatttgaaacccaatgaaatccagtgaaacacagtggaaactcttaccaccttcctgttaaccaactcacaggagtgatgaacacttttcagttccctggatgaaacactcttgagcaatgcccacagcatgctgaatgcactgcaggcaggctgctctctgccatacccactcgcttcagcacccactggctgaattatgtgcttaccaagagccagcttgttcccaaacccatttgttcagctgtagctggtattgtagttaagtaatgtatttaggtatcagataaactgatgaaatgtagctgcaaatgaagtgatttttttcccctatgaacactagttaaaagctgtggaaagacttataagtccaagtcactaaaacacattactgtcaaactagatgaacattaagattgggggaaatcataaaactctagaattttatattgtgattactctgcaagtaatcacaatataactttaaccagctttaacaaatcaggaataggaaattgtcgacaatgtattatgttctggtccatgtgcgaaggatgatgtggacctcttaaccagtgggtcctctttggacccttattcaaagagtcttgccctatgttaaagaatgggcgaatgaatgcagatttatatacattgagtaaaaataagaattttagatatgtaatttttatgattttttgctgtgacttttttgattaacctggttcctggacctgattacattgaaaatgaggatttctactgttgtgattcagtttaaagttggtttgatttcattttagtgaatttagggtattttattttgcgtatggtaaaaacaataaaaccaacagtagtggggctttttaaactggggttttaaagcaaattaaggtggctcattctggattttagtaggttcttttgttcctctcattgacttgcagcatactgagtgagaaagacctaattttttcactttataaatgaggaaattgaagccctgagaggtaaagcatgttggtgatagtcatcccgggtggctggagtgaagtgggcagagccacagtgggagggggcctcctctctagcctcccactttgattatctgtctggccccagacctggagctttctttccatgataggagtacttctttgggttgacttctctggtgacagtattgacttgtgctccccactttggaacaggaccaacttggaggccttgcagaagaagctggaggagctagagcttgatgagcagcagcgaaagcgccttgaggcctttcttacccagaagcagaaggtgggagaactgaaggatgacgactttgagaagatcagtgagctgggggctggcaatggcggtgtggtgttcaaggtctcccacaagccttctggcctggtcatggccagaaaggtgagtttgccttgattaacaggtaattggattatttctcagggtacttagaagcctggggaccagggtagaaggaagactgattttactcaatacctttttgtgctgtttgaatttttttttttttttaagacggagtttcattcttgttgcccaggctggtgtgcaacctccatctcctgggttcaaacgattctcctgcctcagcctcctgagtagctgggattacaggcatgcgccaccatgcatggctaatttttttgtatttttagtagagacagggtttctccatgttggtcaagctgatctcgaactcctgacctcaggtgatacgcccgcctcagccccacaaagtgctgggattacaggtgtgagccactgtgcccagccgtgctgtttgaattttgaatgcttgttatctatattagattatggataaacacactaatgactgtgttagtgtattaatccccatcccatctggaaaataataagtgactcttttttagccttctgtgtgctgtggaaggaatgccaggatacctgtttattacttatcaagtgctggagaagctgctttcattcacccagccccagcgatgcacaaaacaaggatttcaagttgtttccctcttgtgctccagccctgccagtgaatcccctttatcttcctgcattatagcatctgaactcctatcatagcatgtacttgtagagctggacttccctttcctatctacccttggtcctcttttggaatacagccccttgctccagagaggttgggctcttcaatgtttttttgcacatggtgttcactcctgtgcccataatttttttgtgtgctgttgcttctgtcttttcaaacagtgcccattttctaggtccacctcttgtctagcttttaccaggtgccccagcccacactggtaaccactgcatccatgttctctgacactcgctgtctgtgggatttttttagaagttcaaccttactacgtaactatttaatgtgactgtcacttgtctccccagctggaacaagggaaaatgttaggatgacataaggtagcaccttagactttggcttagtctcaaccacatcaggctcctgagctcaaggaagaatcttttgggcagcctaggttagcatacctgagttcctcatacccttctactttcacaactcttgagtgtgaaccaagtcctcaaggtcaatttcttttcatatctgagctccaaagcctctcttggagtaagccctcccttaactttgttcctgtctaggctcccaggagccgaggcacagctggaacagcctccagtgccaatgcctgccttagtacaatgacactcatttcttggttgagcagaaacttgtttgtaacaacttaacctgtttctcctccctctaccttaaagagcttaaacatttaacaagactatatctttcatcccttcctccctctttctttcataaaacctctctttcttccacctttctccagctaattcatctggagatcaaacccgcaatccggaaccagatcataagggagctgcaggttctgcatgagtgcaactctccgtacatcgtgggcttctatggtgcgttctacagcgatggcgagatcagtatctgcatggagcacatggtatgtgacaccctctcagcctctggagcaatggccttaagagttgggtggctctggcctaatctttggtctgggaggtgaccagctacctccctgctgctcctgggatccacatcactatctggggcatctgggaagtctaactgtagagcttgggatattcacaagatggcaggcctcctttctaggtccttgcctctcttgaaggaagtgggcagtattcctggtgggtgtacctagagcacctctcatagtttttttgattctgattaccctaagatgtgatgtaagtaaaatctggtaaatacagtttaaatccatttcttgtgtacaatgctgtatgctaggtgcaaggctctggagttaaaaagatgacataatctactgtaagggcagcctgaagggtttctctgggtttctgtatgatgcacgttagtggaaggagagggcaatggagagagagggcattcatgggctaattaatcatatgcatgttagctgccaatcattttaccactatgttcttggagtccctccttttcttcagatataagtcttccaacacactgtgcaacttagggaattctgcaagtattagtctttgctttattctccctgggctgatggcttagagatgagggctgacgtgagtctgcacacttggtggctgttgtgctttcagtccagtattgtgtctctcagctcctaccccattttattcctgatacttgagacctgccctgacctttagaatagggatcctggtgtgcagccttaatgaactttagaagaaccctcctgggaggattctctacttgtgcctccattattttgaacctctcttcattgtaatgatcacgaagtgctgcatccactgttataggcatctgctgacatttgtgggtgccatatggaacctaaatcctaaaaacgtcttctgcacatctaaaggttagagaaagtgcttgttccttctttcctcaatgagagcagagcattctctgtgggaagcatatgaacatttctggcttggtcctagtgcttggcctggggtgctgattattttctgcttgggtcttggcttcccctcagggagctgtttcttatcccttgggtctcttgtgttcttttttttttttttttaatttatttttattttttagggtgatgaagggtttttttcccctttctttttttttctttttgtttttttagacagagtctcgccctgtcacccaggctggagtgcagtggcgcgatgtcggctcactgcaacctccacctcccaggttcaagtgattcccctgcctcagcttccagagtagctgggattacaggtgcgcaccaccacgccccgctaatttttttctatcattactagagatggggtttcaccatgttggccaggctggtctcgaactcctgacctcatgatctgcccgcctcggcctcccaaagtgctgggattacaggcatgagccaccgtgcccaaccaatctttttatttttcttacattgacctcttttgagatactaggaggcttcttcatttacattgaccttttttgagatgctaggtggcatccttattctggaattctttattcactttgaacttacagatgttgatcacatctcttgtgcccttgccatgtcctccccttccttcaagccttcctcctccttcaggagaaaatgacactggaaatgactggagttggtttcccattctcttagcccatttccagtgactgcaggtcagtttttccccccatggatttggctctctggaaatagtgagatgttcctgcacaagtctctggagttatcgtggagagcatgagactgggaggggaaaatgtttcaagggccaagcacagtgtctggcacctgttaggtggtatgtgttgagtgactgaatgagagtggccaggatggggaagacctggtcaggcttgggactcgatgggggagggttaggccttggagcctgccataggaccttttggccctgggtgtacatagacccagagggcagctagaatagtcagtcagtggtagtgaagaggctcaggtgctgccggagcgtctagatgggaccatgtaggaagcagctgtggcctgaagaccaggcagccatgagagccagagtggctttctgcttcagctctgggcactctcagcccttccttattcctgagcaggtcctgttgcaggaaaggccctgccctggcttcctctggatggaaaattctgactatgggctgctgcttcccttggaccttctgctttgcctcagcttcagtttttcaaaggtgttgtcaggtagagagacctctgttcgatagccacatcccagcttctgaaggtctttggtcctctctctgtcacagtctttgcatgagttttgtgtcatgaatattattttcccaacactttattatgaaaattttcacaggctgggcatggtggcttacacctgtaattccagcactttgggaggctgaagtgagcgaatcacctgagttcaggagttcaagaccagcctggccaacatggtgaaaacccatctctattaaaaattacgaaaatggccagacacggtagctcacacctgtgattccagcactttgggaggctaaggcgggcagatcacctgaggtcaggagttcgagaccagcttgaccagcatggagaaacaccatctctactaaaaatgcaaaattagccaggcgtggtggcacatgcctgtaatcccagctacttgggaggctgaggcaggagaatcacttcaacccagaaggtggaggttgtggtgagctgagattgtgtcattgcactccagcctggacaacaaaggcaaaactcagtctcaaaaaaaaaaattacaaaaattagctggcgtggaggcaggtgcctataatcccagctactcaggaagctgaggcaggagaatcacttgaaaccaggaggcagaggttgcagtgagctgagaccacgccattgcactcctgcctgggtgacaagagcaaaactccatctcaaaaaaaaaaaaaaaaaattctagcatgcaggaaaacctgaaggaagtgtacactcgtacacccaccacctagattctacaacttatgttttgagatatttggtttaccatatatccatttctccgatcaattttggggggcgcgtggggttctgtttttgtttgtttgtttttgagacagggtcttgcactgttgcccatgctagagtacagtggtgcaatctcagctcactgcaacctctgcctcctgggcccaagtgatcttcccacctcagcctcctgagtagctgggactacaggcacatgccactatgcctggctcatttttgtgtttttagaagaaatggggtttcactatgttgcctgtgctggtcttgaactcttgggctcaagcaatctgcctgtctcggcctctcaaagtgctgggattagaggtgtgagccaccacgcctggccctgggaatgtgttttaaagtaaatttgtgtcatcagcattggttgagccctgtcttctaaagcactcagccaggggctgatctttcctagaaataagctctgtgtgcactgcccagtctgaattttgagacccaaggagggaaattgatgctctctgatcagaacaggaatgcttttatctttggggaagtagattgctgctcaggttggtagctgagccaaccggagaactagggacccagagttaatggttcttgtgcaggaataaaagcttttgaactgttattttcataaagcatttgtctcttccatagaaaaccttcacaaaagcaccattgacttagttaataattggcttctaaaaataagcacaatttcagcagcttaaggcaaggacttggcaacagtgaattagaattagaaagttgtatggttagttgcaggcaaccctggggaatcctgactggtgtatgccccttacattttgtaattccatcgttcacactatactctgcttgaagctctgtggaggttaaagggaagagagccaatgtttcctttttgttttaaaattaactgattaattttacagatacggtcttgctctgttgcccaggctggagtgtggtggcatgatcataggtcactataactttgagcttctgggctcaagcagtcctcccgccttagcctcccaagtagcaggaggacaacagatgtgcatcaccatgtccagctaatttttattttttgtagagatggagtctcactactacgtggcccaggctggtcttgaactcctggcctcaagcaatcctcctgccttggcctcccaaagatttgggattacaggcatgagccactgcacctggtttgttttttcctttttaatagagatatttctcttaccaacccccaggggaagtgtaaaccaagacagttatctgggctgccccctgtcctaggctgcatttagggtcagttgagaggtagtgctggctgagcacagtgactcacacttgtaatcccagcactttgggaggctgaggcaggagaattgcttgagcccatgagttcgagaccagcctgggcaacaaagtgagactccccatctacaaaaaaaatcaaaaatagctgggtggggtggcacgtacctgtggtcccaactacacggaaggctgaggcaggaggatcacttcctcctctgagcatcagtagcattgtctgttctcttcattcaactgtttgttccctgccttgtttcagaggaggatttaaaatgccttacctcttatgaatatattctgtctccctaaggagagagtgtgttctatctttatcttaaaggtttaaaaaaagacaaaaaaaaaaaaaacctagttcttacatatacagaggcatttgataaatgatagaagatgatgataactgctcaatatagacaggatactttagaaaatttgttttgagttttcaggaattaggtctacatctgagagtaattttaagttgcaagtggtaactggctacacctgaagccataggggaacttaacctatttctgccttgatacatcaggatccccttagtgaggcatttcttcaagatcgcaggttaaaatgtagaaccccttaacgggagcccctggtatgtgagccctgcagagcctggcttcacaccatacttgcatcctctcttgtgctctctttccactgcctctgtccggcaccccattcatgtcatctcatctccttaccagtctctctgcctccagagtcttgtttgtctccctcagctgctgtgattctcatctttaaacactcaggttggattcttttacttctgactccataaagtcaagtcccggttccttggtggggttctggtcacagccggccatttctagcttgcacctcttcatgcaccaacagtgaaatgaccacatcatcccaggagtactcagcaacgtgatgcgtccctgctttgatcttattgcagtgctctgttcttctctcccttttctcctccccttttccaggtatagaaatcatgttcatcctttgagtaatattcagctcaaatgccatcttttaagtgaagtcagaattacttctcccttcttctgcatgtctgtatcactttcttaggcagttatggtttcattgtaatgttgggaaaaactcccagaccgtgtttttcctttactgtcacaccacaacaatcaacacagaagacttatgtgaccaaaagtgtggagggattttctctacactctaagcagtggacaccagctgggtgtcctcctgtttaattctgacactaccagatgatcatgtcagatcccatgggttcagggctcagtccccaagactgcaccaccaccagttgccagtctgggcctccaaaatgtctgactgactggctttaagttgggactcccatgatcctatctttgagttcgattaatttgctggattggcacacagaactcagggaaacacttaattttactggtttattataaaggacattgcaaaggatacagatgaagagacacataggacaaggtatgggagtggggtacgaagcttccatgccttccctgggcgcaccaccctccaggaacctccatgtgttcagctgtcctgaagttctctgaacgcagccttctggggtttttttgtgtgtgtatttttttttttttttttttttttgagacagagtctcgctgtgtcgcccaggctgagtgcagtggtgtgatctcggctcactgcaagctccgcctcccaggttcatgccattctcctgcctcagccacagccgaaagttatcacttgaaagaatagttagaacattgtcactaactggtctggtattctcgatcttaggatggaggttctctggatcaagtcctgaagaaagctggaagaattcctgaacaaattttaggaaaagttagcattgctgtgagtatgttatgaagtttttcttctaagttcctcattgataagttaatgagtcggtaagaaatggacaagagaggaagatgggaagtcaatgaggggaaagtttataagaaaagtggtattttctcactagactcttccctgtctggagtctatatacactattctctctcacattagaatgagaaaagtgactttctttatattaaaatctgtgtgtcttgaaaaacgggccaggcacagtggctcgcacctgtaatcccagcactttgcgaggccaaggcaggaggactgcttgagcccaggagttcaactccagcctgggcaacatgatgagacctcgcttctacaaaaaaataaaaataaatagctgggcgtggtggtgcacacgtgtagtcccagctacttgggaagctgaggtgggaagatcacttgagaggctgcagtaagccataatccatgattgtgccattgcactttagtctgggcgacagagtgagaccctgtctcaaaacaaaacaactctttataccatgtaaaaagatggttgcttgataaggcaggttaagaaaatgaaacaaaagagtaaaaaataaggggctgggcgcggtggctcatgcttgtcatcccagcactttgggaggcggaggcgggcagatcacctgaggtcgggagttcgagaccagcctgaccaacatggagaaacccccatctctattaaaaatacaaaattagccgggggtgttggtgcatgcctgtaatcccagctactcgggaggctgaggcaagagaatcgcttgaacccgggagggggtggttgtggtgagctgagatcacggcactgcactccagcctgggcaacaagagcaaaactctgtctcagaaaaaaaaaaagcccaggcacggtggcttacacctgtaatcccagcactttgggaggccaaggtgggtggatcacctgaggtcaggagttcgagactagcccgacaaacatggagaaaccccatctctactaaaaatacaaaattagccgggggtggtagcgcatgcccgtaatcccagctactcagggggctgaggcaggagaatcacttgaacccgggaggtggaggttgtggtgagccgagatcgcgccattgcattccagcctgggcaacaagagtgaaactgcgtctcaaaggaggaaggcaaatttgtgatgatgataaatgaagtattttcctagagtattttaaaatagattgagtatttttcttatcaccagtattttcttttcttttacattccctttcctctaggtaataaaaggcctgacatatctgagggagaagcacaagatcatgcacagaggtaagaagttatttgctagttattttgctttgaattttagatataatccaaaggctgttgcttcctcttttttctatgttttgttttcgtgtaaaagccttttaataacatgttaaatcttttattaaaagtctttgtttagtttggtggctgaggcagcaactcctaccctctttttggtcttgctacacctattgcctatagctgtgatggacaatagtcatagtcaccctggaagcccagctaagagcctcaaccagcacttagttacccagtctccggtgtcactattcactggaacagtgaacagtgcatgtgcatatgcctaaagccaggactggccagctgcatatgagttttactataaaagaaactgatttattgctgggtacagtggctcatgcctataatcccagcactttgggaggccgaggggcagcggggggaggtgggggggtggatcatgaggtcaggagttcgaaaccagcctgacccaacatggtgaaacccccctctactaaaaatacaaaaattagccgccagccatggtggcgagcacctgtaatcccagctacttgggaggctgaggcaggagaattgcttgaacctgggaggcggaggctgtggtgagccgagattgcactgctgcactccagcctgggtggcacagcgagacacagtctcaaaacaacaacaacaagaagaacaaaacacattaaaaaaagaaagaaactgatttattttaataaaggtacacatacacttaaccatgtgaccataccatcttaggcatttgtccaagataaaatataacatgcatccacacaaatgtttaaagaagctgtatttcttgtagaaacaactgaaatgtccttcaacaggcaaagagagaaacaaattgtagtatatctatacaacagaatactcttcaacaataaaaatgaaaagactactgataacacctaactttgaatttcaggaacatttatgctgagtgaaagaaggcagatacaaaacagcccaagctgtttccatttatgtgaaattagagaataacaacaaatccatagtggcagaaagtagatcagtggttgccttgaggggtctagggagagattaaaggagcatgaaggaactttttggggtgacacaaatgttacatctttttttttttttcaagagcacacatccacttctatgtattgacttctcattagtttaaatccttgaagggggctgggcacggtggctcatgcctgtaatcccagcattttgggaggtcgaggcgggcagatcacctgaggtcaggagtttgagaccaccctggccaacatggtgaaaccttgtctctgctaaaagtaccgaaaattagccgggcgtggtggcgggtgcttgtaatcccagctaatcaggaagctgagggagaagcttgaacccgggaggcagaggtcgcagtgagccaagattgcgccactgcactccagcctgggtgacgagcaagactccgtctcaaaacaaacaaacaaacaaaaaacattctggctaacacgatgaaaccctatctctactaaaaatataaaaaatagctgggcgtagtggtgagtgcctgtagtcccagctactcaggaggctaaggcaggagaatggtgtcaacccaggaggcggagcttgcagcgagcagagactgcgcaccactgcactccagcctgggcgacagagtgagactccgtctcaaaaaaaaaaaaaaatccttgaggggtacagcatcacttggattctgtttccaatagccatagtaggaagagtgcttcagaatttggcacaaactatgccactggttctgtgggcccgagttacctttctccagattactccagtgttgtttggtttaccaccaggagtcactgtgttgttctttgctttgtatacataagcacatctcttgcccaaatagaattctgtttcatctcgggcataaacactttcaattttaggaagaactgcctgctcccattggttccggataccctgcttatagccggcaaaaatggccttgcaccacagccttccacatatttccttttagaagtcctgttcccagcaggcctccatggcatccaagatggcgggaagtgcaaatgttatatcttgacaatggtgatggatacatggctatatacattcgttgaaagtcagctgtccactaatgtgactgcattttatagtatgtaaattatacctcagtatagttgcttttaaagaagatgaagccagaggacaggaaattggtaaacatagtgctgtcggccatgtcccttcagccacagcactgccaacactgactggtgttgagaggagagctgaagcggagatgagtggactagggtgggctgttggaactgactggacagcttacaagccccgtagattaggtgatacatcactggtgagcaagctgagcactgagtggagccacctttgacatggctgactcctggatgcattttttttttttttgacgtcccccttctctcccctagtgttctttttgttagtctaacttcttccagatactgatctttcaggtcttcagttagaggtcacttaattatgacagtgtttgcaagtgttggagggtggttctgattcagtaggtctggggtagggcacagggacctgaaaatttagaaataggcaattagctgggcgtagtggctcatgcatagtaatcccagcactttgggaggccgaggcgggcggatcacttgaggtcaggagtttgaaaccagactggccaacatggtgaaaccccgtctccactaaaaacacaaaaattagctgcgtgtggtggcgtgtgcctgtaatcctggctactcaggaggcttaggcaagagaattgtttgaacctggggggcggaggttgcagtaagctgagatcatgccattgcactctagcctgggcgacagagactctgtctcaaaaaaaaaaaaaaagtttaattgtaaaaaatatatacataaaatttaccattttctcaagttttcagtgtatagttcagaggcattaagtacattcacattcttgtgcagccatcaccaccatccatctccagaacttttttcatcttacagacctcaagctgtgtccatgtaacaactctcaccgggcgtggtggctcacacctataatcccagcactttgggaggatgaggtgggcagatcacctgaggtcaggagttcgagaccagactggccaacatggtgaaaccccctatctctactaaaaatacaaaaattagccaggcgtggtggcacacgcctgtaatcccaggtacttgggaggccgaggcatgagaatcacttgaacctgggagacggaggttgcagtgagctgagattgtgccactgcactccagcctgggcagcagagcaagactccatctcaaaaaaaaaaaaaaaaaaaaacccactatttccccctttccccatccactggaaaccaccaatctaccttctgtctctatgagtttgactactctaggtacctcatatgagtggaattacacagtatttgtcctttagggactggcttgttttagttagaataatgtcttcaaggttcatccatgttgtatgatgtgctagacactggttcttaagtaagtgctggttctaatgctgtggtccatagccacattttgggaaacactgcattgggggtagagtgagtagctaggtgggctgtgtagaaagaggagtaatggcagcttgtcctagtgggatttgtcgggagaaaagaaatagaaaatgaagcacaaagaagaatattgtgcaagtgttccctctcatttccagggaaaatttctcaaaatattgaaagatttctgtccatggcagacttgtagttggaatttgcatgaccagcttatagcttgtacatatggttcagttttgtgcatctattaatttcaacctgggccaccaaactgcattgttaagaactagagactattggctgggcacagtggctcacgcctgtaatcccaacacttggggaggccgaggtgggtgaatcacaaggtcaggagttcaagaccagcctggccaacatggtgaaacccccgtctctactaaaaatataaaaaattagctgggcgtggtggcggatgcctataatcccagctactagggaggctgaggcaagagaattgcttgaacctgggaggcagaagttgcagtgagctgagattgcgccactgcactctagcccaggcaacagtgtgagacactgtctcaaaaaaaaaaaaaaaaaaaaaaaaacaacaacaaccaaaaacattcagagagaggacaaccattttggaaaacaggtattaaaatttcttgttaaattataccaccatgaactgcactccttggcatttacctaagataaatgaaaacatttgctcatgcaaggacttgttacacaaatattcatagcagctttatttataattgcccaaaattagaagcaacaaaaatattattatcagatgagtgggtacattttagtgtattcaaacaatggagtacaactcaggaataaaactattgatacatataacttcgatgaatctcaaaaacatgctaagtggaagaagccctgtacaaaagagtacatactgtgagagcctgctaatacgaaattttagaacagacaatccacagtaacatatagcagatgagtggctgcctgagggtttagaggtagggatagtttaacatcaaagtgcataagggaacttttttggagtaatagaaacactaaatcttgtttgtggtaataggttcacaggtgtgaacatttttgaaaatgcatgaaagtatacacttaaaatggtaactgtaggctgggtgcggtggctcacgcctgtaatcccagcacttcaggaggccgaggtgggtggatcacctgaggtcatgagtttgagaccagcctggccaacatggtgaaacccccgtctactaaaaatacaaaaattaagccgggtgtggtggtgggcgcctataatcccagctacttgggaggctgaggcaggagaatggcttgaacctgggaggcagaggttgcagtgagccaagatcatgccattgcactccagcctggacaacaagagcaaaactgtcaaaaatcctcaataaaatactggcaaaccgaatccagcagcacatcaaaaagcttatccaccatgatcaagtgggcttcatccctgggatgcaaggctggttcaatatacgcaaatcaataaatgtaatccagcatataaacagagccaaagacaaaaaccacatgattatctcaatagatgcagaaaaagcctttgacaaaattcaacaacccttcatgctaaaaactctcaataaattaggtattgatgggacgtatttcaaaataataagagctatctatgacatacccacagccaatatcataccgaatgggcaaaaactggaagcattccctttgaaaactggcacaagacagggatgccctctctcaccactcctattcaacatagtgttggaagttctggccagggcaatcaggcaggagaaggaaataaagggtattcaattaggaaaagaggaagtcaaattgtccctgtttgcagacgacatgattgtttatctagaaaaccccatcgtctcagcccaaaatctccttaagctgataagcaacttcagcaaagtctcaggatacaaaatcaatgtacaaaaatcacaagcattcttatacaccaacaacagacaaacagagagccaaatcatgagtgaactcccattcacaattgcttcaaagagaataaaatacctaggaatccaacttacaagggatgtgaaggacctcttcaaggagaactacaaaccactgctcaaggaaataaaagaggacacaaacaaatggaagaacattccatgctcatgggtaggaagaatcaatatcgtgaaaatggccatactgcccaaggtaatttacagattcaatgccatccccatcaagctaccaatgactttcttcacagaattggaaaaaactactttaaagttcatatggaaccaaaaaagagcccgcatcgccaagtcaatcctaagccaaaagaacaaagctggaggcatcacactacctgacttcaaactatactacaaggctacagtaaccaaaacagcatggtactggtaccaaaacagagatatagatcaatggaacagaacagagccctcagaaataatgccacatatctacaactatctgatctttgacaaacctgagaaaaacaagcaatggggaaaggattccctatttaataaatggtgctgggaaaactggctagccatatgtagaaagctgaaactggatcccttccttacaccttatacaaaaatcaattcaagatggattaaagatttaaacgttagacctaaaaccataaaaaccctagaagaaaacctaggcattaccattcaggacataggcgtgggcaaggacttcatgtccaaaacaccaaaagcaatggcaacaaaagccaaaattgacaaatgggatctaattaaactcaagagcttctgcacagcaaaagaaactaccatcagagtgaacaggcaacctacaacatgggagaaaattttcgcaacctactcatctgacaaagggctaatatccagaatctacaatgaactcaaacaaatttacaagaaaaaaacaaccccatcaaaaagtgggtgaaggacatgaacagacacttctcaaaagaagacatttatgcagccaaaaaacacatgaagaaatgctcatcatcactggccatcagagaaatgcaaatcaaaaccactatgagatatcatctcacaccagttagaatggcaataattaaaaagtcaggaaacaacaggtgctggagaggatgtggagaaataggaacacttttacactgttggtgggactgtaaactagttcaaccattgtggaagtcagtgtggcgattcctcagggatctagaactagaaataccatttgacccagccatcccattactgggtatatacccaaaggactataaatcatgctgctataaagacacatgcacacgtatgtttattgcggcactattcacaatagcaaagacttggaaccaacccaaatgtccaacaatgatagactggattaagaaaatgtggcacatatacaccatggaatactatgcagccataaaaaatgatgagttcatgtcctttgtagggacatggatgaaattggaaaccatcattctcagtaaactatcgcaagaacaaaaaaccaaacaccgcatattctcactcataggtgggaattgaacaatgagatcacttggacacaggaaggggaatatcacactctggggactgtggtggggtcgggggaggggggagggatagcattgggagatatacccaatgctagatgacacgttagtgggtgcagcgcaccagcatggcacatgtatacatatgtaactaacctgcacaatgtgcacatgcaccctaaaacttagagtataataaaaaaaaaaaaaaaagaaaaaaaaaagctaaatatagaaagccacctgctttctaattgtactggctgccatcttgtcttctttctactgacaagaaagtatcaataagaggtagtgattggtttgagggggaaacagtttttctaccagtttagtccttaatctgtggcttcttaagacctctgagttccatgttagaatattttaatgtattagtttctaggaaataggagtagctgaaaggagaggaggagtgaacattcttaagcatggagttatgttctaggctgcgattgacatatgcagtctaccactatgcaaggacgaatgaggtcagtgttgtaggaacatctggtggagtaaaggcatcccatcatctgtgaagtggagtccgcctgcctactcagaggttgctgtgaggattaagaaattacatatggaaagcaactggcaaagtgttttgcttatagaaagctctaatatgctaattgccttccccgtttctttatataatttataaggaaactaaaaaccagcgattaaaaccttagctttggtttctatatgtgtaaaatatagttcttatgtttgtctctcattaacctgtaagtttcttcaaatctgggaacatgtctaattgctgtgtatatatcttcagtcctgaagatgatagtagaaaacagttcttctttgaaggtttgttacatggatggatggatgattaacttgtgccagaacacacaggagtcaacagtgaaactgggccaaggacccatgtctcttactcttaacacagtgtttctttctagtcctgtgtttttctgtactatgtacctactatggatcatgccctgtgttttgcaatgaagacctctaactttatttccattccaaggagagggaggtttcagcacactcctggaacaaccagctttcttttcccttccgcctagtgctgcccccacctgcttagggctttcttttttggcttcaccaattgttgctctttggcatgaagagatgctttgtgagccagatgggtctctgaacagatgtctttgatggagagtttaccacttgcacagccaagaaagggaagtcactagaaggacttctgtgtgggctggcctggctgctcagcatttcagactcctgttgtttacaagtcttctccagaagccctggaagaatgaactgtaaggcctggactatggaatggtacctgtgcaccagcaattcctgagcaagcagcacagtgagtaggtgattcctggaaacctgagttcaggtgaaaatgagagagagcagtctccttgtccctgcctatgggcttcctcatggccagttctacctctgttctaaatatattcttcactgatgaaatttcaacttcatttattcttctgtccttgaggaaaagtggggaagagtaaagaggtcttttctctgcctcaaatttttatttgttcttatttgttgatacttatttgctggagatagcttagtggtttttttctctttctttttgagacagggtcttgctctggtgcccaggcttggagtacagtggtgcagtcatggctcactatagccttggcctcctaggctaaagcgattctcctgcctcagcctcctgaagtgctgagactacaggcatgagctgctaggcttgggttgattatttcaattaccatttgctatgtaacgaggctccaaaacttagtagtttaaaataataatttattaccttacacagtttattactttttctgtgggttggcaggtcctctttccccatcctctgtgaggctaaagccctggtttcttccagtagcaagagggggtaaaccctactacttaagtaccctttaagcctctgcttatgtcaagtttgttcatgtccatttggctaaagcgggtcatgtgtttcaagccaagatttaaaaagtagagtgaagtctccatctcttgttgggaggagctatgaaatatggtggcccgtttttttccactgtatcacagtgataaagttgaaggttcaaattgtgactgtgctacttgttgtgtaaccttggatgagtcatttaacttctccaaacctcaggaaaatggagaaaacagaacctacctaaagggttgtatgcagattaattaatacatacaaagcacttagaatagtacttaacatgtagtaggcacttaatacattttacctgttgcttagataaattggtagaggtttttatgattaccagcaacagaaaccagcctgacttggtttaagcttctaaaaatttattcattagaaggatctggctgggagcggtggctcatacctgtaatcccagcactttgggaggctgaggtgggcagatcacaaggtcagcagttttgagaccagcctggccaacatggtgaaaccccatctctactaaaaatacaaaattagctcggcgtggtgccgtgcgcctgtaatcccagctgctcgggaggctgaggtgaaagaattgcttgaacccaggaggcggaggttgcaatgagccgagatcgtgccactgcactccagcctaggtgacagagtgagactctgtctcgaaaaaaaaaaacaaaaaaagaaggatccaagggaagttcagagagtcctttgacaagctgatcctacaaaccacggtagggtgggaaccaaggctactctagttgggaggttggctcagtcaggcagagaaatagctccctggcgtacaactctaacagtgctattgctgctgggccaactgtcctctcctagccttatttagggggtaggcatgggctcagtgatctcccagaggggtccagagtcagtgcctctgaagaatccactctcaccacagtcatgcagatatcaaggggacagcatcctctcctgctcagtgttgggggctagttgatagtccattgcctagtccaggttgaaagtgatttctgagtgtgccctgctctaataaaaagtaacgtacaaaaatagtttataacacaaggtgctctgggtgcaatgttttgctctttcaaagcattcactctaggtaggattcttcaaatagaagttttcatagaatcttgaaaaaggcaagcaaattacatcaatttgattcatacatttcttcttaggaatatgtcagtgatttaaaggtaggtattcctgcacttaggaatttttaaatgagaagaagtgcctcgtggtattttgaggaagattagctgttttcaggtaccatttagttactgtttttccacctaggtggtagcctcttgaacatttttcagttatctttcttcagctgggtgagtatgtcctggtcctagtttggtacattgccttggttgtacacatggtagttttcctacatttctaatgtgtctgcaccaggtgggaacccaaaggcaagcatgttctcaccctcattcctgaagtgatttgtctctgccataatggagcaggacttcttgggcagaataagttcaactgacagtcccagtgccgaagctctggctagctcaactggtccactgtgatttgttctgttattatacagaacattgtattctatttcccctgggtgttcaaagggagaaacaatctgtgtggtttagcctgatgtatgtgatttgtgagctgttgatcagggggtgggtatagatctgtcacccctttggggagtgttaagtttctctaaaatctctgggtgacattctgacagtcatgggtaggtacaggtatatgctcctccgtgtctattcgcctacctcctcagtcttttcccccatcaaagagaagtaattcattttgtaaaatatttatagaatacctgccaagtgcaaggtattaggtgaattactcgttaggcataaagttggctcataaatgaattgtgtcctccaggagcttagagtctaatgggaaagggacatatctgtaaatgactcttgtatattgtggaacatagccaatatcatttttttgtgcgtgaatcactaccctgccaactttcagatagaatccgatgtgacatagtgacatagattattagtcagaattctttggtgtggcagaaacccacctcaagattacttaatcagaaaagagaatgtatggtttgggtcaccaggaggtcggaaggcagggatgaatatgaggttgaaatgatggcctcaggtcacctctcagctttgctcattcttgtgtgggcttccttttcagtcagattctcttcactggaggcaggatggacctcactagccccagacacatctagtccttagtgctccctatcccagagaaagtactccacccactctccccagcatccagatcagtgtttgaaccactgattggcagactgcctctgcttggagtgcttgcccatggctggaccattcactgtgtccaggggactagtgttgcctggtgggccaccctgggttatacactcacccctgtggtacaacagatggcgcctcttgatgaacaccctagcagaaacagttgatgctggggaggagtgtatcccaaatgaaaaggaggggctttgttaccaggagatggggagaatgaatgggtgctgaaagcaagcaaatttttaaaaagttttccgcttacaaattctgttaagcattgggtcagaaagacaaaacactaacataggatgaaaacaacaagcagttaacacaggtgtgagcaaactggtccatgggctaaatttggcctgctgcctgtttttgtatggcctgcaagctaagaatagttttcaaaattttgtgacatgtaacaattatacaaaattcaatttattattatttttattttttgagaccgagtctcgctctgtcacccaggctggagtgcagtggcgtaatctcggctcactgcaacctctgcctctcaggttcaagagattctcgtgcctcagcctcccaggtagcggggatcacaggcatgtgccactacgcctgctaatttttttgtatttctagtagagacggggtttccctatgttgcccagcctgatctcaaactcctgggctcaagtgatccacctgccttggcttcccaaagtgctgggattacaggcatgagccactgtgccctgctggaaattcagattattgtgtccataaataaagttttattggatcacagccatgcttgtgtaaatgttgtctgtgcctgcttttgtgctataatggtaaatttgagtagttacttgtgaaagagatgactgtgtggccctcaaagccaaaaatatttactctctggtcctttttttatagaaaaatcttcctaaccaaaaggggaaggagaatcccttgacagaagctttagaatttaagcacaaaactgggcttttaagcacaaaactatggtggctgtagcctgtaatcccagcactttgggagatcaaggcgggtggatcacctcaggtcaggggttcgagaccagcctggccaatgtggtgaaaccccgtctctactaaaaatacaaaaaattagccaggcatggtagcagacgcctgtaatcccagctactcaggagcctgaggcaggagaatcacttgaacccaggaggcagaggtttcagtgagccgagatcgtgtcactgcactccagcctgggtaacaagagcaagactgtctcagaaaaaaaaaaaaaaagaatttaaacacaaaactaaacttttaaatgtgtcagctttaagttctcaaggaaaacatgataagtgacgtgggtaggagacaggattatttttcctgatcctggagctctgaaaagaattagctgccaaaatttatgtcgagtcttttcatctgaagctgaaccaagtaggtagttgtgctgtgagttaaaaagggttggaggtgaagagggcgctaggatactgctctctttcattctatttaaagcaataatttgcattgccaccctgccgttcttaacctgctctaattatcaaggccttattttgactaagaccctgaaaaagcgttgcatgatttagatcaatacgcagttcatccaacttagccgtaaattatttctgccttggagttgttagctgataaagatcaataaatgttaacaacagttttaaattataactcaacttgtttttcttttccttctatctaatgaaaccatgtgtaacctagatttttaaattttacgtatttatgtgtgacatgtatgtgtgtatgtataaatgaacgaatgacaggtctcgctcactctgtcgcccaggctggaatgtggtggtgcgatcatggctcactgcatcctcaacctccccagctcaagcgatcctctcacctcagccttctgagtagctaggactacaaatatgtgctatcatgcctgactaattttaaaaattttcttttctagagatgcggtctctctctgttgcccaggttggtcttgaactcctggactcaagtaatccacttgtctgggtctccctaagtgtgggactactggtgtgatccactgtgcttagctgccagcttagatttttgaggggtacatagcccactgtaattggatacctctcttcagagccatagtagcttattataccttggggccatcctgcttggagtgtgcctcaaaagtgttcctttattccctaggttagagagttatgtaaaaacggggctctcaggtcagaatgagatttaaggcttctgcagagcctatatgaaagtgtttttgggccgggcacagtggctcatgcctgtaagcccagcactttgggaggttgaggagggcggatcatgaggtcaggagatcaagaccatgctggccaacacggtgaaaccccgtctctactaaaaatataaaaattagctgggtgtggtggcacacgcctgtaatcccagctacttgggaggctgaggcaggagaattgcttgaacccgggagtctgaggttgcagtgagccaaaatcgccactgcactccagcttggcaacagaacaagactctgtctcaaaaaaaaaaaaaaaaatgtttttgggctgggcacagtggctcatgcctataatcccagcactttgggaggccaagatgggtggatcacttgaggtcaggagttcgaaaacagcttgaccaacatggtgaaaccccgtctctactaaaatacaaaaaaattagcctggcatggtggcgggtacctgtaatcccagttactcaggaggctgaggcaggagaatcacttgaacatgggaggtgggggttgcagtgagccaagatcacaccactgcactccagtctggatgacagagcaagacaccatctcaaaaaaaaaaaaaaattttttttgtatccttttcctggggagagctgggagtctccaaagtgtctcacggtgtcccagtgacagcctccagcaaatggggtcttcagcaatggtcaggattacaacctctaaattcttcctctccattcagacttgttggcactgatagcaagatctgaagtggcttgtttggttttgttttgttgttttataagctgtttgtagcagactcacacgtaatgatttgagtggtttcttctgcaatttttgcaaggaactatgctgcctctgccaggcatcgctgagcagaagtcagagtggcccctgcctccaccagcctgaggctacacacaggattctgttctgagcatggttcctatctgtgtgtgactaaggactgttgtctgatccttgaaacacagaaggttgcccatggtatatacacaaggtgctcctggctacatctctctcccatcacagccatcccatagctgtgtggcttacacaggaagggattccttttgactgtgtcagactgccctgccttaaagatggagggagacagagtggctcattagtagtggaaaattcagtatgctggtctcttggttagaaatgtgagtctcgttttatctagaattatttcatctgctagattcacagtgatgattatagctccaggtgagtttgtctcttagctccttaagagaggcttagatctctttagggaagcatggaggagatggtatttgagctgagctttgaagcataggtagaagttatatatgtggcagggtcagggaaaggaattccaggtagagggaagcatgaatcatggcatagaggcaggaaaacacagacatgtttttacaggaaatagcaagtggttcaagttgtctacaacaaagggttcctgatggcaaggggtgagaattaaagtaagaaatagttgaagcagtgaggagggtcttcactgccatgttcaggaagtggattttatcatgggcaacaggaagcagtggaatgatcctgcacagagaagtgagatgtgctgtggtttaaggaagaggactctactgttacggctaaggtgagctggagaggggagaggtcaattaggaggccgttgctatgggccagtgagagataagggggggtctgagttaggatagtggcagagtgaagggacaggatggggacagatgggagagagatggtgcaaagggcagggactggtgtgggaagatgggtaggggagtagcagggagacttggccttggcccttcctggggtggttgtggtgggaaggagcctgaggcccatggccgtgctccagggctgtacgtggagagctgtgttctcctcctcctcagatcacaaagcctcatttctaatggaaacctgaggctggggctgccctttcctaagttacagattatttcctgaggaggatcccagccctaagagagctggtttgatttgaaaatctggacacataggaatgaaactcagagtgaattttattaaccactacccaaagcaagatggaacttagctcatgatgcccaacaccatagaggaacaagagtgggctgggcgcagtggctcacgtctgtaatcccagcactttgcgaggctgaggcaggtggatcatgggagggcaggagtttgaaaccatcctggccaacatggcgaaaccccaactgaaaatacaaaaattagccgggtgtggtggtgggcacctgtaattccagcaggcttaggcacgagacttgtttgaacctgggagatggaggttgcagtgagtcaagattgcgccactgcactccagcctgagtgacagagtgagactctgtctctaaataaataaataaataaataaataaataaataaataataaaataataatagagtctagtgatatagctcagcttgaggatgggaaccagcataaggcttgataagaccaaactaattagaaacaaacacgatggaattttcttttttcatttgaaaaaacatttcaaagtttattgttggaggtaagtgcttaccaccctgtgaagtgcgtgcagggctgtcattaggtggtggtaacaggcaccaaatccccaagaagctgctacccaccaagtgacctccgagccactgtgtcctctccctttacctttctggctatgcatagaaccttatggaagtttccttctagcctggctgttggcttcctgggtgatcctggcagagttgtttattatttctgaatctcaccttcttttagaggtaatctcaattccttttccatctcctggaactgtcctcaggatcagatgaaactctgaccaagtgttgtgtaatagcattaaagttatggcatttaaaagcacattgcgtatacaatgctgggctccaaagaggcagaagagatagttcctatcctcttagagctgtgagtcctagttggaaaagcaagactgtactttacaagtcagatgaaaggtttatgggtgaattaacacatgaggtctgggatttgccttaagacattccactccctcccaccctgcaaagaaaaagctgggggttataatgaaataagattggggcggggcacagtgactcacacctgtaatcccagcactttaggagctgaggtgggtggatcacctgaggtcaggagttgagagtagcctggccaacatggtgaaaccccatctctactaaaaatacaaaaattagctgggcgtagtggcacatgcctgtagtcctagctactcgggaggctgagacagaattgcttgaacccgggaggcggaggttgcagtgagccgagatcgcaccagtgcactccaccctgggcgacagagcaagactctgtctcaaaaaaaaaaaaaaaaaaaagattggtaaaaaaatggattattgttgaagctgggtgatgggtacatggttactgtctctacttttgtgaatatttagatttttctgaaaaaaaaaaattggctaaaagaaaatagcatatgtactgacataacaagtgacatacatgataaaaaacctcaagggttccaaggagagggactcttgtgggtggacagctgtcaggggaggcttcacagaggagctgggagctgggctttgtttcagtgaggattcttggttacacataacagaaaccaacttgagccagtgtaaacacaacaggggacttccttatagggatccagggggcccttagggaacgtgaggaccagatgtagtcagtgctcgggaagggatgggacaagacagggaccagaaagccactggaattctaggcggccttcctgcttattctgcgtgctttgcacttgtttctttgcttctctgtccagagggcaggaggaagacaccacctctcagcaaccagtgtgtatcaagtccatcccagacacagcccagattcaacctgaccctcttagcacaattcccaagtctctgagtaatccaccaacacttatatagtgtacattgtgggtggggctccttcgggtgagtgaagggaggtaattagggggatacatctgaattaggaagccctcctttctcccttcttcatttgtctgaatcagactggaaggacagtaggatatacgtgaagagagaagatatctcgattgaacagtaagtgcttcagagtcaaacacgaagggaacatatatggaacagtatagatcctcctggcactgagggggtgtgaaccccaaatatctgagactactctcagttaatttagaaagtttattttgcctaggttgaggatgcatgcccatgacacagcctcaggaggtcctgacaacatgtgcccacggtggtcagggcaggggttttttcattaatttttgaaacggagtctcacctcttgttgcccaagctggagtgcaatggtgcgatctcggctcacttcaacctccacctcctgggttcaagcgattctcctgcgtcagcctcccgagtagccgggattacaggcgcctgccactacgcccggctaattttttgtatttttagtagaaatggggtttcaccatgttagccaggctggcttcaaactcctgacctctggtgatccacctgccttggcctcccaaagtgctgggattacaggcgtgagccaccacgcctggccagaggttggttttatacattttagggagtcgtgagacatcaattaatatacgtaagatgtacactggttctgtctggaaaggcaggccagctcaaagcagggaggaggctttcaggtcacaggtaggtgagagacaaatggttgttttcttttgagtttctgattagcctctccagaggaggcagtcagatatgcatttatctcagtgactttgaatagaatgagaggcaggtttgccctaaacagttctcagcttgacttttccctttagcttagtgatttttgggggccccaagatttattttctttcacatttccccccttttctttttaaaaacttttgagaaagcattttagaagaaaatgaatctttcgtctcaggtttcatcggatctctcgcggctaggacagtttattcctagacaggtaggtaggtcccaagttactaggaaagctcatttttagcaggttgtggtctcatgtcctatgatgagaaaatagggggagaaagggagaaaaactacaataaacaaaagaataattctggaaaagtgatataggccacattattctgaagtccatacatcagtaggcaggtatgaaggtggcttatgtatgctgttattttcttttgaagttgtctagcttcggttcacagggctttaagaaagcacagcttagttttcagtaatttcaaattaggaaagatgggaaaaaggaaaagaaattgaaaacattgttttttttgtttttgttttgagacggagttttgctcttgttgcccaggctagagtgcagtggcgtgatcttggctcactgcaacctctgccttccgggttcaagcaattctcctgcctcagccatcctgagtagctgggattacaggcatgcgccaccatgaccggctaattttgtatttttagtagagacagggtttctccatgttggtcacgctgtggtctcgaactcccaacctcaggtgaatccacctgcctcggcctcccaaagtgctgggattataggtgtgagccaccgtgcctggctgaaaacattgttttagagacctgtagccaggaaaaattagaattaagtccaaactgtaaaaaatgataaaaattgaaaaactaggtaagactagaatctaacaggtgtactatagccaggcacagtggctcacacctgtaatcccagcactttgggaggtagaggcgggtggattacctgaggtcaggagttcaagaccagcctggccaacatggtgaaaccccatctctaccaaaaatacaaaaaaattagccgggcatggtggcgcatgcctgtaatcccagctacttgggaggctggggcaggagaatccttgaaactgggaggcggaggttgcagtgaactgagattgtgccactgtagcaggacaagtcgcagacaaaacccctcagacaccgagttaaagaaggaatggctttattcggctgggagcttcagcaagactcacatctccaacaaccaagctccccaaatgagcaattcctgtcccttttaagggctcacaactctaagggggtccacgtgagagggttgtgatcgattgagcaagtggggtacacgactgggggctgcatgcactggtaatcaggttggaacagaacaggacagggattttcacagtgcttttctatacagtgtctgtaatctatagataacataaccgattaggtcaggggtcagtctttaactaccaggcccagggtgtggcaccaggctgtctgcttgtagatttcatttccgccttttagtttttacttcttctttctttggaggcagaaattgggcataagacaatatgaggtggtctcttccctcaccaccacactccagcctgggcaacaagagcgaaactccatctcaaaaacaacaacaacaacaaaaaaacgggtgtactatagtttttgaaacgtattttttctctctccactttcctgtttttactaaagacaaatcatggtaggaccaatttgctttattatacttggacagattatttctatgaagtacagtaagaataattatttttcacataggcttttaaaattggccttgatggaactttgctctgtagaaggaatctcagataagactttttttaaagataagacttttttaaagctgagcccagccatggatttgtaccatcaaatacatacaagttgggtgaattcctctcctcttgatgtcccaagataacttggggctcctgggcctatcagaaagtgacattctttacttaccacaggccaagatccctgtacagggactgtgtagacaaggtatgaggccagttttcccaaggggcttttattggctttataaatcaagttggattccttaaaggaaagcacaccattctagtcaaagccttggtaaaacaaccagtttctccaattgtgtcctgttacaaatgaaaacagatttttattgcacatatgcagataactatattgccgtaagttaagaatactcccacatagtttccaaattctggagtaatcaggtagagagaaacaaatatgcttcaatttttttcataggcgtatgtatactttattgttaaaacctggctgggcgtggtggctcacgcctgtaatcacagcactttcggaggctgaggcgggtggatcacttgaggtcaggagttcaagaccagcctggccaacatggtgaaaccccatctctactaaaaatacaaaaaattagctgggcgtggtggtgtgtgcctgtagtcccagctactcaggagtctgagacccaagaatcacttgaaccctggaggtggaggttgcaatgagctgagatcatgccactgcactccagcctgggcaacagagcgagactgcatctcaaaaaaacaaacaaattgttaaaacctgtcaatagctcaaaagaaaagtttccgtgactctgaaaaacaacacaaagaatcagcagcatttaagcaaaaaaataaaaaagattacttcagtctcctgtaagttcagttcatgcagttaattcctgttctgcttgatattcatgaacatttcagctctccatgagtcatgaaagtttttcctctgttttgatgtcacagtctttaaagttatcagaagcctgtattcaggagcacctgttagagttttatagttgattataaaaccaccttttaaagagaaactgcagggctgggcatggtggatcacctgaggtgaggagtttgagaccagcctggccaacgttgtgaaagcctgtctctacaaaaatacaagaaattagtctgggtggtgatgagcacctgtaatcccagttactcgagaggctgaggtaggagaatcacttgaacccaggaggcggaggctgcagtgagccaagattgtgtcattgcattccagcctggtcaacaagagcgaaactccgtctcaaaaagaaaaaaaagagaaaccatcattgcaaaattataactgagacagtgaaaaagatctgaccgaactgactccatgttgcttctaatctccaagctgtccttgttcattcctgggcatagacagaactaactttgggaggaacttagtttatagttgagctttgaaacaaagacgataacagccttttccccaaacccccttcctgcctggggactaggctgcctaaagccacatgattagaagttatggttattttactaaataattcaagacttagctattttcactaaaccaatgtcagtctctttcaatatttacagaagcaaagatcttttttttttaaacaaagtctggctctgtcacccaggctagagtgcagtgacatgatctcagctcactgcaacctgcgcctcctaggttccagtaattctcctgcctcagctttctcagtaactgggattacaggtgcctgccaccacgcccaactaatttttgtatttttagtagagatggggttttaccatgttggtcaggctggtcttgaacttctgacctcaagtgatctgcctgccttggcctcccaaagtgctgggattacaggcatgcgccaccgcgcccggtggctcacaagcaaagatcatcctgttttgggctgggtttatagttttgtaatccctatgccaaattttgacaccttataatatttggcagggatacatatgaaatttcttgatcaaaaaatgcaaacaaaaatgtaccctggctattcttaaggcatttctaatagtactttaccaacaattttaaaggtagcttatctatcaaagattttacgtaaacttgagaaaacatttgactagtctttcattttctgataaggtatttgatttgtgcttttatttttccttaagccaattaattagagctgttttatattttttagtagtaaatcattgtgtacacaacacataaatacgtggacatattagacatactgatagaagtacatcttaaaggtaagacagacctcctttttttttccccccttctgtctaagacttgcaaactcttgataacctgtttcattatgcttggcagttgtcagctaaatagctcctaaatctgcgtattgaaggacacaactctttggtgaaaaatcagatagcaaaatttacatcataaagtacagagaggaaaagtctggtggtgctagaggaagattaaaggtggatgccaaatcaaacatacaattatagaaatctatcataggattgtataaggagaccaatttatttagataggtactacctatcttaactggatctctgagttctgagtagagcccacactgaattctgggtctccaaaaaggaggctagaccacatgatgcttttaaaaaaaatttttttttggctgggcgcggtggctcacacctgtaatcccaacactttgggaggccgaggtgggcggatcacgaggtcaggagttcaagaccagcctggccaacatggtgaaaccccatctctactaaaaatacaaaaattagctggacgtggtggtgcgtgcctgtaatcccaactacttgggaggcttaggcaggagaatcgcttgaacccaggaggcggaggttgcagtgagctgagtctgtgccactgcagtgagctgagtctgtgccactgcactccagcctggcaacagagcaagactccgtctcaaaaaaaaaaatttttttttttggctgagcacagtggctcatgcctgtaacctcagcactttgggaggccgaggcgggtggatcatgaggtcagcagttccagaccagcctggccaacatggtgaaaccccgtctctactaaaaatacaaaaattagcaaggcatggtggcaggcgcctgtaaccccagctactccggaggctgaggcaggagaatcgcttgaacccaggaggtggaggttgcagtgagccgagaccgtgccattgcactccagcctgggcgacagagcaagactccgtctcaaaataaaagttttttaaacaaagacatttctaagtgtctaaactacactcttcattaaaaacccaagagtagcctctgttgcaataactattttagtcagaaaatcaggtaacacaatacaaaagcagtttaatagctgagaggaacttgtttatactcttggggagacccataaggaaaaacaggtttctcccccaaagggagtctggtgcctcctttttttttttttttttttttttttttgttgaggaactccaggctattataaactattttaggtttctcatgcagcagagggtgcaagagaaaggagagagagcagaagtaaatgaagaaaacagaattctgtcaactgagaagaagaaaaatttgtctcaaaaaaagacagggtcctagacagagaaaaaacaaacccaaaacataaaatccttttaaagacacacacacacacacacacacacacacacatatcggatgttagcttttaattaagctgacttttaaccattgagctcctttaaaaaaatctgtttaaatctcattgccgtatttctgcttggacaaattgctgctgtttcagaagtaccaaatatcaaacctttcagaaagggcttgatttaggaaccaaacctaggctgtcatgaaaaaaagaaggcagaaccttatgtatggaactgcagcctgaggtgatagctattgctccttcagtttggcctggctagcaaaaacgtggcattgttttgtgaataaagccccttaaggagtcaaataaaaaatctttcctttttttcttttgctggccgtttttctccctccaccatgccacttttttttcttgttttttttttttttttttttttttgtgggaatttagccacttcagaggcctcgttccccataatttggaactttccttcaaatttgatcaagttgcatagagttggtcaaacccaaggggaaaaagaccgaaacaacaacaaaaagaaacagtaaagcaaaacaaatgatcacacaacctatacaagtactgagagctctaatggtaaggagaaattaagaccagctggttgttaatcataactgtagccaagacaaaccctaattcagttacttagggatgggtttcatgctgaagactgccctctaccatcctagaagcaggaaaagactcaaacctgtcctccctgttggaagcaagctcaaaactccgtaaaggagttacttgccttccattgtcacggaagcaggaaaacttgccttccttgtgtcggaagcaagtaaaactcagaaacaaaaaaggagttgtacagcaaaataaactttagatcacctccaaattttgggagatcggggattctctggaggaggtgcttccaggcgtcagcaaattgtctgattggtttgaggcacaaagatagctcaagctggtaccagccaccaataggagatttgtcaaaggtcaggggcacctccactcagaatcccttggtggttaccaaaatgtgaaccctgaataactgagacaggtctcagttaatttagaaggtttattttgccaaggttgaggaccctgtgacacagcctcaggaggtcctgatgatatgtgcccaaggtggtccaagcacaggttggttttatacattttagggagacatgagacatcagtatatgtaagatgttccttggttctgttgggaacggcaggacaacttgaagcagggagggggcttcgaggtcccaggtaggtgagagacaaacacttggattcttttgagtttctgattagcctttccaaaggaggcaatcagatacgcatttatctcagtgagcggagggatggctttgaacagaatgagaggcaggtttgccctaagcagttcccagcttgacttttccctttagcttagtgatttctggggccccaagatttattttcctttcacaggggccatgttatgtagaagccaggctgagaaggaatctgattccttatattggttatatttttttctgaaataaatgttagcttttattttccctccaagctgcaagagccattgaactctgacttctgtgcttctcacatttaaagcctcctgatttgagtacttagtacctgccagacattagcaggtaggagttactattcccacctgacagtcaaggaaaggctcagagaggttctgtaactgggctggggccacagagctagtagatgatagagctaggattcaaacccagatctgcctaacttcagatcaaggttagtggtgctgtttccacaccaccctaaatggcctacttaataatgaaatttatgatgccagctgatgataagaatcactgggtgttaagattcttggttgctaatgaacttgaattagctcaaacaataaagatgatttttttttttgtatcagctaaccaaaccccaggaaggatagaaatacagctggcctgatggataattgtatccagggactcaaatgccattagctcttatactttgattaaaatatactttaaaaagatgctgttagtggccgggcatggtggctcaccctataatcccagcactttgggaggccaaggcgggcagttcgtgaggtcaagagattgagaccagcctggccaacatggtgaaaccccgtctctactaaaaatacaaaaattagctaggcgtggtggcaggtgcctgtagtcccagccactcaggaggctgaggcaggagaatcggttgaaccggggaggcggaggttgcagtgagctgagatcgcgccattgcactccagcctggcaacagagcaagactccatctcaaaaaaaaaaaaaaaaaagatgctgttagctagcctggccaacatggcgaaaccccatctctactaaaaaatacaaaaattacctggatgtggtggtgggtgcctgtagtcccagctatttgggaagctgaggcagggagaattgcttgaatctgggaggcagagttgtagtgagctgagatcgtgctactgcactccagcctgggcgacagtgtgagacttcgtctcaaaaaaaaaaaaaaatgctgttagatctctccctctcacttgtttccctttcgatgttggctttcttctctcgggccagctgtctaccagatggaaccatggtttcctgctttacagttttgttatcagaagagtttttctcacttcaattagaaagttctgagtgaggactcctgattggactgttaggggtcgtgtgcccagacctatgagatcaccgtggccaggtgacagggagctgtaagtggcccagcctgggtcagggggctgccctgtagccagggacaaggttctcattgtgtcagtctccaccttaagctgcatttgccccaaagaagtatgtgtgatgaggagacaaggaatgcctgacatctgtctttaaattgtcaaacacattcttctaagtctttccattacgggttatcccaagctaggaataactggtgagtagtttcttgaccttttttccagaccttttttggtgaattatgttaagctgtgacccaggcacaaatggggaggccatactttggtggagcctgggtcacataaatatggtgaccttactagaaattctttcctacttactcattgtttaataatgaacagaactctggcctatcttcttttgtcattgtttaacacccacctcactacctcccacctctcctgctaaacaaaattagccttcagcaggtcaaaacagatttttagctaacttccgtttcttgaatagcatatgataagaactcaagttagccaggtttgttctcctgcctgtaggtggttgattgggtttgtgatactgtgatacattgcatatctgctcctctgaggtagcccaaataatctggtgggggaaatatgctgttttaatgttattttgtgacctttggcaagagattttatcctccagcctcaacttccatatctgtaaactaggactattctgccaaatattacgaagggtcatgaaaaatgagagatcaggctgggcgtagtggctcacgattgtaatcccagcactttgggaggctgaggcagtaggcttgcttgagcccaagggtttgagaccagcctgggcaaagctgggagaccctgtctaccaaaaaaagaaaaagttacttgggcatggtggcgtgtgctgaagtgggaggatcgcttgagcctaggaggtcgaggctgcagtgagccatgatcatattactgcactccagccaaaaaaaagagtgctgtcagggaatctgggattcataagcatttcccttgactgctcttctttcctttcttttattatacctctcttctctctgtaccccctataccttttgctctggcttttgttacatcctgtattaaaattttagataatttatgttatttttcttttttgagacaaagtctcgctctgtcacccaggctggagtgcagtggtgcaatctcagctcactgcaacctctgcttcccgggttcaatgagttctcatgcctcagcctcctgagtagctgggactaccggtgcacaccaccatgcctggataattttttttggtatttttagtagagacagagttttgccacattgcccaggctgatcttgaactcctggcctctagcaattcacccgccctagcctcctgatgtgctgggattacaggcctgagccaccatgcccggcctaaaaatttagataatttattggaatgttgtgtgccaatgaaaagcaaatcctaagctcctgcaacatcatctcatgtttaattgtcagggtttgtgggccctctgggtcaggggatgagcagtgaattggcagagaggggtgtagggagggtagagaaggagagcatttcaaaactaatgaggcttggaagggaaggaagaaaagaaacttaaaatgcagtttctgggcttggttgtaaaaatcttgaaagtgagggagataaaaatagttgcttgttaggacctggcaggcatgctctggaggctccctgtttgaattcagttgctaatcaggaggtgggaaacaacctctggttcctgctgttagcacctttcttgcagttggccttgtcaagaaggataatgggctggagctgagaaagaagcatcgtgctcactcgctaaactggagtggagaactattctctccttactgaatttcagggatttcagcctgccccaagtcaaatccttgttcccagaaataaagctcattacatctgtaatgtgaatgattccttccccggccacagctcaataagggctcttgtgaaactttggagtacaacttattatgggttgcctttagtcctgttgtctgggccctgattttttagatcctggagagaacgctccctcaggggtctgagttctaacccttggccctatcgttaactccctgtgccaccctaacaggtgacgccttcctattctaggcctcagtgtttctcatctgtgtgcaatggtttataatgcttacctcacagtgttactgtaaggattaaagaagatagtatatttgaactggggaggcggaggttgcagtgagctgagatcatgccactgcacgctagcctgggtgacagagtaagacttgtctcaaaaaaaaaaaaaaaagtatatttaaaaggcctgacatagcaggtgttccataaatcagagctgttgtaggatcttcttaggtctgctaggctcgcctgcacctctcattctcccacctagtctctcagctgcatcctggcttttttttcccaatgctcttggggaaggaaatttgggtgggggaaaagagcttacaggtaatggctaattgaagagttggggattttctcagaattttaattatctctgctacttaattagctccttgaggccatggatagctggaggtggctctgtagagggtgcgatttgactcatccaggtcagctccctttctctctgtttcttcatctttagtggggagagttattaaggctttgccaaggatactaagaagaggttgtttgaagcctaaagtcgccattttaaaaaatcttcatttgcctttttttaaaatcctttaactgttgcttatctacttttggattcagcctttgtcacagatgagcaagaatccagcttccctgtgtcactctgcttgcttctcagcagccccttgctccttccttccacctcttctctttcttttgggctccccacttcacccctccactgcctttctcttcccccaagccccaccgtcttccatcttgccttagggaattcagctgcttttaatattagcctaaaccaaacaaaatgaaggtattaggatatagtggaaacacatagaaggccgagattcaccttggttcatctacctgccgggggccttgtcagctactcaggctatcatctgatgggtggcacccatcccacctggttggaagaatttagaacgagtccacggggccttgaccacatcttcatctttgcccttacacgtgcacatgttcttgtcatttgttggattctgtctcccctgatggtgacaatccctgtgtcctttttactcttagctcagtgcagatactctgtgtttctagaataaataaatgactccctaaattgttttatccaaacaccttattttagaggggtagaaaatacttaatagttaaacttcaaaatgtgtgctcttgagggaaaaatcaggaggctttgaatagtgttattcctgggacagaaaatatcggagaagaacatactttctgagtttttcataaaacctccttgttcatttttgaggaaggaggggttacccatactcattgtcacagaagctgagcagaattggggttattagatctcagcctcctgtgggattcctagggaagcttatgagcctgggagcctactgggtggttgatgcttcctccagaatgtagcctggccagccagctgctggggaccctctcagcatcacctttcagttatcaaaggatcagaaagagaacgcaaggcccagaggtggcctcaggaagtagagaaggactgggcctgtgatttgaatgtttgagggctctgctaggagaatgtgagaggaagcccagttaatcctcccaggactccaggagcagggcattatcccaagttgggaaggggattcagaagaactaggcatctaggagtagaggtgacagggtgatttgaaaggaagactttttagatgcaaggaccagcacaagagaaggcgagactcttacacaggggcagttagagaggcaggccagccccaaccaggaagaagtggatgtggagacgtgttgtggtgtgaagttggagaggaaaggaagaaacagtggagggcatggaaaggcaggcagaggggctggggactgtgctctgaggcagagggcagccatggcaggctctgtgcaggggctgtcccgctggaggagtgctggtttctgtgtaggcggggggagggagaagatgctggagacaggaacagtgtgtgaagggcctggctattgtgggaagcaagtgtggggtgctgaggaagatcaagaaatgaattctctctggacttgtctgccatcatgtacctcttttctgtccccagagaagagctagacttgggtgtggcaggagcaggggcaagagggatgtcctagcctggcggctccagcagcatgctctggggttcagtgatctcatgtgcccaggtttccaggtggcttcttgtgaggccctccgggatctggctcccaggaccaatgtggtctagcagtgaaaagcccctcagaatttcccttctcctcctctccaaccccttccatctctgctgcctcctaggcagtgtttttccctggagcgggtgggagaagctggagctgacagccagggatggtggcaagctgtgttatgtaagtttgaaaaaaggaggcttgcttgccatgtgaatagagatcagatacaaggacagctagaggcagcacagccatgcctgagcagcagctgtagtctgaagagaggtgtctgagccagcagaggaagaagctgctggactgggtggaggagactgttcttgtggggaaggagaggtgtctggttctgtgaactgccgatcttggagggcagcctgtgaagcaatcattgtctattcctataacatggtgtgctgcttatatgccatgccttattacatcaatcctggtctgtaacttgtgatggtatgagagccgccattgtgactgtttcaatcatggcaaaccatggcccagaaaagtcaagtgacttgctcacggctgcatgtagagtaagtggcagggtcaggatttgacacagggcttctgtctcactagccagtgctgctcttttactctaaaacaggcttaacagatcatgcctaaacagcccatggggagagtgtgggccgggtgagggagcctggtgccgtgtggcctggcatggatgagaggcaatggcactgggtgggaggagtggaagagggcttgtgttggagccccttggtgtgccgccccagcaggcgctgtcacaccccttacccttctcagtctcgttccattttcagcatcattttccaaatcctgaacacctgacctccaggggccaggtacccaacaccggtcctctgaggggccatgggcatggtgggatgaggaggtacacctccaacaagcaactgctggactcatgcctcggctgaagtgtttgtgggctctgtcctaacactaggcccagggaaagaacagagctcgcccctctcctcccgaagttcagaatctccccatggttctctgagaggctgcatggctcgctccctctctctgttcacatcgttgctcaaatgtcctctcctcacagggccgttccttgccaccctgtcacaacagtacccccttactctctctgtcctcacagggttttattatatatatatataaaaatctgtgtatatatatttaacatatatatatatactatatatacctgtatatatatagtatatatatatgttatatatacacacatatatgttaaatatatatacacacatatatgttaaatatatatacacagatatgtgtgtgtatatatatatatacacacaggtatatatatatacacacaggtatatatatatacaggtatatatatatatatacaggtgtatatatagaggtatatatatatatattttttttttgagacaagagtgtcactctttgcccaggctggagtgcagtggcacgatctcggctcattgcaacttctacctcccgggttcaagcaattctcctgcctcagcctccctagtagctgggattacaggtgatgtgctaccatgcccagccaatttttgtatttttagtaaagacagggtttcaccatgctgacctcaaatgatctgcctacctcagcctcccaaagtgctggggttacagacgtgagccactgcgcctggctgggttttatatttttctttgtgccacttaagaccacctaatgttacatatttgttcattgatttgtctgtctcctcacaataaaatttaagcttcatgacagtgggggacttggtcagtttcttgactgcccacacagagcccacaggtaaggtagcaggtgttcagtggacagtaggtgatgaccgttagagcatggcagcagggtgggtagaagaggacaggtgtaagtgtcagagggcctgggatctgctttcagctttacccagtttttgctgtgtgactttgaacaagttgctggatctcttgggccttagccttctttttttttttttggagacagaggagtctcactctgtcacccaggctggggtgcagtggtgtgatcttggctcactgcaacctctgcttcccgggttcaaacgattctcctgcctcagccttctgagtagctggggattacaggcgtgtgccaccacacctggctaatttttgtatcttcactacagagaaggtttcaccatgttggccaggctggtcttgaactcctgacctctggtgatctgcccacctaggcctcccaaagtgctgggattacaggcgtgagccaccatatcctgctgggccttagactttttgttttcatcatgaaggggaggaactaggtgccctctaaggctgcttttggcacctctcttctgaaagtctatgtgtaggagacgagggtcgcagaggggtttgcaaagatttgtatcctgtgttcctttactgaagagcctgacttgggtctgcacactgtggggtaggggagtgacatgatgagggctgggtcttaggaggactacaccagtgatgcagtgtgtgcatgcatgtatccatggtgcatttagaaccattcattcaacaagggcttttggagcacctgccctctgtcagatacagtttgggctcagggcttagagtggtgaggcagacagccaacgtcctgccctcctgcagctgattggggcagagagaggctagagctggcctggaatggtgattacccccaggctgaagatgaagaggggccaagtggagttggggcactgggatattagagggtcatgatttttttttattatttttatttttatttatttttttgaggcagagtttcactcttgttgcccagactggagtgcaatggcgtggtctcagctcactgcaacctctgcctcccaggttcaagtgattctcctgcctcagcctcctgagtagctgggattacaagcatgcgccaccacgctaattttttatttttatttatttatttaataaatatattttttgagatggagtctggctctgtcacccaggctggagtgcaatggcatgatgtcggctcaccacaacctcctcctcccaggttcaagtgattcccctgcctcagcctcccaagtagatgggattacaggcgcccaccaccactcctggctaatttttgtatttttagtagagatgggagttacgccatgttggtcaggctggtctcaaactcctgacctcaggtgatcttcctgccttggcctcccaaagtgctgggattataggtgtgaggcatcgcccggcttttgtttttcaatttgtccttggaaagatacttaaatagacctgtttgaatctgtttaagaataaatagccagccatggtgactcacgcctatagtcccagctacttgggaggctgaagcaggtgtgttgcttcagcccaggagttcaactcagcctgggcaatgtagtgagactctgtgtctaaaaaaaaataataataaatgcattcatataacagtatcgaagagaaaaataatgaaacgttattagtggctctgctgggttgtattataggaggtttgggttttttctgtgattttctagatgtcctatatggtgtctatattatgactattaatatagacaccatataggtttgggatgtcatggtttagcatgtttcctagatatggtctgccctcaaagtgagtgtcattgtttgctgatgtctgctccacaaagccctgctccaggggccttcaccaagtcccagccttggtttgctcacctataaatgaggataattgaccctggtctatgcacattacaggacagttgtatgaatcagaggatacagcggaagaaaaaatgtttggaaatttaggtctctgcaaactaagggccaatgtactggtatttgtgacagtgaccggatgggtgggatggggtgataataagagtgcaaggaagggggatgggggcatcgttttgactctgaggagcagctttaaggcctctcacattccagctccaggtagcaaggggttccccttgactggcagggtagatgtacctgtgtaggctgttaggtgagtgactccagtggaatggaatggaatcatgactcagctcccaccctgccacacatatttgtaagaaaaagacccacatgctccatgcctggtgcagaagtctagaatgggaattcccgccaaaccctgtccccttctagcctgtgtagcctcagcaagcagataggtcttattacttgtttttttctgcctccttcatgatccagccatagatactatatcttaccagtaggggtggttgaagcaacagactttgaaatcctgactgttcatgataacggactccttcctgtggatcatctggccaagtctgcattcttagagagtggaaatcgactgtctttctgttctacttctacagcagctgctcatttcatctcctgacagttgcttcttgaactcagaacaaagggccttggtgtacagtgtttgcaagccaagggctgcctctgatggcggacgggggtgtggtcctgggactcgtggtcagggctggtctgtgtggaatgctgatccttctcttccccaatctacctgtgtcagttccctccttttctattttctcttccctgcagatgtcaagccctccaacatcctagtcaactcccgtggggagatcaagctctgtgactttggggtcagcgggcagctcatcgactccatggccaactccttcgtgggcacaaggtcctacatgtcggtatgaacagaagtttccattgcttgagcttcttgtacggtcagggagaggagcccagtgggtgcctttcctgtggagccagagtcttgtgctgggtaggggacaagaagtgagggaggaggcacagtgctctgccctgaggagatgaagttgaatgggaagatggtcttggtctttcttaggccttggagcataactgggatattggggccttgactcactgaaaggactgtccagctccagagtgtggctttctttctgaaggattgtgagctccagctcccctctgggcatctctacatgatagtcttcagatccacaaacccaggatgctcagatataatccaccccaaactacctcaccttctccttttctcttagcagtaaatagacagcatcatctccctggtttcccaaggtagaaacctgagcattggctcttaacctgccttctcagcagcccgtcctttcagtatcttgtagctcccaactcctgagagtctgttcagaattgtccagcctcttttctccctcctcactatgtctgtcagacatgtacccctccttctaactgcagcatacctggacccctcgccagagtctctgctccacttcagccaacaccctgtgttgagggtatttcctcctgctcctggctctgctggctcacactgtcaccagagcattgtgtggggccatcctcacactatggcagcaccagcgtgttttcttccctcctccataccaccggttccttggggacagggacaaggtgtctctcttgtccctagtgcctggcatggggcctggcatgtggtaggtgttcagggaatgcttggcaagtgggtagatgtttagttggctgagtgggagggtacatggataaaacatttctgagaatgatttggaaaggtggaaacgtgagtctgggccagtgctgaagtgcggcaaagtggaggagcgttggagtgagtaggcagtctttacagaagtggcggggagtgcaggcccgcgtggagagggggacaggcgcagaggctcagatcttaacttgtacaaagcattttatgtgttctctgtcaaagcacatgtcatgtccctggaaggtctcatttgatccatgtggttgtcccaggaaataaagattattgttcccattttagaggtgaggaagtctagattcagggaggttaagcaacctgcctacttaaccttgctgagccaggattgaaagctagctgcccccttgccaggcagacgccctttgcacagcacaccctcatttgcctcttggggaggatttggcacctgtgcccagatcccagtgtgaacacatcctcattccttcttgctggcacctaccccccactgtgactccagccactgtcaacatcactcacctggcactgacccacatccccacccctcccctccagtgacccacagtggaactctctttctctgtcatctcctcattgcttcttccctaaatgtctaataactgagcagctggcatcctgggccatttgactgccaactctcaagttcaaaatccattaacaggccctgggagttactaatcaagggtttaatggttggggtttttgtggttatatggtcagttacgaaatagtccagtgttggagttagtgaaaaatgctactggagaagttaatgtctacgtgaatatactatgggcagaataaagattttttcggtagggttcttgaaatacatgtgctatttcaaataatgctcattaaaaataatgcttttgtatagcactgtatactttttttctctttggcttttcccaccaatatcaaccaatatttgtattgcattttacaacatttgacatacattttctttttttttttttttttgagacggagtctcactgtgtcacccaggctggagtgcagtggtgcaatctcggcttactgcaagccctgcctcccaggttcactccattctcctgcctcatcctcccgagtagctggaactacaggcgtgtgccaccacgcccggctaatttttttgtatttttagtagagacggggtttcaccgtgttagccaggatggtctcgatctcctgaccttgtgatccacccacctcggcctcccaaagtgctggggttacaggcatgagccaccgcgcctggctgtacattttcatttgatttgatcttcttagtaatcctaagtagagttttcttatatcattgttactgtcattttcatcatcatcagccaccacccccccccacctttttttcttccgacatggagttttcgctcttcttgcccaggctggagtgcagtggtgcgatcttggctcactgcaacctctgcctcccgggttcaagtgattctcctgcctcagcctcccaagtagctgggattacaggcatgcaccaccatgtccagctaatttttgtatttttagtagagatggggtttcactatgttggccaggctggtctcgaactcctgatctcatgtgatccgcctgcctcagcctcccaaagtgctgggattacaggtgtgagccactgcgtcccggcccagcagcagccccattttatagatgaggctgatattcaggatcttttagcttgtaagtcccggaattgggatttaagtctcaggcccactgaccccagatcttttgttctatgtatccacggcaccacctcactcccaacccgcattccacaagcttcatgtttcagattcagtgacaagatgagcctctcatgctgggcttcggacaggctgccctgcgtgtgcaagactgtggccaagctgggtaaagctggaaccacaggctgtagtggcagccagggcacagctgattacatgtggtctgtcaatttaggccagattataggagaaatagagcagggatgaggggttaaagccacagaagccagctaggatttggtaaacacagtgttgggggtaggcaggaggccaaattcaagaggttagtggagctcttgaaacaggatatgaactattgagaagggacagaagagaaaatgcattagcagacccaggggtccaagttaggttaggtgattatcactgtctgtctctcctgcagccagaaagactccaggggactcattactctgtgcagtcagacatctggagcatgggactgtctctggtagagatggcggttgggaggtatcccatccctcctccagatgccaaggagctggagctgatgtttgggtgccaggtggaaggagatgcggctgagaccccacccaggccaaggacccccgggaggccccttagctgtgagtagcctggtgtgtccccatcttggactgttggaggggagggtcccttactttcaggggtttctggagggctgattctctgtacattctgccaagactgattctctgtccctggatgccaggctagggccaggggaagcagcaagggtctccaggtgggtgttgttactaccaacaacttcctaccatttgttgagtacgtactatgttctaggtactgcacttaggactttatacattatctaaccttttgtatttattatttttattattaagggtcttgctatgtcgcccagtgcagtggctagtcacagtcttcaactcctgggctcaagcagtcttcctccctcagcctccagagtagctgggactacaggttataatttatttgcgggggttgggagggaaggggctcactctgtcacccaggctggagtgcaatggcatgatcacagctcactgcagcctcaacctcccaggcccaagtgatcttcctacctcagcgtcctgagtagctgggaccacagtcacatgccaccatgctcagctaggttgttgtttattttgtagagatatagtctccttatgttgctcaggttagtcttgaacttttgggctcaagcaatcctcccgcctcagcctcccaaaatgctgagattacaggcatgatccaccatgactggcttctaatttgtgggttttttttgttttgttttgtttttgatactgggtcttgctctgtcacccagggtggagtacagtggcgccatcatggcttactgcagccttgacctcttgggctcaagtgatcctcctgcctcagcctcctgagtagctgagaccacaggcatgcgccaccatgcctgactaatttttttaatttttttgtatagatgaggtctcactatgttgactaggctggtctggaactcctgggctcaagtgatcctcctgccttggcctcccaaagtggtgggattataggcatgagccactgcattctaattttttaatcatgacttttggtagatttattttttattgagatatagaattcacataagacaaaattcacattttaaagcatgtagttcagtggtttttagtgtattgttccatgttgtgcagccatcaccactgtcttattctggaacattttcattaccccagcaagaaaccccatcccccactcccccctgcctgatccactgacaaccactaatctactttctgtgtccacggatttgcctagcattatataattttaatagcatttcatttgtgatcacgactataatctgaattttaaagatgaggaaactgaggcacagtgcacttgtcaaggccacataggcttgcaagtagccaagtctgactcccaagatgataaacactgtgcagtaccacctgcctctctgaatgtgaatactgggaagtaaacctggtactcagggaatagcctgacctagccaactgttttttatgtagctcctgtctggccagggatacctgccctgtacctccatgaggtccacatgagagagagcttgtataaaggggaaagcagagggggctagaggtagctgatggcaggtcattggaggggctggtggctgtggcctctgaggctcgccagtgactctaggagacaaaaggaagaaacgcaacttcatggagaattaaaactaagtcctttagttatttagttgctatctcatttgtgcctctctcaatagaaggaagggggaaaggacagacataattattatgtctctgctttacaaaactcagaactttgtttggctcagcagtgaactgatttgccaaaggttacgaacttaagatgtggcagagcccagacttgtaccctggcctttgctggtcccctctgtgttcaagccttatctgtggctgtttaatgtttattgtccatgaccctgttctggtcccagggatccatgcccaaccccttgcctcatattaacaagtaatctgtttctgagaagtattttttctttttataaaatttgtagcatacggaatggacagccgacctcccatggcaatttttgagttgttggattacatagtcaacgaggtaagtactgcctggtttccttcaccttggaatttacttgctcatcttaagaaaacacccaggtggccgggtgcagtggttcacgcctgtaatcccagcagtttgggaggctgaggcgggtggatcacacgaggtgaggagttcgagaccagcctggccaacaaggcaaaaccccatctctactaaaaatacaaaaattagctgggcatggtggtgcacgtctgtagtcccagctactcgggaggctgaggcatgagaattgcttgaacctgggaggcggaggttgactctgggaaaaacaaaacaaaacaaaaaaacaaaaaaacacatcgctgtcacaggttcagtctactagggagtttaatttaacctctctttactgtatgcacagctttatactaagcaccatgggctgtagaaaagcagtttcaggattagttcgtcgctgcttaaggatttgagggaggcagagcatgttgcatttgtaggagtcagaaaaaaagccatccatcctctactgctggggacctaggctaggtggttctgggtggtagtcatattaagggaagggatatctgaggttagatacgccattgcgtctcctagtgtgcactgctttcttccaaattttcacattaatttcccatgcaattctcccaagcattgctgaggtaggccaaattggttcctcttcaaacaggtgaggaaattgagcctccgagatgaaaagtagcccaggtccttcccacccagtgctctttcttccttgccacctcccacctcccattcttacctcctaggaggcttggctgcatggcagttgttctactgcagcctctgctggcacacagcccctctgctgcctagctctttcctgttcagaaggaatggatgctgcctctggaggccaagctgctggtctcctctcttccttgaatggtcccttgattccctcagcagtggggacagtctgcagaatggggcttgctctgggtcactgttctaagagctgagttctagtcctcacctaagatcagactgacatggccctcaaaggaagagcactaggttgggctttgtggtggggatcagtgtctcatttttagtcccaaattaaaaacgagattttgggctgtacatcagagcagtgacatcatggacattatgtctgtgggtcagcatgggtacacacagctcccagcccaggtacataagtgggcccacatttcctggactgcatggaacgccatgagcccagtgctccagagccttgtactgtatagtgctgcatgatcaccatgggaaaatctgaaaacagcctcatttctggaatgtacaggtaacattcttccagatccagccctctgtcagttaatgttttattaacttttcactgcttctctagggctcagaaaagggatttttaaaaaccggtttgcttctgcaggtgctgtcagacctgggctatgcctggtggtttgcacgtgcccctagctgttgctgccagtaaattgctggttacgttcccatgccgcactccaagatttaccattgtagagtgtcagagcttgaaagggtccctgagatcattaggcccaacctcttcatgtcatagaagagtaaactgaggctcatagaggaatagtgattagttcaaaatcacccgacaagtgagtggacttgacttggtcccaattctaaatgtgctatttgagatcagtggttccaacatggttacccaacaggcagcactggccttctacctgtgcctttccttgactggatgagagtagtactgcctttggactgcagagaagactttaaaaaaaagtagcactggctggtgggaggggtgggatggggagaggagatggctggagcaaggagccaggcatttttcttatctcaacatgtgtttgcagcctcctccaaaactgcccagtggagtgttcagtctggaatttcaagattttgtgaataaatggtaagttggctccttgttctctggaagcgtatactctggatttgtcaggctccccaccccatttctggaagcaccagcattgcttctgcaggcagagttttgccctttaccctcccgtctgatgattcttggctgctgccataagcccttttttagagtgccaagacttatgtggcatgtctaactacatcatggatgtagtagctgctccttttggtacttgctctccagggattggcacgttgctttttgaccttagtttaactcagcaagaatgtattaacttactgtgggcatgatactgtgcttagaacaggaggatgaatcaagcccaggcaatcctcggcctctagtgtgcagagaagacaggcatgcaaacatgttatttgagctagaaccagtgccaggcaacagctcttaccttgtctttcttcctttaagcttaataaaaaaccccgcagagagagcagatttgaagcaactcatggtgagtctatttattccggattcttacagtacctgtttattcatttgttcttctctgtcagtcatctgtgcagtacttccagagcccattcattccctgcccactgtggtccagctgagcctggggctgcagaataccaaacaccagtctcctttgctctcccatcagtttaagggaaagctggggtgacccccgcagcctgagtaagcatatgccagaggaaatgcctgagggggccatgggaaagaaaaggccagcccacccccttcatggggatgcggcctttccctaatactgactgcctcatcttacattcagcctccttccagagtcactctccgcctgctgtctcgtttggtggcagtggaaatagctaagtaatactgtaaatatctggacagccatagacggtgtatatagtatataatatgcactaagtccatcattttctttgtcccttctaacaagcctgtgaggcatttaaggcagagttactgtctccatactgcacgagtaggctccaagaggtgacttgcccaaggcctcacagctgctgtgactggtggagcaggtctttgggcctgcagctggccccactgttgctcaggggcaggtgccaggtgctctttccaagtgcagcacaagctctagacctgaaactcttggattttccttcctggtgggttttgtttttttgtttctttttaacaccacgtcctctcgtttccttacatgcaggttcatgcttttatcaagagatctgatgctgaggaagtggattttgcaggttggctctgctccaccatcggccttaaccagcccagcacaccaacccatgctgctggcgtctaagtgtttgggaagcaacaaagagcgagtcccctgcccggtggtttgccatgtcgcttttgggcctccttcccatgcctgtctctgttcagatgtgcatttcacctgtgacaaaggatgaagaacacagcatgtgccaagattctactcttgtcatttttaatattactgtctttattcttattactattattgttcccctaagtggattggctttgtgcttggggctatttgtgtgtatgctgatgatcaaaacctgtgccaggctgaattacagtgaaattttggtgaatgtgggtagtcattcttacaattgcactgctgttcctgctccatgactggctgtctgcctgtattttcgggattctttgacatttggtggtactttattcttgctgggcatactttctctctaggagggagccttgtgagatccttcacaggcagtgcatgtgaagcatgctttgctgctatgaaaatgagcatcagagagtgtacatcatgttattttattattattatttgcttttcatgtagaactcagcagttgacatccaaatctagccagagcccttcactgccatgatagctggggcttcaccagtctgtctactgtggtgatctgtagacttctggttgtatttctatatttattttcagtatactgtgtgggatacttagtggtatgtctctttaagttttgattaatgtttcttaaatggaattattttgaatgtcacaaattgatcaagatattaaaatgtcggatttatctttccccatatccaagtaccaatgctgttgtaaacaacgtgtatagtgcctaaaattgtatgaaaatccttttaaccattttaacctagatgtttaacaaatctaatctcttattctaataaatatactatgaaataaaaaaaaaaggatgaaagcta

SEQ ID NO: 54 - DNA, 102651 bp, Pan troglodytes
  variation 10892..11259: note = n is a, c, g, or t
  variation 31852..32175: note = n is a, c, g, or t
  variation 52822..53038: note = n is a, c, g, or t
  variation 67995..68720: note = n is a, c, g, or t
  variation 75089..75901: note = n is a, c, g, or t
  variation 95360..95974: note = n is a, c, g, or t
  source 1..102651: mol_type = genomic DNA
cgggtccaaaatgcccaagaagaagccgacgcccatccagctgaacccggcccccgacggctctgcagttaacgggaccagctctgcggagtaagtatggggcgggcggtgaacctcggggcccggctggggaggcccgagccggggagcaggagcgcgcgccaggctccgatctggtttgtcacgtacgtctggggctggcagggggcgagaaactcccggccgccgaggtatcggtgactaagcactgattgtgctcctgactcagaccagttagcggatcccgcgggtctccattcctctctgtaccccttttaccgaccgttttagtggttcctggccactgtacagtcttctcccaagaaaataaaagctagcacgtctcccctgcctcctcccagttctgttctaaatgtgatcatctgggagtctggcctgtaacggggagaggaggctaatgttttggaaagaattaagatcgcatctgtgcttttgagaccagctcaggatattaagtgtggagcgtcatcctcaccttcatgcctgacacctgtggggcctgagtgccttgttgcaggccaactgcctggccagcgggggcgtactggaagtccgtgtggacttcgtggcttttccttgctgactttggaggttcccggtacttggccttcctgggaaattgctcaagaaagcggctttcttcttcatcctactcttcattcattgaacaaaccattttctcactaatgatttcctagctttccgtacttcaccaggagcccctaaactcctgacctgaggcatgaacaccatgacctagaaaccacatgctaggtgctccatctctgcagcttccagcgttgcttacaaacgagcactttatttcattaaataatcatgagtctgtttcctgggggtttctgagctcccacaactctcttgggttctaggtaagggacaagactaaatgagggaaagctgcttagctagctagagaaataggcagaaaagattaggttattattattatgttttttgcctttttttggttgtttgcccaacgttcagtaaggattgggttcttaatcttttacctgcacactgcagactttaggaagctaattgatgaaatcagagtaggcttggaccttctgctctttggtgatttctgtaacctcccttcctctctctagatttttagaaaattttattttttaaacttttatacagatggggtcttgctatatggcttaggctggtcttgaactcctggactctagcgatcctcccaaagttctgggattacaggcatgagccactatgcccagccaactttctctagattttaataacccggggacctgttggcttgatgacttgttccatccctgtaatgatcacaaggtcgatggtggacctgtggtgtgtgttcagctgtgtttttcagacctgctcccaacagactctcttctttagtcccctctcaatcctgtggggtctattttgcataatactgacttgtataggtagttagattgcattattgcattgcaaacatttgttcttttttttttgagtcggagtttcactcttgttgcccaggctggagtgcaatggtgcgatcttggctaactgcagcctctgcctcccgggttcaagcgactctcctgcctcagcctcccgagtagctgggattacaagcatgagccaccatgcccggctaattttgtatttttagtagagatggggtttctccaagttgttcaggctggtggcaaactcccatcctcaggtgatccgcctgcctcggcctccgaagatgctgggattacaggcatgagccactgtgcccagcccatttgttcagttttagtgtacagtgagtgtttcaccctcttaaaatagactgaaagtcatgactgttgttaggacaagttttgaccacagtggattctggctgaatgttgtggcctcattatcctttcctatttgatttggaagtggatactgagtagaattacctgttatcattctgttgtaatcgtgataccacaactgtattctctcaaggaggaggaatttcattaaaacagtaaaagcaggatgagaagaaactaccccagatttggtggcagaaaaatttggatggtactgggagagtctaaacagtggttaaaaggtaagggctctggagtcaggctaagtttgaagcctagctctgttgtggtttttttttttttttttttttgacagagtctcgctctgttgcccaggccagagtgcagtggtgcgatctcggctcaccgcaacctccacctcccggcttcaagcgattctcctgcctcagcctcctgactagctgagactacaggcacgtgccaccgtgcctggctaatttttgtattttaatagagacagggttttaccatgttggtcaggctggtctcaaactcctgacctcgtgatcctcccacctcagcctcctaaagtgctgggattacagcccggcctctgttgtggttttgtgacctggttcaagtcttttagtttaaggcttaggtttagtttttttcatctgcaaaaatggggctaatgatagaacctacttagcatagttgtgaagattaaatgaggtagtacatagtaaacttccaaagctgttggctgctggtgcctttgttactgcttaagtgttggactgaaggaaactggaaggtgattttcattcatggtggtagattatgtgttaaggtgcctttgcttctggacaatcaactctccctagtttggttttttgtaccatctgcatctacctctatgactcattgctgtgttacaataggaggcatctttgtgtaggctgcccaagacaaacagggactgtttccctgtgtttcgtagcactaatgagagggaaagctgtacacatcttcatctttcacttctgagagtgttcctcaagcaaaatgttccctatcttgggctaccagcagaaagaattctgttgctttcatgatttctgtgattagaccagggcacaattttgaacgttatcagacaatgtgaactaaagaggaagaaaatccattttgacagtaaagaactcttggtaccaaattggcaaggttgcttttcccttggcacctgtgcttacctctaacatagcccttacccagttcagagatggagttgggtaatacgggacctgaagttgatgcaagttgtaggggtacccaaagaaaaatcatgcaaaaatagctttcttttgtgtattttgcagaaagatgtgagcatattactagggtcttaagtgttagaatgagataatattgttcctctgtttaaaatgttcttctggttctattgcagttacacaaaatccaaactccttatattggactatgagactgagtgatctgcctgttgtccccaccaccccctcccaccaatctctttaaccacatttcctgccactcctttcttccaccacactagtcctctttcacttcctctatgggatggtctatacgcactgcaggcctctgtacatgctgttccctttgcctggaatgaatcactcctccttccctaggtaggcaggaagcagtcttcacctatttgcctaaatgtcacttcctctgagatgtttataagcatctcagaggaatgtggtccctctttgtcatgtcacctgagctgctgctttttttttttttttttttttggtacgggggtcttggtatgttgcccaggctggttcttgaactcctggactccagtgattctcccacctcagcctcttgagtagctgggactataggtgggtactactgtgcctggcgctcacctgagcttttaataagacttaatcattgtaatttttcattggggtgttcttaatatttatctctcctgtacactataaactttaagcacagcactgcctttttgttttttgagacggagtctcgctctgtcgcccaggctggagtgcagtggcacaacctcggctcactgcaagctctgcctcccaggttcatgccattctcctgcctcagcctcccaagtagctgggactacaggcgcccaccaccgcgtccagctaattttttgtatttttagtagagatggggtttcaccatgttagccaggatggtctcgatctcctgacctcgtgatcctcccgctgggattacaggcgtgagccactgcgcccagcctgcactgcctttttttgactcaccactctgtaagtacacccaaaatagttctggcacataataggtccattgatgtttgttgaatcagtgagtgaatgaaatttctaatatttgcacaacgggtttaataaaacttttgatgtcttttccttttcttttcccctttatgctcattccttttttccccatttcgttttgttttagtcacccactcaaccattctaagatatttgtatggttttataattccacctgttagtctggttatgtgtatacccttgggaagtagaaggatggttttgtatgtatctgcttaggattctaaaatgttattgtgctacaaatctgcatttcatagacaggatagaataggttatgttgaggtaacaaccacaaaatctcagtaatttaacacactttcaggtcagtgggaggctctgtagattggagtcctttagggatccaggctgatcgaggcatcgtctatgaagtatacctacatgaggagggaatcttgtgaagagccacattcaggctcttaaagttttgcctagaagtgagccttgtcattttcgctgccatttctttggccagagcaaatcatgtggccatgttgaccttcaaggagggcagtgacctttttggaagggggagaaccacgagtatttgtgtttttttggtttgttttttgtttttttttaagaaagggtttcgctcccactgcccaggctggagtataatggtgtgtgccaccacgccctgctaagttttgattgttttgtagagatgggatttcaccatgttgctcaggctggtcttgaactcttgggctcaagtgatctgcccacctcatcctcccaaagtgctgaaattataggtatgagccactgtgctggtgcaccaggagtatttgaacagaagcaatgaccatctctaaattttatatcagtttcttctttgttttcttttgttttcttttttttttttttttttgagatggagttttgctcttgttgcccaggctggagtgcaatggcatgatctcggctcaccgcaacctccgtcccctaggttcaagctattctcctgcctcagcctcctgagtagctgggattacaggcatgtgccaccgtgcctggctaattttgtatttttagtagagacagggtttcaccatgttagtcaggctggtctcgaactcctgacctcagatgatccgcctgcctcagcctcccaaagtgttgggattacaggcgtgagccaccgcgcctggccttagtttctttttttaaccaattttgttttgagctctattcatgatgctatacaatatgtatctagttcattatttctcttggttgtagggcagtcatgtttgcctgccacattttacttatttatttctctagaattagacatctttgttgtttcccaaccccttgctgcctcaaacagtcatgaccatgcccatccttgcacatccttgtctcctttggatgttgtgagagagtttcctgtggaatgtactcagaagtggaattgctgggtcttagggtacattgcctctccttccaggataaggcatgttatctctctctctctctctttttttttttttttttttgagaccgagtctcactctgttgcccaggctggagtgcagtgttgcaatcctggctcactgcaacccctccccacaaggttcaagcgattctcctgccttagcctcctgagtagctgggattacaggtgcctgacaccatgcccagctaatttttatatttttagtagaggcagggtttcattatattgctcaggctggtctccaagtcctgaccttgtgatctgccctccttggcctcccaaagtgctgggattacaggtgtgaaccaccacaccggctattaatctctttctttaaaacaataccgttaatccatttgcagtagtgaggcagggtacctctcaagatctcactttttctttgaccttgggcaagtcctttctactttctgactcttggtttccttatctgtaaagtggaggtgataattgtttacaaaatctttaccatggtggcctacaaggccctacatgaccaggtccttagttttcttccagtgtcctcttcactcatgcactctagccacactgtcctttgtgctgttgggttgtaggttgggcacattcttatcttagaatctttgcatttgccattcctgctgcctggaaagtttgtctctcaaataccgtatgacttgcttcctcacttccttcacccctctgttgaaatgtctcttcacagaggccatcttcgatcactctaatacagaactccctgtcattttctaccctttgattttgccttacttttctttgtagccctgatcactaactgatgttgcatcgtatataagtatttatcttcttctgccaccccaagtgtaagcttcatgatggttggggctttgccttgttcattgctcagtgtgtagaacagattctggcacatagaaaatactcagtagatacctgttgattaaatgattgactagatcctacctcagaggaatacctttgaagatgtataaaatttctttgaaggctataaggtgccgaataaccttaggagggttcactgcttggccttagtagcgttcatgattttggattttgaattgtttctatgtaaccctgaaacactcagacttacttattgcattcagggtgtagttcatagcatcagcagttctgccaggtttgtaaggaacacacatctgttggagtgtgaaggccctggaggaagaaaggttgagacaggttgatgtgcttttttttgtctcttatggctctttctgagatgtgtagcatgataaccaggaacttttttttttttttttgagagacagggtcttgctcagacactcaggctggagtgcattggtgcttactataaccttgaactcctgggttcagggaatcctcctgcttcagcctcctaagtagctagtactaccggcatgtaccaccatgcctggctaattttaaaatttagagatagggtcttgctatattgcccaggctggactcaaactccttgcctcatgcaatcctccctccttggcctcccaaaagtgctgggtttacaggcatgagccaccatgtctggcctgataagtaggagcttttgaagtggtttcacactgattttgtagttttgaacttggatgcttctttttggtagttgatgcagtaactaatactggtgctgtctttcagaacagcttcatgtgaaaaaggcctgcttaagcctgtgtctttgggaagaacatctctgctgctgttacagcagatacagtaatagcaaagaaagtcttaaagatgatttagcccatggcaaggaaatatatgggactcttgtttgaatataaacactcacagaattccagtttcacttatttatgcacctttcaaagaaaggaagaagatactgtggtagagtacagtagtcctcccttatctgagtggcatatgttccaagacccctaatggatgcctgaaaccacagttatcaatagtaccaaaccctgcatatactgtgttttttcctatgcagtatatgcctatgatgaagtttaatttataaattaggcatagtaagagattaacaataataaccaataaaaaagaattataacaatatattgtaatgacagttacatgaatgtggttactgtacttactgtgggtaactggaattgtcaaagcaaaactacatttaagtgggtactcctgtagctgttggccctgccttgcctatctagcttaattttcctctgtttttcggttcacctgctgtggtccacttaccactttctttactctcctcactgtgccgccagcatactgtttcttaccttcttacatctgtctggtcttgctgacatggttttttttttttgtctgaaatgccctcctccactttcttgcatgatttttttttttttttttttttttttgagatggagtctcactctgtcgcccaggctggagtgtgcagtcacatgatcttggcctcactgcaacctctgcccactgggctcaagtgagtatcgtgcctcagcctcccgagtagctgggattacaggcacacaccaccacgccgggctaatttttgtacttttagtagagacggcgtctcaccatgttgcccagcctggtctcgaacccctgacctcaggtgatccactgcctcagcctcccaaactgctgggattacaggcgcctggccctcttgcatgtttttatttttgttttatacttgccactacactttagcttctgtgaaaacagggactgtgattgtcttgtgtactggtatttctccaccgtctgctgtggtgcctagaataaaataaatggtacccatcttttttgttttgttttgtttttggagatgagtctcactctgtccccaggctggagtgcagtggcgcggtctcgcctcagtgcaacctatgcctcccgggttcaagcgattctcctgcctcagcctcccaagtagctgggctgcaggtatgcgccaccacatctggctaatttttgtatttttagtacaaaatttaaaaatgatggcctcgatgtcgtgatctgccctcctcggcctcccaaagtgctgggattacaggtgtgagtcaccgtgcccggcccttttgtttttttgagatggagtttcactcttgtcatccaggctggagtgcagtggcatgatcttggctcacgaccacctccgcctcccgcattttcctgcctcggcctcccaagtagctatgataacaggcacacaccaccatgcctggctaattttttatttttagtagagacaggatttcaccatgttggtcaggctggtctcgaactcctgacctcaggtgatatgcctgcctcagccccacaaagtgctgggattacaggcgtgagacaccgtatctgccccggatagtactgatctttcaagatcttacataaagcttatctccaatgtgtgtagtcttttctgagcaactctgtgccatgctcagttacatcactccctacttagttataatagttctttttttctttttttgagacagagttttgctcttgttgcccaagctggagtgcaatggcgtgatctcggctcactgcaacctctgcctcctgggttcaagcgattctcctgcctcagcctcccaagtagctatgattataggcgcacaccaccactcctagctaatttttgtatttttagtagaggcagggtttcactatgttggccaggctggtcttgaactcctgacctcagttgatctgcccacctcggcctcccaaagtgctgggattacaggcatgagctaccatgcctggcctgtaacacttctttttttttttttttttgagatggagtcttgctctgtcgcccaggctggagtgcagtggcacaatctcggctcactgcaagctccgcctcctgggttcacgccattctcctgcctcagcttcctgagtagctgggactacaggcgcctgccaccacgcccggctaattttttgtatttttagtagagacagggtttcaccgtgttagccaggatggtctcgatctcctgatctcgtgatccgcctgcctcggcctcccaaagtgctgggattacaggcgtgagccacggcgcccggcctgtaacacttcttaatggtgtgacctcggtcatatcacttaacctcactgagcatagttttcctcattagtagagtaaggctggtaataagaaactcatgagggaagtagggtgggagagcatcatccaaaataatatacacggaagcactttatggggaggcaagagtgggaaaagaaaaaagcactttatgatcactggaatgctatgcaaatgggatgtgttaatgatgccagcttttgatttcttccttcttagaaggctgaatggttccttttgttcttaatagcaaattgtaaatgttgatagatcatgttgatttagatatttcatatgctgcttgtccttcaaatctagcccaaacctacatctaatcaagcctttagacctaacttcctgtttatagcaaatacggggatagaggaatgagttaatggcaccaaagggaaacaatcagacaaacctaggatgtggaacattctctaagacaactgacctagtctcttaaaaagtcagtataggccatttgcggtggctcacgcctgtaatcccagcactttgggaggccgaggcgtgcagatcacgagctcaggagttcgagaccagcctggccaacatagtgaaaccccgtctctactaaaaatacaaaaattagccaggtgtggtggcacgtgcctgtagtcctagctacttgggaggctgaggtgggagaattgcttaaatccaggaggcggaggttgcagtgagccaagagcatgccgtggcactccagcctgggtgacagagtgagattccatctaaaaaaaaaaaagtcagtataagggtgggcatggtggcacacacctgtaatcccagcacttgggcacttggggaaaactgccaagtcaggaggattgcttggacccagaaccttaaaaccaacccgggcaacatggtgagaacttgtctctannnnnnnnnnnnnnnnnnnnnnnnnnnnnnnnnnnnnnnnnnnnnnnnnnnnnnnnnnnnnnnnnnnnnnnnnnnnnnnnnnnnnnnnnnnnnnnnnnnnnnnnnnnnnnnnnnnnnnnnnnnnnnnnnnnnnnnnnnnnnnnnnnnnnnnnnnnnnnnnnnnnnnnnnnnnnnnnnnnnnnnnnnnnnnnnnnnnnnnnnnnnnnnnnnnnnnnnnnnnnnnnnnnnnnnnnnnnnnnnnnnnnnnnnnnnnnnnnnnnnnnnnnnnnnnnnnnnnnnnnnnnnnnnnnnnnnnnnnnnnnnnnnnnnnnnnnnnnnnnnnnnnnnnnnnnnnnnnnnnnnnnnnnnnnnnnnnnnnnnnnnnnnnntggtcgagtgagatcatctataaaaaaagtcagtataagggtgggcatggtggcacacacctgtaatcccagcacttgggcacttggggagacctgccaagtcaggaggattgatactttcccacagaggagagacccccccggccacaggctgagccctgtctcaataaaatctaaaaatttcccacatgtggtgggcgtggtggagtgccagctacttggcaggccaggcgggaggatgttttgagcccagcggcgagattgcactgagcggtaatcgtgccaatgcactctagcctgggtgagacagtgggaccctgtctccaaagaaaaggggatatcaagggaaaaaagggagagtggtgctgtttttggataggagactaaggagatatacagatcaaatgtactgcatgggttgggcacggtggctcacgcctgtaatttcagccctttgggaggctggggcaggaggatcacttgagcttgggaggtccaagctgcagttagctatgattgtaccactgcacaccagcctgggtgacagagtgagaccctgtctcaaaaacaaaacagaaaaacaaatgtactgcatgaatcccaattgtgtactggatcaaaaaatagttataaaatgcattgttgagacaggtggggaaatgtgagtagagtattgctaattttttttttttttttttttttttgagacagtctcactcttgtcgtccaggctggagtttagttagagtttctcttttattctttcaatttttctgtatgtttgaaaaaaatttgtaatacatttaaaaagtaccccaaaagcaaaactcattccaagtcttatgtactttaatgtcaactaatatttgctctttcccatccctagattcctttgtgctgcttgtctacattgtatgataaacatcacattaaatgcaatctctcccctcccaccccccccttttttttttgagataggatctcgcttgctgtgttgcccaggctgcagcgcagtggtgtgatcatggctcactgcagcctcaccctctgggctcaagtgatccctccccagagcctccgcttcccagtacccgggactataggcacgtgccaatacacccagctatttttttttcactctcgcccaggctggagtgcagtggcacgatctcatgtcactgcaacctccacctcccgggttcaagtgatcctcctgcctcagcctcctgagtagctgggactacaggcatgtgccatcgtgcccgggtaatttttgtatttttagtagagatggggtttcaccttgttggccaggctggtctggaactcttgacctcgtgatccgcccacctcagcctcccaaagtgctgggattgcaggtgtaagccaccatgcctggctatcgcccagctgtttttgtatttaattttagattcagggggtatatgtgcaggtttgagcatgatgctgaggttttggcttcttgcataagtactttattatattactatataatttttattcactaaatctactttatgaatcttttattaggaaacatactttttttgtgtacaatgtacaattgaatgtacagcattgctgattcgatatatcattattggtagatttgagaacaccaaaatacgtttaaacaaacaaactagcaaaaaaaaaccttttctgctggcttttcttttcttttttttttaagacaggttctcactctgttgcccaggctggtctcaaactctttggctcaagcgatccacctggctcaacctcccaaagtgctgggattacaggtgtaagccactgtgcccagacactttctctttttttcttaactccctctttttttcttaactccctctttggaactttttgctagcatttctctgtgtggatattccaccacatccccctgaagtatgagtcaagcagtggtgaatctttctgacacattgagaaagcaaatccagagaacacagagactaggaacaaaatgaggcaaacctgagaagaaagcttagggttccagctttgtttctattgttcacttccagaaactgccaattttgaaaaatcgtcctggtctcttgctgcaacttgattgtgtttttacttcatgtcctgtgcccttgttgctcagaatcccaagagagctgtttagaggctcagttacatgtttgctaagttttcgtcttctcctcccaagatgaatagtgttttgttttgaaatagcaggtgttttctgaatcccatgaagggccaaaagctaaaagtgctgatcctgactctgatttcgctgcgtaactcccaggggcatcctgctctgatgtcaggaagggagtcaggttaagaagaggttacctggaggttgaagagaaaatggacaaggtagaaagaccttgagcccctccctttgaatagttgcctgcttaaggacaatgctttaaaatttttgaatgtatgaataccttctaaagaaaaaacctatagacatcacattctccagtttaactttgtttattccattatatatgtttttggatagtcgagatcagttgattttttcctgatttttacacatggacataatcctcatccttgtcatttttattggctgaagagtagagtttgataggatctggctaagcaaatgacactttgttgattattaggtggcttccagattcttattatttaatgataggcttgtaaatgtttttgagtccatttattttgttttgcttttagatgaattcatctaccaaatcagaggcaatggaccatgctaccgctgttgttacatattaacagaatatgttccaaaaaaagattgaaccaatttacaatgtatatttcaactgtttcctcaagcctcagaacttttttttttcagtttagtggtttttgatagtttaataggcagtttaagggctcctttaaaggtcaacttgcttccctttaattgttgtatttttgaattgcatcaattcagtttaaactcatatttattgaatgcttactgaatgtaaatcactattctgggagctgcaggtaggtgactcaagatgagtaacattatctcagccttcaaggatcttaaaatctaatatgagagtgtagggggagattttaggagcacaagaaggaggaaacaatggctgcagagtaagaaaagtgccacagaaaagctacaaagcaagcactgttggagcttggcctgaggagggagtgtgcgcatccaggaggggagatgaagagagccttcatggaggagatgacagttgaactgggtcttgaaggatggctaggattccatgggaatgggggggcgtggcaggaagagagcacgggatgagcaacttcacacaagtgggaaagcctgggatgtgtagagaagccagcaagtagttgagtgtgacgggtgcgtcggttcgggtcgaaggaaatgaagctggagaggtaggctgaggtggttttgtggttccaggctgaacattttgaaaaatcacatgcaaatttttcttcctttctgatcattttaaagtatttctgagtagtttttatatgctttgtattttgaagttttataaatgatgtggttactacattgttccattgtgtgtaatgtattaagaaaaaatatttcatttttaaatattcaaaagcgtgttttttgactgggcattatgtatagcatacttttcattagcagtttaacatctgtcatctctccacaactagcaggaatatgtggcttcattttcttctaacctttttttcccccttttgtgattaactctttttcccatgtggaattaatatgcttggtatgaggtgtatgtctaagttaatttttctccacagtgaagtctagtatcttactggagtttactaaacatgatgcatttatccatctgttgtattttcaggtttaccttggtctttatgatatttttatctactaaaacttttaacccactcttacgtagttttgagagtcatatatattttttaatttggtggggttaaggaaaacttcagcaattttcgtggggtatctttccatttgttcatgtgttcctctttctcattttagggtattatagtttcttctcaataattctcttgcgtcctgagttaatatttcaaatacgtaacattttgatgctgttgttattgaatatttttaagtttgtattttccatctcgactatggtttgttttgtatgaactggttatatccagcagctttgttaaatccacttactctatctagtaacgttttttgattgaatatatatgcatttgtagatttactagtgtcatctgcaaaacaactttttcttttcaatgtgatagatattttatagctgtctcatcttgcgttgctctcagtagcagttcttgtgtctcagggaacactattaagtgtaacgaggtttctcaaggacctcctgggccagggacttttctgttctttccaaggagctgtgaaaaaaggaagcagctgcccagatttatagaagcagagcttattagggctggatgggacctaacaggttctctagacctgggccttcatttgagagatgaggaaaccagacctagagaggtgtgaatttgccagagttcacactgctgcagtggaaggaggtggttgagcttttactcttatttttttttatggtacatattacatacagtacatgttttcatttgggaaagttacttggtttgacagttttccaagtttacccaacattaaattttggtaactatgcaatatccttaaaaaaattattttcaagtaattatctgaagctctagaaaaggttacccctctatatcctcactctcctaggtggttgagggaaaagagaataaagaaaagttgtggggttggggctgggacagggaggaaagggtattttagtccttgatccttagtaggagggcctatttttaagcttcataatgtcagttttaaaagcagtggttttcaaaataaccgcagacgaaagtccccttgaaatggatgcctttctggaattgacctattttgagtttagctgttaccagaagggttcagaatctcgaatgctcttaaatgcatttacttttcagacaaagtggaaattgagtgcataatccacatgggttccagattcaggttaaatttagaaatttggggagttgtggagagaagacatgaaatgagtcaatcattgttgttttacaggtttgtctgaatccaggttaattatgtttccttctttattgaattataatttgtatatccaggttagttttacaaattagatcagaccctcagtccatttgagagtagactcagagtcagaattatttgccccctttgctgctttcataccaccctttagtaaacagtcctcaagaatgtccttatgtcggggagggcagacctcagaagttagcaagaattccaagctcactgtaaaccttttgtttaatggtttactcaaatccagatagaaattctaccaaaatgccagcctgtatttcagctcctctttcttggagtctttaggatggtgggaaaacaggcagaagtgagctgtttaacattccaataattattaataatagaaaatgtatcctgctaatcaggcactcatttgcatccactgataaaactaggtcattggagccaaggaaaggtaccgttcactaaaggaaagaccagtagatagtcaggcatggtggcgtgtgcctgtagtcccagccactcgggggctgaggcaggagaatcacttgaaccagggaggtggtggttgcagtgagcggagatcgcgccactgcactccagcctgggtaacagagtgagtgagactctgtctcagaaaaaaacaaaacaaaaaacagtggaatattgggctaagctcttaacacattatatttagagattgcaacacttcaatatttactggaatactccttctataaaacggtctcttttgccttgttttattttggtaactaagtgaatgctgggttagccataaaggtagcttgctgcatttctatttcttgtgttctaaatcactgaataatttttaaaaaaattagttctaaagcatttccaattaaaaaggaaggcttaacatttattaggggaagtcaaggggagaggtagtgaggaaagtaccagaaaccaccaacaggtgtttcggttacgttgaacaaagaatcagcttgatatgcaatccctgggaagagtttgtaaattcctgaaggagggtgagagctggaggggacacagtgagcggaaatggtgagcggaaatcagtggttcctgaggcacagaggacttggaggcttgccctcagctgaggacctcggaacaattcctgagcaagttgctttcttgatagacaaggatgcatctgtaggaccactgctgttaatctgtggggcaatgagaattgatcctactgcaagaaagagagtaggataagtcagaagacatggaacttgtatccctagaggacatcgcaactggaaaaatagctaccatttatgaaggcctacctggtctctttgcattcattatcttgaatttgcactaaaattctgcaagaaaggtcatagtagtctattttacaaataaggaaaattaagctcagggaagttatttcataaggttgcacaactagtaggtggtagagctaagtttagacccaggtctgtcctactctgataggcatgctttttccacacggccctctcaagactgtgtaaaatgccagagggctttctggagcttcacttcccaaaactgctaaatttaaattaattaaaattaaagttgaaaaatcagttcctaggttgcactgcccacatttcaagggctcagtggccatgtgtggctagtggctactatactggaccagcacggattagaatgctttcttcattgcagaaagttctattagtgctggtctagaggtcattcagttttgcccctttatttaattttttccccctttcattccacaaaggagaaaatgagggacaaagaaaggaagtaacgttcagcatcagacagctaattaatccagttttttggactggttgcctgttagattttcccatgccccacattcttcccttaaaaaaatgaacagaatggaaatgtgagaaatggagtgactctgctactctcccagctttgcctggcctttaaactagattctttctcccaaagaatcctgcattttaacaagttcaaagggcatgtccggattagtttccccaaaggaaatgaaatatatttgttggaaaggaattccattcttaatgtatgaaatagcacttggattccctctggttctttctctgacttcctaccaagcgctttgtaattgaacttgcagctgctaaccatttgtcttccaaaggacaccaacttcaaacagttcaaatgacagagggatgtatactttgaatgcaagcagctgcctgttatttgctattgattcaaatggcatttatgttagaggcaaatagatttagattatggccaaaattacaacaatagatttctaacttgtatgttaagagtaagatgtattaacagtcattgaactgatgtttagtgtttaactcatacataccaggcactgggttgcaagatgaactaaaaggacttttgctgaaatggaaaaaggtgtcgtattatggacaagttgaatgcattttaaattcctgtctgaattatattgctggtatttgccatccatgtaccttcctgttgagccttgaaattcagtaaaagcctcagtgtggatcatacttcatagctctgaagtaaagtgaggagtcatgtgcaaatgtccttttagtagatgctattaaaaggcatttaaattatacactccagtgtctaaatgacagtctgaagtgtatgtgtgtttggaggatgggcaagtgggagcaaaaggaggcattgtgctggggcgattgatatttttaggaagcctaaatgtaatgtttgatttcagtataactaacagactcatggtttagaaaagttgtctatcaaaaactgagaaattgaggttttggtttcttcttaaagaaatgttcaagtcatgtgcatgagtatgctcagagagattaaaaatggagagaaattggaatggtggcaaggtatccaggaaagtacctgtcttctctgagagtccaagggcaggagtagaaaggactttaaagatggtggcaacaggctgggtgtggtggctcacgcctgtaatcccagcactttgggaggctgaggcgggcggatcacctgagctccgcagtttgagaccagcctgaccaacatggagaaaccccatctctgctaaaaatacaaaaaattagccgggcgtggtggtgcatgcctgtaatcccagctacttgggaggctgaggcaggagaatcaattgcgccactgcagtccagcctgggcaacaagagtgaaactccatctcaaaacaaaacaaaacaaaaaaaagattgtggcaacagctggaaggggtccccaggagctctgacaccgggttttctaactgcccaacatcacggggttggggagcagaacatccagagggctccgtgtattgttttgtagtatagggtctaacttctagaaagttgggaataggcttctgagagttttggagtcaacaggcctgaatgcagaatgatcaaaagaagatggctattcctctcagagtggtgctggttttgggggccagcagtgcagtgaaaagcccaatttcccaatcctattttgaatatttctgccccgacaagcgtttcatttgactccagagactaaccactcttccagagggtctaaaagtcttcaggcttcagaatttttaggccatagtgctttggaataacagtcccttgtgtagaaaagtgtgagatctgagctttttttctggtcaacctgtgaagtcactgcatgaccaactctgtgcctcaggttttttctctgcaaagtgggagtgatggtaatggcttcctacctttcagggtttgtatatgagctgcacatagtttcatgggttactactcagcatgctttcaagcaagtagagattacattttattgttgaaaggaatcttggatgtgttctgttgtaatcttaccttgaatccagggctacaaagaagggttaaggctagatatggctcatgcctgtatttccagctacttagaaggctgaggtgggaggattacttgagcccagaaggttgaggctgcagcgagctgtggtagtgtcactacaccccagcctggccaacagagcaagactttgtctgttaaaaacaaaacaaaagaaaagaaaaaccaaagaaaggttaagagaagttggctatgtcacacagtatgttctatttggaattttgtgacttttgagtaacataacctaaagaccgtgtggcacagtggaaaggctttgtagccagcagactttgagtttgaattctgaccctgccttactatgtctgtggtcttgtgcaagtgcttttacatccttgcgtctgttcccacatctgtaaaatgggcataacaacatttatccaacagaaaggattcatagacactctgtgtgtaaactgctttttgtgattaacaagactaatgataacagccaagattagatccccagtgcaggttgccttactttctatcaggtgagaaggagagaaaattcttagttcccaaagaacttccagtgacggggctcttcagctgctctttatctaacagacttagaatagagacaacaccgggcatacttgcaattttttaggatgtgcaggaagcaaaagaattattttcagtgaaacaggagtctgcaaaaggtgccttaggaaacaactgccacacagtacatcccaatatagactcctcccagcttctctagggcagccatctgcctgacaggccccacccagataagcccagctttcttctcccaagagtttaaggaagatttcctgatgtatgtgtgcgtgtgtgtgggggtggtatggggttgtgttgggggggtcaagaggggtgttaatttgggatgagtagtcactggcttttggtggcataactggaaggtaacactccctgtggctgaatcctgatccctgtggggatcagcgcatggttcatccagacatcttcctcagtgggtcctggcctctgctcatactatgtcttctaccggggattcccttctccacctccaatatacgtatgttgaaatcttcatcttacgtcaaagctcaacttggaggtcatgtcttatgtaaatccatcacagacctctcctccaccccatccgggcagcggtcatctgctccaccctccggagcactctgtacatattccatcacacttcagttacttatgtaattgtctagtcagcagaagatactcctctccaaagggcaaggctttgctaacccctgtgaagcctggctttgagtttatgaggggtgattcttttcagtttataatttcttggctcaggagggtcacagtgttggtggcaaccgtagcatctgtcctgggaggctctgtatgctcttcattgttcatacatccatttatttcttcactcagccacatgaggcatgtgggatgtatgttatctctgcttgatacatgaggaaactgattctggttaaaggacttgtgcctgccatacaggcagctaagagtgcctatagtcctttgtattgccttttcagccaacagtcccatcccagcccaaaggaagaaacatttggggagcatatactggtgaggacatcttccctgttctgtggcattctcttagccttatgcctggcacagaggaaggctctgggaatgtttgggccggatggatctgggagcctcttttgcatgccaagctgcatacttatccctagcaaatgctggtctccttgatggatatgtgacatgggtggctgaatttacatggcacctggtggcttctcacactcctccgccacgcctctggggactaggataggacagatggccacagacaggattctcagctctgcaaatcacatttgggaaaaagttaagtttgtgcaataacacaattttggtaacatggtttcatgctgctggtaaattctataacactctctggataaatcacactgcagcagaactcacttgggaacagagtttaatttcactgtaggtggctgtgattcccacccaccagtcttcccacccccgctaatatatctaggctgataaggtgaatgctgtgctaagcaggctatttctgggcccaggatagaattacattatggtttttaaaaaatttttttctgtatatttttctattcacagaccctttgaaagaagaattacattatgttaatcatccatttccccatcagcacctttaattccttctccccagagtataaccacttgtccttaaaatgacagaggtggaaaagatcttgatagttcagcctcctgtatgtatatatgaagaggttgaggcccagagagactgggcagcctactcagttgtcagatggctggtgaagacctgcatccggatccgttgacttctctcctgtgcagggcccttgttttttgccctgccctactgcttaaccttgtcttctgtcttacaactaggggagagtctatggcatgttcagtttgaaatgaataaaagtgaatacttgttcattgttaaaggaccccaacacagaactaatttcctgttaacccttacattttctcttgacatatctttggtgaggaccattaaaggcttgacacatttctgtacagtgacatgcagtcctaggggttaactctgtgtgggtttgagcgataggatttaacttttaggaaaaaggggaaaaaagagagaaggttgataagtgtatttggagagagagaaaaaatagttaatttttctcttaacagttaatctgaaatgataacacagttgtgccttttggctctaaaatcactatatttttgatatataatccaaaggcaggtatctagactgctgaaggcttattaaaatgtaacaataggtccaagtctagaacttgaaaaaacttctcatttgtcaaagaagttccagtattctacattctcttgctaatgaatttggggagccttggaagctcagcaactgggatgccatcgacaggtttgcggtcctctctagtctggggtaggtcttaaggggaaacttttgggagggacacacatacagtccagtgaaactgtacatgaactactcaggagacagatcacttggcagggatgtggcaatctttgtacatatttgttctgctttactagctacattgtaagcttctgcagatgaagagttcagccttgatgtcccatctcccgcccaggcctgccatgtattagttgatcagtaaaagtggaatgaatgaaagccagtgttagtttacagagcttctgtgggacagaagctttgttcagttgagtttccatcaatatcaaatgcaatgttatgtgcgttgagtttcttgataactgttcttgaggtttctttttttttgttcctttttgactgattaagcaaggctggactggttggagaccccagatgggaccaagaaatgcgactcctgcctggattgttgtaggtagagtgcttaatatggggcctggcatgaaggaagttgggagtattatctggtcaactggagtttagttattaggttgtaaatgactatggtaagtacagatgtcatgaatatactagggtctcagggtctgaaagagttaaagctcctctcagaatagcccaggcagttcccaggaagtagcttcttaggcaggatgtggcaaaccagtgggtaaatgagagcccttctcctttggaagaaaaggaagtaggtggggagaagtgaagaggaagagcttggtagacaaatctttttatctgcttcttttttaagtgccagacagaccctgcagatttttgatccaaagtgaccaaagtcctaagaatgccaataatactggttttgctattgtcttttccctgcagctaataactactcaagtttaagatccactagagtgttgtttcaatagattttgttttctaattttgatcattggtgtattcttcagtgcgctttcaaggttcacagtgaatgtggtgtcatccaaaatcacattcttttctaaccaaggataagtcagaagaaaagatatatatatatatatatattagaaaagtgtctctttaatgtgtttacctatttatccattttaaaacacattcccacccattctctgtccaggtgctcataacagtcccttgtgatacaggacaagagtgtgcttccatttaaggcaggagagagatcttgcccatggttagatgaccagttaccagcagagttaatagagggctccagaccctctgacttcaagttcagggttgtttccacaattttggttctttttgttaagaatatagtttatacgttggagacaaattattgatggaggctgcaattttgcaaataaaaataaccctcaaaaatccagtaatgtatatgtgaaatgaaataggtgaactgaatttggtgagctttagtgtcgctgtaaaagcaactatcctttgtaaacttattgcatagctaataatgtaaatcagtgttgtgtttaggaatcagctccaggactatggtttgatatgtggaaacacctctgcgtttgctgtgggctggtagacagaatgggctggacttggctgtactgtgaaaggcttctttgagctggttctttgaccaggtaatgaaaacgttaagcatctaaaaacgaagtctttaggaggcttccaaggatctggaaagctgaactcagcaatttttagacttcagttttctggacaggacagctcttctagtcaaggaagccagtatctcctgcatttgtgtagctcttgactccatttctttgaaggtttcaaatgataatttttacacttacccagataatctaccctgcctgagcacataattggtaatttggcccaaaaactgcatacttagattgcatcctggtcacactgatatcttacatgcattttagatatttaaatattaaaacaaatattcttatggcaatttttgtttgttttgagatggggtcttgccgtattgcccaggctggagggcagtggctattcacaggtgcagtcgtagtgcactgcagcctgaaactcctggcttcaagccatccttacatctcagcctcctgagtagctgggactacaggtgcatgccactgtgcctggcccttgtggaaattttatttatttatttattttattattttattattattattattttttgacagagtctctctctgtcgccctggctggagtacagtggcgtgatctcggctcactgcaacctccacctcccaggttcaagcaattctcgtgcctcagcctctaaagtagctgggactacaggtgctcgccaccacgcccagctaatttttgtatttttagtagagacagggtttcaccatgttggccaggctggcctcgaactcctgacctcaggtgatccacctgcctcggcctcccaaagtgctgggattacaggcatgagccaccatgctcggccccttgtgtcaatttttagaagctaggttgtcaggctgctctttgctgaaccctaaatatcctgaagccttctgggctggtgtctaggaccatcttgatcctaagggaataagcttgactcttctcttcttggtgcttcagcactgcattttcctcagtgggattggaacaaacattaaagcaaaacaaaaagttgtaaatgagacttagggcaactaacctgctctagccagaatgaaaaatttgttgatgtttaaagttctctgacctccctgtgtctacctgttcataatactaaaacaaattatgaacttaagtaataagaaaaaagattatggcagatttcacacagctaaaataattacaagaattcagcaaccacaaaaatatttctcactgcaaattctcatccatttctgtattgtaggcattttttttttcttttggttttagtgtttattgtatacctcacactgggttagactcaagtttgggggatacttccagcttaattgagggtatgagcatgtaattgcaaggcattgtgacacatgctctaactctggtgtgtgatacagcacaggctatgggaactcaaagggtgagtgactaatgctgtcttgaggagtgaaggactgtatccccaaagcagagatctgggactgtcttggggtttttgggtcttctgttttgttcttatttttttcttcttctttttttttttttttttttcctgtaaccttatttatggtgaagggactttttttttttttttaattgtttacacttgcccttttgatatcctctgcattcgtggctcttatcatcatcttagacttgtgaacctgcctcaggtctctgttaggagtttctggcctatctggtcagccacatactgagtagctccacacgtagagcctgcaggttatctccaactcaccttttccaaaaaatagatttataatcctcttgtcgcctgtgatgacctctcatgctaactacccagagtcaggcagacctcataggttaaacgcacagtcctctgtaagactgcccttcataagactgttacaatctaaggggtttcctgaccacacacacttctgttgaactagctacaaattggggttttcactatcctctcaggttccatagtttgctagagcaattcacagaactcaggaatgcactgtacttctgattacaattttattatagcaaaaagggtacaaatcaggagcagccaaaagaagaggcatatagggtaaggcctgggagggtcccagatgtaaagcttctggtgtcttcacctcttggaatcagggcacagtcactctcctagtacattgaggtgtaacaatatgcacagagtattattaaccagggaagctcccctgagcttcagtgtccagagtttttactggggccccattacataggcatgattgattgaatcattggccatgtgattgaactcaatctctagcccttttactcactgcaggttaggctgtgttacatggctcagagccccaaccttgtaatcacatgattggtctttctggtatggccagcccccatcctgtgtcttttttttttttttttcttccccagtcatcttttatttggaggttaattcccattaggatatgaaaggattcagcgacgatcgagattgtgttccttatggaggggctcgggccaagaaggtcatggcggggagtgcagagcatgccctcttcttcagtggtacttgcatagccacttgtgcttgagctccttgtaggaaaggcagtagctgaagagcacgtagcctgccagcaccatggtaacccctgagatgctccccttcttcatgttgatgcactgcttgtagtaccagtaataacctcttcaaaatgctccggcagtgccactattgctgaagtcctgcatcaagctccagcttggcagctcccctagtttgacctccagaagtttcttgttcttcactggtatgactgatgccatcttggagtcctggtgtccactgtccctgtgtcatctttttaagcaaactgtgggcccacattgaatcaccttattggcgtaaactatcagggcccactgtgaataacaaagacactcctattacttgagaaattccaaagatttagaggttacctccagaaaccagggacaaaggccagccttttattcttttattctataataaagaataaaaactctttattatacaacatcctcctaacccccaaagctgtctagtcctcatctttgtgatgtggtaagtcagatccccctggatgcccagccagaaacctggcatcaccctcaactcctccctccctccccccatatccagatcatcgcccagtcttgccaactctgccttcagtttctgtcccagctctttattgcctggctactgtggtgttcaaactctcatcttgtcttgttttccttgttgccttcaagctgactttcctggcttggctctcccatttctaagttgccagactcttggttccaaaatataaaactgatcttgtcactttctttagaatttgctgttgcagaacaatgtgtgtattataattccattttcgttaaacaaaacatactatatatattcactggaaatgtatttcaaagaaatctagaagtgtatatattctacagtgttaacagtagttatctgagggaaggtggaacatagagttttactttagactatacatttctagactagttggattttttcatactgagcacacattagtttttttaggcctggtaatattacagaagtcaaattacagaagtcaccctagctccccactcgccttctaaacctaattctttagcatggtgtgctgtgcccttcatggtctagctcagtttacctgcagccccatctcatcactcacctggatgcatccactctcaggatattctcaggattaaacttggggattacgttttctgaccttcactttccctcccttatcttagatggaattagggagtttttctgtatgttcccatagctccccatgcctaccttgcttttagcattttgacctaccctaccctgtaggttgttgttatacttgttgtatagttgttgctgtacttcttagtatcctttcctatgtttgccttacattgtgatacacacccccccacaatcccccccaaacacacacacccacccacacacccacctttcagactgccttgtgaggacagggatcttgttgtcttcatagcctagcctctagtatacatagtgcttgtcatggagtagacgcttcatagtaaatctgcattgtattttcacagctgtaggcataaatggatgtaacccagagattcactcaagttacctatcccgtgcccttttctagattggagcactccccgaggtttagattctcatcgtcagttctgctgtgggactcacatttcccttcctatgttttttctctttttgctctgttcttgaactagcttggaatttggctccttttccttggtttccactaaacaacagtgagaacaaagtatacacaaagctatttgtgtgcacagcagattggacttggaaggtctggggtggggagggtatattatattacagcaatacaggtaacttaaaatctaatggtgttaggtgtctttggtcttaaatgacctttgctaccctgccatggtacctcctttccttctgctcttgctgctcttaacgagtccccaaacaagcttttctcattttattttgcaacgtaattcagctctccagctgcacctctacatgctgttcagggctgcttctgcccaccccaaggctgaggagcagtcccttctaaactatgggcaagctttctggttctctagtaggaccagatcccactgtgaacaggtattgttagcccaaagacttatttccccaccccacatcttttttcagaagacagaagcaagcactatcagttttggttttaattaagtttctttctgtgatattacttcttctaggtaggttttgactttactagaccgattgctgttaatttgatggtctaactagtagttttctacccctagtttaacatgttgaatgttgaccaggtgcagtgtctcacgcctgtaatccccgcagtttgggaggcttaggtgggtggatcacctgagccctagaagtttgagaccaatctgggcaacatggtgaaactctgtctctacagaaaattacaaaaattagccaggcatggaggcacgtgcctgtagtccagttacttgagaaactgaggtgggagggaggatcgcctgagcccaggagattgaggctgcagtgagccatggttgcaccactacaccccagtctgtgcaacaaaatgagaccctgtctcaaaaaaacaaaaaaccaatgcttaagtgagcacctgtattgacttccagtcctgatcctgaaatcaggattccctgaaggttgttggaaagtgatctgggggtagggttttttcccagaggtgatgcgtgctcagggatgagatttgctgaccctcctgtgtgtatttgggcagggagaagggtccagctgtagcaaacagctgttcttgtatataagggggaagcaagtctggagaattgacagtttctcctgtggactagaattggagacatattttgagtgctgtgtttcatctgactgtatcttcctgcccttgggtgtgcttctgggcactggctactgacctttttgccttggggactcgactgtacttatggttctgttaaagttggagggtgtccaggttcttggcatcttcaacagagaattggacaaaatgcacaaagcaaggaagggacgaagggatttattgaaaatgaaagtaccctccacaatgtgggagcggtcccaagcataggagctcaaaaggccccgttgcagagtttttgggaatttaaataccccctagaggattccatttgttattttgggtatgcgctatgtaaatggagaggttaaagtaaagttacaaagtcatttgcggcctatgacctatggagaggatatttcctgttatagctgaagagtgaattggccttatgttccctacctccagacccaattttcctgcctcagttctgagttatgaggtttaactgattgggtcacattggatcctgtaccttctccctcattgaagagcaaactgcattcctgattgatagaccagcacgggccattattatacagggattttctaaaaagctctttttctttttttaaatttatttaaactattttttcctcattatgactggaaggataaaagatatttttctatatcagcttctcaagaacagggaatgggtaatgtccagtacgtcatctttctaacgccatagccagcttgtcttttcagtaacagccagccccactgtttagtggtcaccaccagacccagggctccctttgtttttctgatgctgaccacatttttttttttttttttgagacggagtctcgctctgtcgcccaggctggagtgcagtggcgggatctcagctcactgcaagctccgcctcccgggttcgcgccattctcctgcctcagcctcccgagtagccgggactacaggcgcccgccaccacgcctggctaatttttttgtgtttttagtagagagagggtttcactgtgttaaccaggatggtctcgatctcctgaccttgtgatccgcccacctcagccactcaaagtgctgggattagaggtgtgagccactgtgcccggccttttttttttttttttttcctttttattttttttgagacagagtttcactttgttgcccnnnnnnnnnnnnnnnnnnnnnnnnnnnnnnnnnnnnnnnnnnnnnnnnnnnnnnnnnnnnnnnnnnnnnnnnnnnnnnnnnnnnnnnnnnnnnnnnnnnnnnnnnnnnnnnnnnnnnnnnnnnnnnnnnnnnnnnnnnnnnnnnnnnnnnnnnnnnnnnnnnnnnnnnnnnnnnnnnnnnnnnnnnnnnnnnnnnnnnnnnnnnnnnnnnnnnnnnnnnnnnnnnnnnnnnnnnnnnnnnnnnnnnnnnnnnnnnnnnnnnnnnnnnnnnnnnnnnnnnnnnnnnnnnnnnnnnnnnnnnnnnnnnnnnnnnnnnnnnnnnnnntttcccctctccctccaactccatcacctttccttttgtacttctacagaagcctgatcctttaaaaattatctggctgggcgcggtggctcacacctgtaattctagcactttgggaggccgaggcggatggatcatctgaggtcagggattcgagaccagcctggccaacatggcaaaaccccgtctctactaaaaatacaaaaattagtcgggcgtggtggtgcatgcctgtaatcccagctactggggaggctgaggaaggagaattgcttgaacctgggaggtggaggttgcagtgagctgagattgtgccactgcactccagcctgtgtgacgggagcgagactccatctcaaaaaaaaaaattttcatatgcggctaataagaaacacattttatatactggggcagaaggaaccataggctgtcacttgttttaagcaacaatatgacaccccctgtctgattcaggatgttattcaatatttgaggaaagtctttgtgagtgggtggtcctcatgactccagaggctcctctgtgtgtgtgtgtatgtgtgtgtttttcaacatgactgcagaaatatgttgtgggaaggtaattcatgtgatttcagaggactgtttgattctcagggggtgtttttgtttgtttgtttctttttaaaggataggaatatgtgattcttattctatctgggattctttttaatcaaacctgtttttatgacataaacaaaaaaatgtctgttggcttggaaactacctgatttacagtgaaattaaaaataaatgccttggccaggtgtggtggctcacacctgtagtcccagcactttgggaggtgaggtgggtggatcacctgaggtcaggagttcgagaccaccctggccaatatggtgaaatcctgtctctactaaaaatacaaaaattagctggtcatggtggtgggcacctgtagtcccagctactccggaggctgaggaatgagaatcacttgaacctgggaggcggaggttgtggtgagccgagatcacaccactgcacttcagcctgggtgacagagcaagactctgtcaaataaatgaatgaacgaatgaatgaatgaatgcctttcagccgtgcacagtggctcacacctgtaatcccagcactttgggaggccaaggtgggtggaccacttgagcccaggagtttgagaccagcctgggcaacatggcaaaacccagtctctacaaaaagtacaaaaattaaccaggcatggtggcccagctaccccaaacgctgaggtgggaggatcacctgagcctgggagatcaaggctgcaatgagctgtgactgcactgctgcactccagcctgggtgacagagtaacaccctgtctcaaaaataaaataaaataaatgtctttcaacctggggaagccgattgaaaaggtaaataaatttaccttatttatttttcaaaataaatttacctgtcctttcattttcttatttttttattttaagctttattcccctaatacttactcttggcatatatatatatatatatatatacacacacacacacacacacacacacatacatacatatatatacacacacatacatatatatacatacacatacatatatacatacatatatacacacacatacacacgcgcatacatacatacatatatacacgtgcatatatgtacttatataatttttatatgtacaattttatatatatgtacacacatacacatatatacacatacgcacacatatacacacacacacacacatatatatataaatttttttttctgaaacagggtctcactttatcacctagactggagtgcagtagtgtggtcttggctcactgcaaccttgacctcccgggttcaagcgatccttctgccttggccccccaagtagttgagactacaggtgcatgccactacacctggtgaatttttgtattttttgtagagatagggttttgccatgttgcccagggtggtcccaaactcctgagctcaagcgatccgctttggccttccaaagtgccaggattacaggtttgagccaccttgcctggcctggcttataatcttttttttttttccttaagtgctaactgcgagttaatggcttataatattcctaatcctaattctataccattgtcgctgggcgcagtggttcacgcctgtaatctcagcactttgggaggccgaggtgggcagatcacttgaggtcaggaattggggacgagcctagccaacatggtgaaaccctgtctctactaaaaaaatacaaaaattagcctggcatagtggggcctgtaatcccaggtacttgggaggctgaggtgggaggaacacttgaaccaggaggtggaggttgcagtgagctgagatcgtaccactgcacttcagcttgggtgacagagtgactccatctcaaaaaaaaaaaatgaacaaaaaacagcaacaaaccaattctataccattgttcacagattagcccctactagaatgccttctttctctcttttttttttttgctatctcattattttatatcattctagaccagtttgagcctcatatccccacaaaacttactctagcatatcctcaactacacagctgcctgtgttctaggccctttgtgagaattaggggaactgtggtacagtcattgccccagaatctcttttgaagttggtggtaaaaccataaaagcagtaaaggtaattaactacattgtgcattttccccagattatttattgcatgaacaacatgaaaacacggggattaaatcaccttctaccctgccacagcaactgatttcatttatctatgtttctttgcagtgcttgttcgtatacattcattttttcccccataggtaatacaatataattcatttgcacctgagagtgtttgattgtcaaaatttctgatacctataagtgtgtgtgactttggatgagtcacttctcctgagacccagtttctccgtctaaaccaggggtttagactacatgtcctgtaaggcaataatcatgaaaatatcttctgttgtggagtatttcacagttgcttgaacatttgtattgttattctttaccataactacatgggattgagtggaatatgatattccttttttacggattgggaaactgaaactgaggtagccaaagaaaacactcttaggtgaaaatgaattatattgtagtacctatgaggggaaaaaaatgaacgtatatgaacaagcactggaaggaaacatagataaatgactttaaggttgactttttatctctggtttttagcagtttgactatgatgtgtctaggtgtgggatttttctttttttaagtattgcttagggtgccctgtgttttttcaatctggatgtttgttgttttttgttaattttgggaaattcttggcctttatctcttcaagtatttcttctgtcctgttccctcttgttcttccaagaccccaactacatatatgttagacgattggatcttgtcctacaactcttggatgctctgttctgatttcttttattctttttttttgctttagtttggttaatttctttttttttgtttttttttttgtttttttgagacaagctggtcccaaagtctgggcctcaagtggtcaagctggtctcaaactctgggcctcaagtggtcctcctgccttggcctcccaaaatattggtattacaagcatgagccaccgtgcccagcctccatttaaaaatttctgttgacctatcttcagggtcactgattgttccctcagctccatgtaatcggctaatgagcctgttgacctctgatgccatgtttttaaaatttctagcattttaatttgattctatttttagttttcacctttgctgaaattcctcatttgttcatgcatgttgtcacctttaacatattaatcatagttattttaaggcctctgtctgatagttccaacatctgggtcgtctgagtctggttctgtttatagcttatctcttgataaggttgttcccccccatcccacctcccaccccttcttgatttttgtgtttttctttccttttttttttttttttttttttttttgaaacagagtctcactcttttcacccaggctagagtacagtggtgcaatcttggttcactgcaacctccctcccggtattaagcaattcttctgccttagcctcctgagtagctgggattacaggtgcctgccaccatgccaggctaatttttttttttttttttttttctttgagatggagtttcactcttgttgaccaggctggagtgcaatggcgcaatctcggctcaccgcaacctccgcctcccaggttcaagtgtttcttctgcctcagcctcccgagtagctgggattacaggcatgcaccaccacgcctggctaattttgtatttttagtagagatggggtttcaccatgttggtcaggctggtctcaaactcccaacctcaggtgatctgcccaccttgacctcccaaagtgctgggattacaggtgtgagccactgtgccccacccatgcctggctgattgttttatttttagcagagatggggtttcaccatgttagccaggctggtctggaactcctgacctcaggtgatccacctgccttggcctcccaaagtgctgagattatggatgtgagccaccgcacccagccatgtcttgtgcatttttttttttttgagatggagtttttcttttgttgcccaggctggagtgcagtggtactgtcttggctcactgcagcctctgcctcccaggttcaagtgactctcctgtctcagcctcctgagtagctgagattacaggcatatgccaccatgcccagctaatttttatattttcagtagaggtggggtttcgccatgttggccaggctgatgtcgaactcctgacctcaagtgatctgcctgcctcggcctctcaaagtgctgggattacaggcatgagccaccgtgtccagcccgtgtcttgtaatttttgattgaatgttggatattatgtggtagaacagagaattaggtaaattgtctttatcctcagaaatgggcatgcttttctgtcatgctgttagtttgtgttaggctgttagccagagttgagctgggtttgggctttctttttaatattaacttaaatgcatcacatgcttcaaatttctccagtaatgggtttttatcttgcacttagcggggagcctgagttgcatacgtttattttttttctcagtctttctactgcttcttcagctctgaactgtcccttaatcctttgccacaaagggactctttctctacactcttgcccctttcctaggggtaagctgcagttgctttttagtggttcttggcttgaagtagaggtagggaggttctcattgtcttgatccaatctcaatctttttttttttttttttttttttttgagatggaatttcgctcttgttgctgaggctggagtgcagtggtgcaatctcggctcactacaacctctgcctcctgggtttaagcgattctcccacctcagcctcccgagtagctgggattacaggatgtgccaccaagcccggctaattttgtatttttagtagagacagggtttctccatgttcgtcaggctgttctcaaactcccaagcttaggtgatctgcccacctcggcctcctaaagtgctgggattacaggcatgagccactgtgtccagcctcccgtctccatctttagcagaccctgtgagtatagaccttgggtttggggttttcccagcattctttcccttcctctctatggcagccagactttgccttgtatctgcggcaggtcttgggcaggagaaagttttgtatacctccttcagcagttagtagacttttgctttctgttggtgttgagcacagctttaggcttagattcttcatcaactaggagaagctgtgcttcaatacagttattcttttgcatagttcctaatgtgcttcactcaatttagcagaatttttttttttaacctcttccttgatgctagctgcttgtgcaaatcacatcttggccgcctactcttcttcacttgctgacagatgtgtaggtgagaaaagtctcatagtcattgttcctgaaagaagcttccagacccacttctagggccagtgacatatgcaggaaatcagctgcttctgggccaggacagagctggtcttttttttagtgggggatggcaggcggcggggcaggggacattcaaaatttattttccaacagacagatagcatcagcaggtacaactacaagggtatctacatagatcatacattcacaaggcattattagttcaacagtgagaaagccactcgtgggttttctgtagcaatatcccacttcacagtgtaaacaggtactattttgttcacttacaattctggaaggaaaggcacaccttgcaggggggaagaaaaggggaatcctaaagtaaggtgcaacaattaagagacaacactttggctaacaatcttggatccacatttcagtcagggccttccacatagaggggaaagacttttctctcagaagttagaatctttcttcctcctctcttgttaaaccgagagcagtgttttgtttgctcaatattacatgtacaaaaggagattagaaaaaaaatgcatcacaaaaccatcttgaacgttcagctcttcctgccaatacatcacaactcttaggttttagacggggcctgggaatgcttcagtgttttttctttttttttttttttaagtgaaagcaagtttattgcgaaagcaaagggatacaagaatggctgctccataggcagagagcagcccagtagtcttaaaataggaaaatagacactatggctacaaaaaataaaaaataaatgaggtagataaagctttcacacccaggacttgcctgttccaacttcatagccttcatgaaatattcatcaagaagacaaaaaaaaaacctttataattacttggcataagtcacaccaagaaaattcaacaaaaaaaattagcatgtatacctatgataggaaacacatccttccatgagtttcttctcaagaatgaaaacctagttcttcagtagagtaggcactggcaaactaagtcatctgagatttcctgctcaggtgccctcttcttctggggttcaggaagaggaaggcatctaagaagtgtgggaaaggacattggcactctcagggcagagctggtccttcacattgtggtgaaactactagaaagaagaaaaacatgcttgtggctactctgtgcctgtgaaataggtgtgaagcctttaggagtcagaagacctgggttcaactctaatagtcacttactccgtgaacttgtgcaagtcacttctctgtagtttttcttacagttaaaactttaaagttttgtccagtgctaaaattctctaatcctaacatatccttctgtagtgttacaaggatagaactctccaggtaaataccaaggctgtgcttttctgcaagcatagtggttagcttcccgtgttatatggtttgaagccctggttgttacttcttgcctgcatataaaccccattgacgatgatctcatcttgtttttcctttaagaataaattgattgttttgtcttcccaggtctttgagaatgcgtaagttccggcactagaaagtcctcagtaaagtaactaaaggagtatatacagctaagggcaatttaagtcaaaatgtgataataagtaaaaagtggttgtagaaattaaatgagagtgaaatatttttttaaaagttggaatcatctaaatgctaaatgcatatttaatattgttttgctattgtaatctaattagttaaaaagaataacatttgggctgggggtggtggctcatgcctgtaatcccagcactttaggaggccgaggcgggcagatcacaaggtcaggagatcgagaccatcctggccaacacagtgaaaccccgtctttactaaaaatacaaaaaattagccgggtgtggtggcgggcgcctgtagtcccagttgctcaggaggctgaggcaggagaattgcgtgaacccaggaggcggagcttgcagtgagccaagatgcaccactgcactccagcctgggtgacagagcaagactcccatctccaaaaaaaaataataataataataacatttgatagtatttattgaacacctactgtgagctagatgagtgtgggtgagctcctttagtctcctaacaaccccatgatgtgtttactactgttagccccattttactgatgaaaaacctgaagcttaaggcttttaagaaacctctctggccaggcatggtggctcacccctggaatcccagcactttgggatgctgagcctggcagatcccaaagtcaggagttagagaccagcctggccaacatggtgaaaccctgtctctactaaaaatacaaaaattagccgggcgtggtggcaggcacccataaacccagctacttggaaagctgaggcaggagaatcgtttgaacccgggaggtgaaggttgcagtaaaccgagattgcgccattgcattccagcctaggcgacagggcaagactctgtctccaaaaaaaagaaacctctccaacttgacgtggctgttcagtggccaaatagggcttcatacccagatagcctgactcccaggttcaggtcagggtacatttttatgtatcataaaagcatagttgatgaattctcagaaaccgaacacaccatataaccagccctcagatcgagaacagggcattactagcacccaggaattcccctccttccctatattagggttcaccagagaaacagaaccaacagcagttgtgcgtgtgtgtgtgtgtgtatgagagggttattgatgtttattttagggaattggctcatgtgattatggaggtctggtaagcctaaaatctgcagggataagccagcaagctgaagacccagggtagggttgcatgcggttcaagtccagaggcaggctaccagcagaattccttcttttgggcaggtcagtctttgttctcttaaggttttcaactgattggctgaggccaattcacattatggacagtaattcactttaatctaagtttaccaatttaaatgttaatctcatccaaaaaacccccacaaaaaccaaaaacattttcacagaaacaccatggcccagccaagttgacacgtaaaattaaccatcacacaccccctcttagttacttccccctgaagggtaatcactttcctaatttataattgcaaagattagtgttgcccttttttgaattttctttcctttttttttttttttttgagacagggtctcattgtcacccaggctagagtgcagtgacgcgatcttggcttactgcgacctccgcctcccaggctctggtaattctctcacctcggcctcctgagtagctgtgattacaagcacaagccaccacgcctggctaatttttctattttttgtagagatggggtttcactatgttggccaggctggtctcaaacaactgggcttaagtgatcctcccgcctcggcctcccagagtactaggattacaggtgtgagccagcatgcctggccttgaatttttgatagatggaatgacatagtgtattagtctgttttcacactggtttataaagaactgcccaagactgggtaatttataaagtaaagaggtttaattgaattacagttctttatggctggggaggcctcagtaaacatacactcacggcataaggcaaaggggaagcaaggaccttcttcacatggtggcaagagagagaagtgccagtaggggaaatgccagacacttataaaaccatcagctctcatgagaattcactcactgtcacaggaacaatgtggggaaaactgcccccatgactcaatcacctccctctctcaacacatggggattacaatttaagatgagatttgggtgagaacgcagagccaaaccatatcatatagtacatactcttttcgtgcctggcttctttcacagagcacatatacacattcctagaatttgatttcctataggtagttgaacagcctctcctagagtaacctgaaggattgaggtatgggaaggtatagaatgccttccccaagatgttgactggggctatcccttgccactgggtctgcactgccgctccctccccgccccccccaacacagatgggctagcctggggtggaatctggaagttggtaagctgtgcttttggcactctctgccttcctctttcaggtccattctcctttcctgtcttactactccttatacgcctaactctcaatcctcagccatccatgctttgactgttcagagacccatggtgccagttctttttgttctcatattgccccctgtccactgaagctcctcagcccctcaacttgaacacgcccccattcttattctgtacctcctcagattactgtcacattgacggacttgaacctcagagatagacaacttttcccttccctcctctcctccttcccatatacttttcttatggatatggaactgaggaccagaaaggaaggtaacttacccaagatctcatagatgggtaaataggggtagaaggtgtggatcaagggattgtatgcagcctttatctctaggtgctggtctctcttaccttgggtctgtctcttttgcctctcctttcctctttccctgctacttgacttgtttcctaccctagtagcattcctgcttgccagatgccacaggggaaggagaactttacaactccctgggctctatggtaagaacacccacctgcacggggacccttcctctccttcctacagtgattggttgtcatcctcttcccttcctgcagtgtaccttcctggcagaggcaaggctgccatcgaggctagagcaaggctcagattgggtggcatgcagttgtggcctatttctgtttggtgtgtggcagtttggagatcccatttctttatctggatatcacccccctacctcctcctgtcattccttaggccagcctctaaattcagtgaccatcagggttgaaaagggcagtgtggggccttgaaagaagctctctcctaggagttaggagacctgccagcagtgaactgtgtgaacttgtccctttggacctcagttttctcatctgtaaaatgaggattggataagttggtcttcaaggtccctccctgggatacattttatgctgctgcttggtttaaaccactgagccacaaatgaaaggttccagttgcgacagtgtaattaggcttagcagatgggtgagatgagaggaaggacatgttcttgcccataggattatcctttcccacccatttccttgcgccttactggtgttttcgaaaagcaaatgacaacccttgtttttctctgcattcccattcaaacctataatcttcttttatcttgatgaacttgtatttaccgttagacagccatgatgcagaattcacattacagtgtgtggttctaactctgccatggtgaatgtgatggaggttggagccgatcacagctggtccctggagagagggctgtgtgtgtcagatttattgtgctgcagctccagttttgttttggtttagtttttaaatccccagtgtcagttttgctgatttcagttaaaactaaagattgtgaagggagacagagacaggttcatgccctctgagttttagagattggtgatatagttgttgggtgagggccctctctcttatatcctttgcttaaaacatttcaccttggaaaggcagaaattagccttgttgaacttcaactccctctgcaagaggaagaaatactgaatactgtttcattattgatatctttttaatgagtactgaaagccactgcaggatctttgtttcaccttcagataaaatgtttcatctttcattctctgaaaaaaaaaaattgagtattttaagaataattaaaggaaaggcagtagtttctggatcctgctgttgctgccttggcctctcctcccttttctccacttccactcctctccctctatattagtgtagaaatgtgtcaaaaatttcttgcttcttccattagtttctattttgacccaccccagtgaatgaaataagcatagaattgttacttctattttacggaagagaaatccttatttttttgttgtttttatttttaagttcaggggcacatgtgcaggatgtgcagatttgttaacataggtagacctgtgccgtggtagttttctgcacagatcatcccatcacctaggttttaagcccagcatctattagctattcttcctgatgctctctctcctcccccactgacaggccccagtgtgtgttgttccctcccctgtgcccgtgtgttctcaccattcagttcccacttactagtgagaacatgcggtatttggttttgtatacctgcgttagtttgctgagaataatgacctccagctccacccatgttcccgcaaaggacatgatctcgttcctttttatgtctgcatagtattccatgatatatagaggagaaatctgaaatgtggcaaggttaagtgacttgtccatggtcacacagctggttgatgaacaatttgggataagaatccaggactcttgaatactagtgatttgtcaacacgattctatctccagtcctcatacatacacacctgccattaggaaaatctttgccaccccagcctatagtctttgtcatttctctcactggccaacttctgaaagtacaggtcagaagccagttcattagctgatagggtgggtggttaaatggcaaggcataggaggtagaggagggagaaaggtagcacaaagctcagacttagtttttcctccagaaggtgtaagaattacttatttcaaagagtcagaaaagtgaacagagtcagcattcccttttcctttgcaaattgattgaatttctatggcgagtattagctgcgaggcagtgttaatctgctccagcagatccgtcatcagattgatgtgccggggagacaggattgtctctggtgcaaaggcctctttgtgtagggcacaccatctttatgtatgattgaggcctggtgtgttaaatgcctcacactgggatcttgcccatgtttgtcagttgcctcccttgaaagtattgagctttttgaagataatatagcatcatggttaaggtaagacattcgttctctctgcctgaatttgaaacgtggctgtgccacttaacagctctttgacctttgacatcttagttcacctgtctgtgcttgagtttgctcatctgttctaattaggggttgtggattaaatgacttaataaatgtaaagcactgaggagagttacacagtgttgtgaggaaagcagtttttcttccatgcagccctccttccattcccccatcatgcacagtgtgtgtgtgtgtgtgtgtgtgtgtgtgttgacagcttttggaatctgcatttctagctggcctgctgagcctgtcaggcagctgtaacctcattcaggttttagctgtggggtccatctacatttgacatgtgtttctaaatgtggtcctcagtaagctcctttgtggggagaccttggagaaaggaaaccagagagtgtgcactgtgcacccccagccacacatgttctgggttcccacaccctagggactggggacactgcaagacatagccaaaccttggatgaaaatattgagtagctgtctcagtttgcttggactgctatgataacatatcatagactaagtagcttagacaacaatagtttattttcccactgttctggaggctgaaagtctaagagcagggtgccagcatggttgggttctggcaagagccctcttcctggcttgcagacagctgccttcctactgtgtgcttgcatggcctttctttgatgtgtgcagcaggtggggtgggggggaaatcagtgagaaaaatcagtaacctcggccttgcatcttctttggtcccatgcgtgatgttatttgtaaggcagtgtcagatctcctcatacatggagaggcattaagtcttcattttcctgtcttctagaggtttgggatagagggtgtgaaggaagagcagattatgcttactctatcttttaagctcagaactggggtgtgtgtgttggcaggaacaccaacatgatgatgtataacgaaggcctatcttgtcacctgtgtcactccagccacccccccacacaattgtcactgacatgcttcacctcccgggacttcaatttgaaacccaatgaaatccagtgaaacacagtggaaactctcttaccaccttcctgttaaccaactcacaggagtgatgaacacttttcagttccctggatgaaacactcttgagcaatgcccacagcatgctgaatgcactgcaggcaggctgctctctgccatacccactcgcttcagcacccactggctgaattatgtgcttaccaagagccagcttgttcccaaacccatttgttcagctttagctggtattgtagttaagtaatgtatttaggtatcggataaactgatgaaatgtaactgcaaatgaagtgattttttccccctatgaacactagttaaaagctgtggaaagactcataagtccaagtcactaaaacacattactgtcaaactagatgaacattaagattgggggaaatcataaaactctaaaattttatatgtgattactctgcaagtaatcacaatataactttaaccagctttaacaaatcagaataggaaattgtcgacaatgtattatgttctggtccatgtgggaaggatgatgtggacctcttaaccagtgggtcctctttggacccttattcaaagagtcttgccctatgttaaagaatgggcgaatgaatgcagatttatatacattatgtaaaaataagaattttagatatgtaattttaatgattttttgctgtgacttttttgattaacctggttcctggacctgattacattgaaaatgaggatttctactgttgtgattcagtttaaagttggtttgatttcattttagtgaatttagggaattttattttgcgtatggtaaaaacaataaaaccaacagtagtggggctttttaaactggggttttaaagcaaattaaggtggctcattctggattttagtaggttcttttgttcctctcattgacttgcagcatactgagtgagaaagacctaattttttcactttataaatgaggaaattgaagccctgagaggtaaagcatgttggtgatagtcatcccgggtggctggagtgaagcgggcagagccacagtgggagggggcctcctctctagcctcccactttgattctctgtctggccccagacctggagctttctttccatgataggagtacttctttgggttgacttctctggtgacagtattgacttgtgctccccactttggaacaggaccaacttggaggccttgcagaagaagctggaggagctagagcttgatgagcagcagcgaaagcgccttgaggcctttcttacccagaagcagaaggtgggagaactgaaggatgacgactttgagaagatcagtgagctgggggctggcaatggcggtgtggtgttcaaggtctcccacaagccttctggcctggtcatggccagaaaggtgagtttgccttgattaacaggtaattggattatttctcagggtacttagaagcctggggaccagggtagaaggaagagtgattttactcagtacctttttgtgctgtttgaattttttgtttgtttgttttttttaagacggagtttcattcttgttgcccaggctggtgtgcaacctccatctcctgggttcaaatgattctcctgcctcagcctcctgagtagctgggattacaggcatgcgccaccatgcatggctaatttttttgtatttttagtagagacagggtttctccatgttggtcaagctgatctcgaactcctgacctcaggtgatacgcccgcctcagccccacaaagtgctgggattacaggtgtgagccaccgtgcccagccgtgctgtttgaattttgaatgcttgttatctattagattatggataaacacactaatgactgtgttagtgtattaatccccatcccatctggaaaataataagtgactcttttttagccttctgtgtgctgtggaaggaatgccagggtacctgtttattacttatcaagtgctggagaagctgctttcattcacccagccccagcgatgcacaaaacaaggatttcaagttgtttcccacttgtgctccagccctgccagtgaatcccctttatcttcctgcattatagcatctgaactcctatcatagcatgtacttgtagagctggacttccctttcctatctacccttggtcctcttttggaatatagccccttgctccagagaggttgggctcttcaatgtttttttgcacgtggtgttcactcctgtgcccataatttttttgtgtgctgttccttctgtcttttcaaacagtgcccattttctaggtccacctcttgtctagcttttaccaggtgccccagcccacactggtaaccagtgcatccatgttctctgacactcgctgtctgtgggatttttttagaagttcaaccttactacgtaactatttaatgtgactgtcacttgtctccccagctggaacaagggaaaatgttagggtgacataaggtagcaccttagactttggcttagtctcaaccacatcaggctcctgagctcaaggaagaatcttctgggcagcctaggttagcatacctgagttcctcatacccttctactttcacaactcttgagtgtgaaccaagtcctcaaggttaatttctcttcatatctgagctccaaagcctctcttggagtaagccctcccttaactttgttcctgtctaggctcccaggagccaaggcacagctggaatagcctccagtgccaatgcctgccttagtacaatgacactcatttcttggttgagcagaaacttgtttgtaacaacttaacctgtttctcctccctctaccttaaagagcttaaacatttaacaagactacatctttcatcccttcctccctctttctttcataaaacctctctttcttccacctttctccagctaattcatctggagatcaaacccgcaatccggaaccagatcataagggagctgcaggttctgcatgagtgcaactctccgtacatcgtgggcttctatggtgcattctacagcgatggcgagatcagtatctgcatggagcacatggtatgtgacaccctctcagcctctggagcaatggccttaagagttaggtggctctggcctaatctttggtctgggaggtgaccagctacctccctgctgctcctgggctccacatcactatctagggcatctgggaagtctaactgtagagcttgggatattcacaagatggcaggcctcctttctaggtccttgcctctcttgaaggaagtgggcagtattcctggtgggtgtacctagagcacctctcatagtttttttgattctgattaccctaagatgtgatgtaagtaaaatctggtaaatacagtttaaatccatttcttgtgtacaatgctgtatgctaggtgcaaggctctggggttataaagatgacataatctactgtaagggcagcctgaagggtttctctgggtttctgtatgatgcacgttagtggaaggagagggcaatggagagagagggcattcatgggctaattaatcatatgcatgttaactgccagtcattttaccactatgttcttggagtccctccttttcttcagatataagtcttccaacacactgtgcaacttagggaattctgcaagtattagtctttgctttattctccctgggctgatggcttagagatgagggctgacgtgagtctgcacacttggtggctgttgtgctttcagtccagtattgtgtctctcagctcctaccccattttattcctgatacttgagacctgccctgacctctagaatagggatcctggtgcgcagccttaatgaactttagaagaaccctcctgggaggattctctacttgtgcctccattattttgaacctctcttcattgtaatgatcacgaagtgctgcatccactgttataggcatctgctgacatttgtgggtgccatatggaacctaaatcctaaaaacgtcttctgcacatctaaaggttagagaaagtgcttgttccttctttcctcaatgagagcagagcattctctgtgggaagcatatgaacatttctggcttggtcctagtgcttggcctggggtgccgattattttctgcttgggtcttggcttcccctcagggagctgtttcttatcccttgggtctcttgtgttcattttttttttttaattttatttatttttattttttagggtgatgaagggttttttcccctttctttttttttcttttctttttcttttctttttttttttttttagacagagtctcgccctgtcacccaggctggagtgcagtggtgcgatgttggctcactgcaacctccacctcccaggttcaagcgattcccctgcctcagcttccagagtagctgggattacaggtgcgcaccaccacgccccgctaatttttttctatcattagtagagatggggtttcaccgtgttggccaggctggtctcgaactcctgacctcatgatctgcccgcctcggcctcccaaagtgctgggattacaggcatgagccaccgtgcccaaccaatctttttatttttcttacgttgacctcttttgagatactaggaggcttcttcatttacattgaccttttttgagatgctaggtggcatccttattctggaattctttattcactttgaacttatagatgttgatcacatctcttgtgcccttgctatgtcctccccttccttcaaaccttcctcctccttcaggagaaaatgacactggaaatgactggagttggtttcccattctcttagcccatttccagtgactgcaggtcagtttttccccccatggatttggctctctggaaatagtgagatgttcctgcacaagtctctggagttatcgcggagagcatgagactgggaggggaaaatgtttcaagggccaagcacagtgtctggcacctgttaggtggtatgtgttgagtgactgaatgagagtggccaggatggggaagacctggtcaggcttgggactcaatgggggagggttaggccttggagcctgccataggaccttttggccctgggtgtacatagacccagagggcagctagaatagtcagtcagtggtagtgaagaggctcaggtgctgctggagcgtctagatgggaccatgtaggaagcagctgtggcttgaagaccaggcagccatgagagccagagtggctttctgcttcagctctgggcactctcagcccttccttgttcctgagcaggtcctgttgcaggaaaggccctgccctggcttcctctggatggaaaattctgactgtgggctgctgcttcccttggaccttctgctttgccttagcttcagtatttcaaaggtgttgtcaggtagagagacctctgttcgatagccacatcccagcttctgaaggtctttcgtcctctctctgtcacagtctttgcatgagttttgtgtcatcatgaatattattttcccaacactttattatgaaaattttcacaggctgggcatggtggcttaacgcctgtaattccagcactttgggaggctgaagtgaacaaatcacctgagttcaggagttcaagaccagcctggccaacatggtgaaaactcatctctattaaaaattacaaaaatggccagacacggtagctcacgcctgtgatcccagcactttgggaggctgaggcgggcagatgacctgaggtcaggagttcgagaccagcttgaccagcatggagaaacaccgtctctactaaaaatgcaaaattagccaggcgtggtggcacatgcctgtaatcccagctacttgggaggctgaggcaggagaatcacttcaacccggaaggtggaggttgtggtgagctgagattgtgtcattgcactccagcctggacaacaaaggcaaaactcagtctcaaaaaaaaacattacaaaaattagctggcgtggaggcaggtgcctataatcccagctactcaggaagctgaggcaggagaatcacttgaaaccaggaggcagaggttgcagtgagctgagaccaccccattgcactcctgcctgggtgacaagagcaaaactccatctcaaaaaaaaaaaaaaaaaaaaattcaagcatgcaggannnnnnnnnnnnnnnnnnnnnnnnnnnnnnnnnnnnnnnnnnnnnnnnnnnnnnnnnnnnnnnnnnnnnnnnnnnnnnnnnnnnnnnnnnnnnnnnnnnnnnnnnnnnnnnnnnnnnnnnnnnnnnnnnnnnnnnnnnnnnnnnnnnnnnnnnnnnnnnnnnnnnnnnnnnnnnnnnnnnnnnnnnnnnnnnnnnnnnnnnnnnnnnnnnnnnnnnnaaaaaaaaaaaattcaagcatgcaggaaaacctgaaggaagtgtacacgtacacccaccacctagattctacaacttatgttttgagatatttggtttaccacatgtccattgctccgatcaatttggggggcacgtggggtcgtttttgtttgtttgtttttgagacagggtcttccactgttgcccatgctggagtacagtggtgcaatctcagctcactgcaacctctgcctcctgggcccaagcgatcttcccacctcagcctcctgagtagctgggactacaggcacatgccactatgcctggctcatttttatatttttagaagaaatggggcttcactatgttgcctgtgctggtcttgaactcttgggctcaagcaatccgcctgtctcagcctctcaaagtgctgggattagaggtgtgagccaccacgcctggccctgggaatgtgttttaaagtaaatttgtgtcatcagcattggttgagccctatcttctaaagcactcagccaggggctgatctttcctagaaataagctctgtgtgcactgcccagtctgaattttgagacccaaggagggaaattaatgctctctgatcagaacaggaatgcttttgtctttggggaagtagattcctgctcaggtggtagctgagcaaccggagaactagggacccagagttaatggttcttgtgcaggaataaaagcttttgaactgttattttcataaagcatttgtctcttccatagaaaaccttcacaaaagcaccattgacttagttaataattggcttctaaaaataagcacaatttcagcagcttaaggcaaggacttggcaacagtgaattagaattagagagttgtatggttagttgcaggcaaccctggggaatcctgactggcgtatgccccttacactttgtaactccatcgttcacactatactctgcttgtagctctgtggaggttaaagggaagagagccaatgtttcctttttgttttaaaattaactgattaattttacagatacggtcttgctctgttgcccaggctggagtgtggtggcatgatcataggtcactataactttgagcttctgggctcaagcagtcctcccgccttagcctcccaagtagcaggaggacaacagatgtgcatcaccatgcccagctaatttttattttttgtagagatggagtctcactactctgtggcccaggctggtcttgaactcctggcctcaagcagtcctcctgccttggcctctcaaagatttgggattacaggcatgagccactgtacctggtttgttttttcctttttaatagagatatttctcttaccaacccccaggggaagtgtaaaccaagacagttatctgggctgccccctgtcctaggctgcatttagggtcagttgagaggtagtgctgtctgggcgcagtgactcacacttgtaatcccagcactttgggaggctgaggcaggagaattgcttgagcccatgagttcgagaccagcctgggcaacaaagtgagactccccatctactaaaaaaatcaaaaatagctgggtggggtggcacgtacctgtggtcccaactacacggaaggctgaggcaggaggatcacttcctcctctgagcatcagtagcattgtctgttctcttcattcaactgtttgttccctgccttgtttcagaggaggatttaaaatgccttacctcttatgaatatattctgtctccctaaggagagagtgtgttctatctttatcttacaggtttaaaaaaaagacaaaaaaaaaaaaaacaaaaacctagttcttacatatacagaggcatttgataaatgatagaagatgatgataactgctcaatatagacaggatactttagaaaatttgttttgagttttcaggaattaggtctacatctgagagtaattttaagttgcaagtggtcactggctacacctgaagccataggggaaattaacctatttctgccttgatacatcaggatccccttagcgaggcatttcttcaagatcgcaggttaaaatgtagaaccccttaatgggagcccctggtatgtgagccctgcagagcctggcttcacaccatacttgcatcctctcttgtgctctctttccactgcctctgtccggcaccccattcatgtcatctcatctccttaccagtctctctgcctccagagtcttggttgtctccctcagctgctgtgattctcatctttaaacactcaggttggattcttttacttctgactccataaagtcaagtcccggttccttggtggggttctggtcacagccggccatttctagcttgatctgtcactgcatctcttcatgcaccaacagtgaaatgaccacatcatcccaggagtactcagcaacgtgatgcatccctgctttgatcttattgcagtgctctgttcttctctcccttttctcctccccttttccaggtatagaaatcatgttcatcctttgagtaatattcagctcaaatgccatcttttaagtgaagtcagaattacttctcccttcttctgcatgtctgtatcactttcttaggcagttatggtttcattgtaatgttgggaaaaactcccagaccgtgtttttcctttactgtcacaccacagcaatcaacacagaggacttatgtgaccaaaagtgtggagggattttctctacactctaagcagtggacaccagctgggtgtcctcctgtttaattctgacactaccagatgatcatgtcagatcccgtgggttcagggctcagtccccaagactgcaccaccggttgccagtctgggcctccaaaacgtctgactgactggctttaagttgggactcccatgatcctatctttgagttcgattaatttgctggattggcacacagaactcagggaaacacttaattttactggtttattataaaggacattgcaaaggatacagatgaagagacacataggacaaggtatgggagtggggtacgaagcttccatgccttccctgggcgcaccaccctccaggaacctccatgtgttcagctgtcctgaagttctctgatcagacccagccttctggggtttttttgtgtgtgtattttttttttttttttttgagacagagtctcgctgtgtcgcccaagctgagtgcagtggtgcgatctcggctcactgcaagctctgcctcccaggttcatgccattctcctgcctcagcctcagccgaaagttatcacttgaaagaatagttagaacattgtcactaactggtctggtattctcgttcttaggatggaggttctctggatcaagtcctgaagaaagctggaagaattcctgaacaaattttaggaaaagttagcattgctgtgagtatgttatgaagtttttcttctaagttcctcattgataagttaatgagtcagtaagaaatggacaagaggaagatgggaagtcaatgaggggaaagtttataagaaaagtggtattttctcactagactcttccctgtctggagtctatatacactattctctctcgcattagaatgagaaaagtgactttctttatattaaaatctgtatgtcttgaaaaacaggggccaggcacagtggctcgcacctgtaatcccagcactttgcgaggccaaggcgggaggactgcttgagcccaggagttcagctccagcctaggcaacatgatgagaccttgcttctacaaaaaaataaaaataaatagctgggcgtggtggtgcacacgtgtagtcccagctacttgggaagctgaggtgggaagatcacttgagaggctgcagtaagccataatccatgattgtgccattgcactttagtctgggcgacagagtgagaccctgtctcaaaacaaaacaactctttataccatgtaaaaagatggttgcttgataaggcaggttaagaaaatgaaacaaaagagtaaaaaataaggggccgggcacggtggctcatgcttgtcatcccagcactttgggaggcggaggcgggcagatcacctgaggtcgggagttcgagaccagcctgacaaacatggagaaacccccatctctattaaaaatacaaaattaggcgggggtgttggtgcatgcctgtaatcccagctactcgggaggctgaggcaagagaatcgcttgaacccgggagggggtggttgtggtgagctgagatcacgccactgcactccagcctggacaacaagagcaaaactctgtctcaaaaaaaaaaaaaaaagcccaggcacggtggctcacacctgtaatcccagcactttgggaggccaaggcgggtggatcacctgaggttgggagttcgagactagcccgacaaacatggagaaaccccgtctctactaaaaatacaaaattagctgggggtggtagcgcatgcccgtaatcccagctactcagggggctgaggcaggagaatcacttgaactcgggaggtggaggttatggtgagccgagatcgcgccattgcattccagcctgggcaacaagagtgaaactccgtctcaaaggaggaaggcaaatttgtgatgatgataaatgaagtattttcctagagtattttaaaatagattgagtatttttctaatcaccagtattttctcttcttttacattccctttcctctaggtaataaaaggcctgacatatctgagggagaagcacaagatcatgcacagaggtaagaagttatttgctagttattttgctttgaattttagatataatccaaaggtggttgcttcctcttttttgtatgttttgttttcgtgtaaaagccttttaataacatgttaaatcttttattaaaagtctttgtttagtttggtggctgaggcagcaactcctaccctctttttggtcttgctacacttattgcctatagctgtgatggacaatagtcatagtcaccctggaagcccagctaagagcctcaaccagcacttagttacccagtctccagtgtcactattcactggaacagtgaacaatgcatatgtgtatgcctaaagccaggactggccagctgcatatgagttttactataaaagaaactgatttattgctgggtgcagtggctcatgcctgtaatcccagcactttgggaggccgatgggggtggatcatgaggtcaggagttcgaaaccagcctgacccaacatggtgaaacccccctctactaaaaatacaaaaattagccgccagccgtggtggtgagcacctgtaatcccagctacttgggaggctgaggcaggagaattgcttgaacctgggaggcggaggctgtggtgagccgagattgcactgttgcactccagcctgggcggcagagcgagacgcaatctcaaaacaacaccaagaagaagaacaaaacacattaaaaaaagaaagaaactgatttattttaataaaggtacacatacacttaaccatgtgaccataccatcttaggcatttgtccaagataaaatataacatgcatccacacaaatgtttaaagaagctgtatttcttgtagaaacaactgaaatgtccttcaacaggcaaagagagaaacaaattgtagtatatctatacaacagaatactcttcaacaataaaaatgaacagactactgataacacctaactttgaatttcaggaacatttatgctgagtgaaagaaggcagacacaaaacagcccaagctatttccatttatgtgaaattacagagagaataacaacaaatccatagtggcagaaagtagatcagtggttgccttgaggggtctagggagagattaaaggagcatgaaggaactttttggggtgacacaaatgttacatctttttttttttttaagagcacacatccacttctatttattgacttctcattagtttaaatccttgaagggggctgggcgtggtggctcatacctgtaatcccagcattttgggaggtcgaggcgggcagatcacctgaggtcaggagtttgagaccaccctggccaacatggcgaaacctcgtctctgctaaaagtacagaaaattagcctggcgtggtggcgggtgcttgtaatcccagctaatcaggaagctgagggagaagcttgaacctgggaggcagaggttgcagtgagccaagattgcgccactgtactccagcctgggtgacaagagcaagactccgtctcaaaacaaacgaacaaacaaaaaacattttggctaacacgatgaaaccctatttctactaaaaatataaaaaatagccgggcgtggtggtgagtgcctgtagtcccagctactcgggaggctgaggcaggagaatggtgtcaatccagaaggttggagcttgcagccagcagagactgcgcaccactgcactccagcctgagcgacagagcgagactccgtctcaaaaaaaaaaatccttgaggggtacagcatcacttggattctgtttccaatagccatagtaggaagagtgcttcagaatttggcacaaactatgcccctggttctgtgggcccgagttacctttctccagattactccggtgttgtttggtttgccaccaggagtcactgtgttgttctttgctttgtatacataagcacatctcttgcccaaatagaattctgtttcatctcgggcataaacactttcaattttaggaaggaactgcctgctcccattggttctggataccctgcttatagccagcaaaaatggccttgcaccacagccttccacatatttccttttagaagtcctgttcccagcaggcctccatggcatccaagatggcgggaagtgcaaatgttatatcttgacaatggtgatgtatacatggctatatacattcgttgaaagtcaactgtccgctaatgtgactgcattttatagtatgtaaattatacctcagtatagttcctttttaagaagatgaagccagaggacaggaaattggtaaacatagtgctgtcggccatgtcccttcagccacagcactgccaacactgactggtgttgagaggagagctgaagagatgagtggactagggtgggctgttggaactgactggatagcttacaagccccgtagattaggtgatacatcactggtgagcaagctgagcactgagtggagccacctttgacatggctgactcctggatgcatctttttttttttgacgtcccccttctctcccctagtgttccttttgttagtctaacttcttccagatactgatctttcaggtcttcagttagaggtcacttaattatgacagtgtttgcaagtgttggagggtggttctgattcagtaggtctggggtagggcacagggacctgaaaatttagaaataggcaattagctgggcgtagtggctcacgcatagtaatcccagcactttgggaggccgaggcgggcggatcacttgaggtcaggagtttgaaaccagactggccaacatggtgaaaccccgtctccactaaaaacacaaaaattagctgcgtgtggtggcgtgtgcctgtaatcctggctactcaggaggcttaggcaagagaattgtttgaacctggggggcggaggttgcagtaagctgagatcatgccattgcactctggcctgggcgacagagactctgtctcaaaaaaaaaaaaaaaaaagtttaattgtaaaaaatatatacataaaatttaccattttctcaagttttcagtgtatagttcagaggcattaagtacattcacattcttgtgcagccatcaccaccatccatctccagaacttttttcatcttacagacctcaagctgtgtccatgtaacaactctcactgggcgtggtggctcacacctataatcccagcactttgggaggatgaggtgggcagatcacctgaggtcaggagttcgagaccagactggccaacatggcgaaaccccccatctctactaaaaatacaaaaattagccgggtgtggtggcacacgcctgtaatcccaggtacttgggaggccgaggcatgagaatcacttgaacctgggagacagaggttgcagtgagctgagattgtgccactgcactccagcctgggcagcagagcaagactccatctcaaaaaaaaaaaaaaaaaaaaaccccactatttctccctttccccatccattggaaaccatcaatctaccttctgtctctatgagtttgactgctctaggtacctcatatgagtggaattatacagtatttgtcctttagggactggcttgttttagttagaataatgtcttcaaggttcatccatgttgtatgatgtgctagacactggttcttaagtaagtgctggttctaatgctgtggtccatagccgcattttgggaaacactgcattgggggtagagtgagtagctaggtgggctgtctagaaagaggagtaatggcagcttgtcctagtgggatttgtggggagaaaagaaatagaaaatgaagcacaaagaagaatgttgtgcaagtgttccctctcattccagggaaaatttctcaaaatattgaaagatttctgtccatggcagacttgtagttggaatttgcatgaccagcttatagcttgtacatatggttcagttttgtgcatctattaatttcaacctgggccaccaaactgcattgttaagaactagagactattggctgggcgcagtggctcacgcctgtaatcccaacacttggggaggccgaggtgggtgaatcacaaggtcaggagttcaagaccagcctggccaacatggtgaaacccccgtctctactaaaaatacaaaaaattagctgggcgtggtggcggatgcctataatcccagctactagggaggctgaggcaagagaattgcttgaacctgggaggcagaggttgcagtgagctgagattgcgtcactgcactccagcccaggcaacagtgcgagactctgtctcaaaacaaaacaaaacaaaacaaaacaaaacaaaaaaaaaaaacaaccaaaagcattcagagagaggacaaccattttggaaaacaggtattaaaatttcttgttaaattataccaccatgaactgcactccttggcatttacctaagataaatgaaaacatttgctcatgcaaggacttgctacacaaatattcatagcagctttatttataattgcccaaaattagaagcaacaaaaatattattatcagatgagtgggtacattttggtgtattcaaacagtggagtacaactcaggaataaaactattgatacatataacttcgatgaatctcaaaaacatgctaagtgcaagaagccctgtacaaaagagtacatactgtgagagcctgctaatacgaaattttagaacagacaatccacagtaacatatagcagatcagtggctgcctgagggtttagaggtagggatagtttaacatcaaagtgcataagggaacttttttggagtaatagaaacactaaatcttgtttgtggtaataggttcacaggtgtgaacatttttgaaaatgcatgaaagtatacacttaaaatgctaactgtaggctgggtgcggtggctcacgcctgtaatcccagcactttaggaggccgaggtgggtggatcacctgaggtcctgagtttgagaccagcttggccaacgtggtgaaacccttgtctactaaaaatacaaaaattaagccgggcgtggtggtgggcgcctataatcccagctacttgggaggctgaggcaggagaatggcttgaacctgggaggcagaggttgcagtgagccaagatcgtgccattgcactccagcctggacaacaagagcaaaactctgtcttcaaaaaaaaaaaaaaaaaaatatgttaaatatagaaagccacctgctttctaattgtactggctgccatcttgtcttctttctactgacaagaaagtatcaataagaggtagtgattggtttgagggggaaacagtttttctagcagtttagtccttaatctgtggcttcttaagacctctgagttccatgttagaatattttaatgtattagtttctaggaaataggagtagctgaaaggagaggaggagtgaacattcttaagcatggagttatgttctaggctgcgattgacatatgcagtctaccactatgcaaggacgagtgaggtcagtgttgtaggaacatctggtggattaaaggcatcccatcatctgtgaagtggagtccgcctgcctactcagaggttgctgtgaggattaagaaattacatatggaaagcaactggcaaagtgttttgcgtatagaaagctctaacatgctaattgccttccccgtttctttatataatttataaggaaactaaaaaccagagattaaaacctgagctttggtttctatatgtgtaaaatatagttcttatgtttgtctctcattaacctgtaagtttcttcaaatctgggaacatgtctaattgctgtgtatatatcttcagtcctgaagatgatagtagaaaacagttcttctttgaaggtttgttacatggatggatgtatgattaacttgtgccagaacacacaggagtcaacagtgaaactgggccaaggacccatgtctcttactcttaacacagtgtttctttctagtcctgtgtttttctgtactatgtacctactatggatcatgccctgtgtttttcaatgaagacctctaactttatttccattccaaggagagggaggtttcagcacactcctggaacaaccagctttcttttcccttccgcctagtgctgcccccacctgcttagggctttcttttttggcttcaccaattgttgctctttggcatgaagagctgctttgtgagccagatgggtctctgaacagatgtctttgatggagagtttaccacttgcacagcgaagaaagggaagtcactagaaggacttctgtgtgggctggcctggctgctcagcatttcagactcctgttgtttacaagtcttctccagaaaccctggaagaattaactgtaaggcctggactatggaatggtacctgtgcaccagcaattcctgagcaagcagcacagtgagtagatgattcctggaaacctgagttcaggtgaaaaagagagagagcagtctccttgtccctgcctgtgggcttccttatggccagttctacctctgttctaaatatattcttcactgatgaaatttcaacttcatttattcttctgtccttgaggaaaaatggggaagagtaaagaggtcttttctctgcctcaaatttttatttgttcttatttgtttatacttatttgctggagatagcttagtggtttttttctttttctttttgagacagggtcttgctctggtgcccaggcttggagtacagtggtgcagtcatggctcactatagccttggcctcctaggctaaagcgattctcctgcctcagcctcctgaagtgctgagactacgggcatgagctgctaggcttgggttgattatttcaattaccatttgctatgtaacgaggctccaaaacgtagtagtttaaaataataatttattaccttacacagtttattactttttctgtgggttggcaggtcctctttccccatcctctgtgaggctaaagccctggtttcttccagtagcaagagggggtaaaccctactactcaagtaccctttaagcctctgcttatgtcaagtttgttcatgtcctgttggctaaagcagatcatgtgtttcaagccaagatttaaaaagtagagtgaagtctccatctcttgttgggaggagctatgaaatatggtggcccgtttttttccactgtatcacagtgataaagttgaaggttcaaatcgtgactgtgctacttgttgtgtaaccttggatgagtcgtttaacttctccaaacctcaggaaaatggagaaaacagaacctacctaaagggttgtatgcagattaattaatacatacaaagcacttagaatagtacttgacacgtagtaggcacttaatacattttacctgttgcttagataaattggtagaggtttttatgattaccagcaacagaaaccagcctgacttggtttaagcttctaaaaatttattcattagaaggatctggctgggagcggtgactcatacctgtaatcccagcactttgggaggctgaggtgggcagatcacaaggtcagcagttttgagaccaggctggccaacatggtgaaaccccatctctactaaaaatacaaaattagctcggcgtggtgccgtgcgcttgtaatcccagctgctcgggaggctgaggtgaaagaatcgcttgaacccaggaggcagaggttgcaatgagctgagatcgtgccactgcactccagcctaggtgacagagtgagactctgtctcgaaaaaaaaaaaaaacagaaaaaaagaaggatccaagggaagttcagagagtcctttgacaagctgatcctacaaaccacggtagggtaggaacccgggctactctggttgggaggttggctcagtcaggcagaaaaatagctccctggcgcacaactctaacagtgctattgctgctggaccaactgtcctctcctagccttatttagggggtaggcatgggctcagtgatctcccagaggggtccagagtcagtgcctctgaagaatccactctcaccacagtcatgcagatatcaaggggacagcatcctctcctgctcagtgatgggggctagttggtagtccattgcctagtccaggttgaaagtgatttctgagtgtgccctgctctaataaaaagtaacgtacaaaaatagtttataacacaaggtgctctgggggcaatgttttgctctttcaaagcattcactctaggtaggattcttcaaatataagttttcatagaatcttgaaaaaggcaagcaaattacatcaatttgattcatacatttcttcttaggaatatgtcagtgatttaaaggtaggtattcctgcacttacgaatttttaaatgagaagaagtgcctcgtggtattttgaggaagattagctgttttcaggtaccatttagttactgtttttccacctaggtggtagcctcttgaacatttttcggttatctttcttcaactgggtgagtatgtcctggtcctagtttggtacattgccttggttgtacacatggtagctttcctacatttctaatgtgtctgcaccaggtgggaacccaaaggcaagcatgttctcaccctcattcctgaagtgatttgtctctgccataatggagcaggacttcttgggcagaataagttcaactgacattcccagtgccgaagctctggctagctcaactggtccactgtgatttgttctgttattatacagaacattgtattctatttcccctgggtgttcaaagggagaaacaatctgtgtggtttagcctgatgtatgtgatttgtgagctgttgatcagggggtgggtatagagctgtcacccctttggggagtgttaagtttctccaaaatctctgggtgacattctgacagtcatgggtggtacaggtatatgctcctccgtgtctattcgcctacctcctcagtcttttcccccatcaaagagaagtaattcattttgtaaaatatttatagaatacctgccaagtacaaggtattaggtgaattactcgttaggcataaaattggctcataaatgaattgtgtcctccaggagcttagagtctaacgggaaagggacatatctgtaaatgactcttgtatattgtggaacatagccaatatcattgtttagtgcgtgaatcactaccctgccaactttcagatagaatccgatgtgacatagtgacatagattattagtcagaattctttggtgtggcagaaacccaactcaagattacttaatcagaaaagagaatgtatggtttgggtcaccaggaggtcggaaggcagggatgaatatgaggttgaaacgatggcctcaggtcacctctcagctttgctcattcttgtgtgggcttccttatcagtcagattctcttcactggaggcaggatggacctcactagccccagacacatctagtccttactgctccctatcccagagaaagtactccacccactctccccagcatccagatcagtgtttgaaccactgattggcaaattgcctctgcttggagtgcttgcccatggctggaccattcactgtgtccaggggactagtgttgcctggtgggccaccctgggttatacactcacccctgtggtacaacagatggcgcctcttgatgaacaccctagcagaaacacttgatgctggggaggagtgtatcccaaatgaaaaggaggggctttgttaccaggagatggggagaacgaatgggtgctgaaagcaagcaaatttttaaaaagttttccgcttacaaattctgttaagcattgggtcagaaagacaaaacactaacataggatgaaaacaacaagcagttaacacaggtgtgagcaaactggtccatgggctaaatttggcctgctgcctgtttttgtatggcctgcaagctaagaatagttttcaaaattttgtgacatgtaacaattatacaaaattcaatttattattatttttattttttgagaccgagtctcgctctgtcacccaggctggagtgcagtggcgtaatctcggctcactgcaacctctgcctctcaggttcaagagattctcgtgcctcagcctcacaagtagcggggatcacaggcatgtgccaccacgcctgctaatttttttgtatttctnnnnnnnnnnnnnnnnnnnnnnnnnnnnnnnnnnnnnnnnnnnnnnnnnnnnnnnnnnnnnnnnnnnnnnnnnnnnnnnnnnnnnnnnnnnnnnnnnnnnnnnnnnnnnnnnnnnnnnnnnnnnnnnnnnnnnnnnnnnnnnnnnnnnnnnnnnnnnnnnnnnnnnnnnnnnnnnnnnnnnnnnnnnnnnnnnnnnnnnnnnnnnnnnnnnnnnnnnnnnnnnnnnnnnnnnnnnnnnnnnnnnnnnnnnnnnnnnnnnnnnnnnnnnnnnnnnnnnnnnnnnnnnnnnnnnnnnnnnnnnnnnnnnnnnnnnnnnnnnnnnnnnnnnnnnnnnnnnnnnnnnnnnnnnnnnnnnnnnnnnnnnnnnnnnnnnnnnnnnnnnnnnnnnnnnnnnnnnnnnnnnnnnnnnnnnnnnnnnnnnnnnnnnnnnnnnnnnnnnnnnnnnnnnnnnnnnnnnnnnnnnnnnnnnnnnnnnnnnnnnnnnnnnnnnnnnnnnnnnnnnnnnnnnnnnnnnnnnnnnnnnnnnnnnnnnnnnnnnnnnnnnnnnnnnnnnnnnnnnnnnnnnnnnnnnnnnnnnnnnnnnnnnnnnnnnnnnnnnnnnnnnnnnnnnnnnnnnnnnnnnnnnnnnnnnnnnnnnnnnnnnnnnnnnnnnnnnnnnnnnnnnnnnnnnnnnnnnnnnnnnnnnnnnnnnnnnnnnnnnnnnnnnnnnnnnnnnnnnnnnnnnnntccagcctgggtaacaagagcaagactgttcagaaaaaaaaaaaaaaaaagaatttaaacacaaaactaaacttttaaatgcgtcagctttaagttctcaaggaaaacatgataagtgacatgggtaggagacaggattatttttcctgatcctggagctctgaaaagaattagctgccaaaatttatgtcgagtcttttcatccgaaggtgaaccaagtaggtagttgtgctgtgagttaaaaagggttggaggtgcagagggcgctaggatactgctctctttcattctatttaaagcaataatttgcattgccaccctgccgttcttaacctgctctaattatcaaggccttattttgactaagaccctgaaaaagcgttgcatgatttagatcaatacggagttcatccaacttagccgtaaattatttctgccttggagtcgttagctgataaagatcaataaatgttaagaacagttttaaattataactcaacttgtttttcttgtccttctatctaatgaaaccatgtgtaacctagatttttaaattttacttatttatgtatgacatgtatgtgtgtatgtataaatgaacgaatgacaggtctcgctcactctgttgcccaggctggaatgtggtggtgcgatcatggctcactgcatcctcaacctccccagctcaagcaatcctctcacctcagccttctgagtagctaggactacaaatatgtgctatcatgcctgactaatttaaaaatttttcttttctagagatgcggtctctctctgttgcccagattggtcttgaactcctggactcaagtaatccacttgtctgggtctccctaagtgtgggactacaggtgtgatccactgtgtttagctgccagcttagatttttgaggggtacatagcccactgtaattggatacctctcttcagagccatagtagcttattataccttggggccatcctgcttggagtgtgcctcaaaagtgttcctttattccctaggttagagagttatgtaaaaacggggctctcaggccagaatgagatttaaggcttctgcagagcctatatgaaagtgtttttgggccgggcacagtggctcatgcatgtaagcccagcactttgggaggttgaggagggcggatcatgaggtcaggagatcaagaccatgctggccaacacggtgaaaccccgtctctactaaaaatacaaaaattagctgggtgtggtggcacacgcctgtaatcccagctactcgggaggctgaggcaggagaatcgcttgaacccgggagtctgaggttgcagtgagccaaaatcaccactgcactccagcttggcaacagagcgagactcggtctcaaaaaaaaaaaaaaaaaaaaagtttttgggctgggcacggtggctcatgcctataatcccagcagtttgggaggccaagatgggtggatcacttgtggtcaggagttcgaaaacagcttgaccaacatggtgaaaccccatctctactaaaatacaaaaaaattagctgggcatggtggcgggtacctgtaatcccagttacttgggaggctgaggcaggagaaccacttgaacctgggaggtgggggttgcagtgagccaagatcacaccactgcactccagtctggatgacagagcaagataccatctcaaaaaaaaaaaaaattttttttttgtatccttttcctggggagagctgggagtctccaaagtatctcacggtgtcccagtgacagcctccagcaaatggggtcttcagcaatggtcaggattacaacctctaaattcttcctctccattcagacttgttggcactgatagcaagatctgaagtggcttgtttggttttgttttgttgttttataagctgtttgtagcagactcacacgtaatgatttgagtggtttcttctgcaatttttgcaaggaactatgctgcctctgccaggcatcggtgagcagaagtcagagtggcccctgcctccaccagcctgaggctacacacaggattctgttctgagcacggttcctatctgtgtgtgaccaacgactgttgtctgatccttgaaacatagaaggttgcccatggtattcacaaggtgctcctggctacatctctctcccatcacagccatcccatagctgtgtggcttacacaggaagggattccttttgactgtgtcagactgccctgccttaaagatggagggagacagagtggctcattagtagtggaaaattcagtatgctggtctcttggttagaaatgtgagtctcgttttatctagaattatttcatctgctagattcacagtgacggattatagctccaggtgagtttgtctcttagctccttaagagaggcttagatctctttagggaagcatggaggaggtggtatttgaactgagctttgaagcataggtagaagttatgtatgtggcagggtcagggaaaggaattccaggtagagggaagcatgaatcatggcatagaggcaggaaaacacagacatgtttttacaggaaatagcaagtggttcaagttgtctacaacaaagggttcctgatggcaaggggtgagaattaaagtaagaaatagttgaagcagtgaggagggtcttcactgccatgttcaggaagtggattttatcatgggcaacaggaagcagtggaatgatcctgcacagagaagtgagatgcgctgtgctttaaggaagaggactctactgttacggctaaggtgagctggagaggggagaggtcaattaggaggccgttgctatgggccagtgagagataagagggggtctgagttaggatagtggcagagtgaagggacaggatggggacagatgggagagagatggtgcaaagggcagggactggtgtgggaagatgggtaggggagtagcagggagacttggccttggcccttcctggggtggttgtggtgggaaggagcctgaggcccatggccgtgctccagggctgtacgtggagagctgtgttctcctcctcctcagatcacaaagcctcatttctaatggaaacctgaggctggggctgccctttcctaagttacagattatttcctgaggaggatcccagccccaagagagctggtttgatttgaaaatctggacacataggaatgaaactcagagtgaattttattaaccactacccaaagcaagatggaacttagctcatgatgcccaataccatagaggaacaagagtaggctgggcgcagtggctcacgtctgtaatcccagcactttgcgaggctgaggcaggtggatcatgggagggcaggagtttgaaaccatcctggccaacatggcgaaaccccaactgaaaatacaaaaattagccgggtgtggtggtgggcacctgtaattccagcaggcttaggcacgagacttgtttgaacctgggagatggaggttgcagtgagtcaagattgcgccactgcactccagcctgagtgacagagtgagactctgtctctaaataaataaataataaaataataatagagtctagtgatatagctcagcttgaggatgggaaccagcataaggcttgataagaccaaactaattagaaacaaacacgatggaattttcttttttcatttgaaaaaacatttcaaagtttattgttggaggtaagtgcttaccaccctgtgaagtgcgtgcagggctgtcattaggtggtggtaacaggcaccaaatccccaagaagctgctacccaccaagtgacctccgagccactgtgtcctctccctttacctttctggctgtgcatagaaccttatggaagtttccttctagcctggctgttggcttcctgggtgatcctggcagagttgtttattatttctgaatctcaccttcttttagaggtaatctcaattccttttccatctcctggaactgtcctcaggatcagatgaaactgaccaagtgttgtgtaatagcattaaagttatggcatttaaaagcacattgcgtatacaatgctgggctccaaagaggcagaagagatagttcctatcctcttagacctgtgagtcctagttggaaaagcaagactgtactttacaagtcagatgaaaggtttatgggtgaattaacacatgaggtctgggatttgccttaagacattccactccctcccaccctgcaaagaaaaagctgggggttataatgaaataagattggggcggggcacagtgactcacacctgtaatcccagcacttgaggagctgaggtgggtggatcacctgaggtcaggagttgagagtagcctggccaacatggtgaaaccccatctctactaaaaatacaaaaattagctgggcatggtggcacatgcctgtagtcctagctactcgggaggctgagacagaattgcttgaacccgggaggcggaggttgcagtgagccgagatcgcaccagtgcactccatcctgggtgacagagcaggactctgtctcaaaaaaaaaaaaaaaaaaataagattggtaaaaaaatggattattgttgaagctgggtgatgggtacatggttactgtctctacttttgtgaatatttagatttttctgaaaaaaaattggctaaaagaaagtagcatatgtactgacataacaagtgacatacatgataaaaaacctcaagggttccaaggagagggactcttgtgggtggacagctgtcaggggaggcttcacagaggagctgggagctgggctttgtttcagtgaggattcttggttacacataacagaaaccaatttgagccagtgtaaacacaacagggaacttccttatagggatccagggggcccttagggaacgtgagggccagatgtagtcagtgctcgggaagggatgggacaagacagggaccagaaagccactggaattctaggcggccttcctgcttattctgcgtgctttgcacttgtttctttgcttctctgtccagagggcaggaggaagacaccacccctcagcaaccagtgtgtatcaagtccatcccagacacagcccagattcaacctgaccctcttagcacaattcccaagtctctgagtaatccaccaacacttatattatgtacattgtgggtggggctccttcgggtgagtgaagggaggtaattagggggatacatctgaattaggcagccctcctttctcccttcgtctgaatcagactggaaggacagtaggattatacgtgaagagagaagatatctcgattgaacagtaagtgcttcagagtcaaacacgaagggaacatttatggaacagtatagatcctcctggcactgagggggtgtgaaccccaaatatctgagactgctctcagttaatttagaaagtttattttgcctaggttgaggatgcatgcccatgacacagcctcaggaggtcctgacaacatgtgcccacggtggtcagggcaggggttttttaattaattttttaaacggagtctcactcttgttgcccaagctggagtgcaatggtgcgatctcggctcacttcaacctccacctcctgggttcaagcgattctcctgcgtcagcctcccgagtagccgggattacaggcgcctgccactacgcccggctaattttttgtatttttagtagaaatggggtttcaccatgttagccaggctggcctcaaactcctgacctctggtgatccacctgccttggcctcccaaagtgctgggattacaggcgtgagccaccacgcctggccagaggttggttttatacattttagggagtcgtgagacatcaattaatatacgtaagatgtacactggttctgtctggaaaggcagcccagctcaaagcagggaggaggctttcaggtcacaggtaggtgagagacaaatggttgttttcttttgagtttctgattagcctctccagaggaggcaatcggatatgcatttatctcagtgaatttgaatagaatgagaggcaggtttgccctaaacagttctcagcttgacttttccctttagcttagtgatttttgggggccccaagatttattttctttcacatttccccccttttctttttaaaatttttttagaaagcattttagaacaaaatgaatctttcctctcatgtttcattggatctctcacggctaggacagtttattcctagaccggtaggtaggtcccaagttactaagaaagcccatttttagcaagttgtggtctcatgtccccatgagagaaaatagggggagaaagggacaaaaaccaacaatcaccaaaaaaataatcnnnnnnnnnnnnnnnnnnnnnnnnnnnnnnnnnnnnnnnnnnnnnnnnnnnnnnnnnnnnnnnnnnnnnnnnnnnnnnnnnnnnnnnnnnnnnnnnnnnnnnnnnnnnnnnnnnnnnnnnnnnnnnnnnnnnnnnnnnnnnnnnnnnnnnnnnnnnnnnnnnnnnnnnnnnnnnnnnnnnnnnnnnnnnnnnnnnnnnnnnnnnnnnnnnnnnnnnnnnnnnnnnnnnnnnnnnnnnnnnnnnnnnnnnnnnnnnnnnnnnnnnnnnnnnnnnnnnnnnnnnnnnnnnnnnnnnnnnnnnnnnnnnnnnnnnnnnnnnnnnnnnnnnnnnnnnnnnnnnnnnnnnnnnnnnnnnnnnnnnnnnnnnnnnnnnnnnnnnnnnnnnnnnnnnnnnnnnnnnnnnnnnnnnnnnnnnnnnnnnnnnnnnnnnnnnnnnnnnnnnnnnnnnnnnnnnnnnnnnnnnnnnnnnnnnnnnnnnnnnnnnnnnnnnnnnnnnnnnnnnnnnnnnnnnnnnnnnnnnnnnnnnnnnnnnnnnnnnnnnnnnnnnnnnnnnnnnnnnnnnnnnnnnnnnnnnnnnnnnnnnnnnnnnnnnnnnnnnnnnnnnnnnnnnnnnnnnnnnnnnnnnnnnnnnnnnnnnnnnnnnnnnnnnnnnnnnnnnnnnnnnnnnnnnnnnnnnnnnnnnnnnnnnnnnnnnnnnnnnnnnnnnnnnnnnnnnnnnnnnnnnnnnnnnnnnnnnnnnnnnnnnnnnnnnnnnnnnnnnnnnnnnnnnnnnnnnnnnnnnnnnnnnnnnnnnnnnnnnnnnnnnnnnnnnnnnagccaggtgcggcggctcacacctgtaatcccagcactttgggaggtagaggcgggtggattacctgaggtcaggagttcgagaccagcctggccaacatggtgaaaccccatctctaccaaaaatacaaaaaaattagccgggcatggtggtgcatgcctgtaatcccagctacttgggaggctggggcaggagaatccttgaaactgggaggcggaggttgcagtgaactgagattgtgccactgtagcaggacaagtcacagacaaaacccctcagacaccgagttaaagaaggaatggctttattcggctgggagcttcagcaagactcacatctccaacaaccaagctccccaagtgagcaattcctgtcccttttaagggctcacaactctaagggggtccacgtgagagggttgtgatcgattgagcaagtggggtacatgactgggggctgcatgcactggtaatcagatcagaacaggacagggattttcacattgcttttttatacaatgtctgtaatctatagataacataaccgattaggtcaggggtcgatctttaactaccaggcccagggtgtggcaccaggctgtctgcttgtggatttcatttccgccttttagtttttacttcttctttctttggaggcagaaattgggcataagacaatataaggtggtctcttccctcaccaccacactccagcctgggcaacaagagcgaaactccatctcaaaaacaacagcaacaaaaaaacgggtgtactatagtttttgaaacatattttttctctctccactttcctgtttttactaaagacaaatcatggtaggaccaatttgctttattatacttgggcagattatttctataaagtacagtaagaataattatttttcacataggcttttaaaattggccttgatggaactttgctctgtagaaggaatctcagataagacttttttaaagctgagcccagccatggatttgtaccatcaaatacatacgagttgggtgaattcctctcctcttgatgtcccaagataacttggggctcctgggcctatcagaaagtgacattctttacttaccacaggccaagatccctgtacagggactgtgtagacaaggtatgaggccagttttcccaaggggcttttattggctctataaatcaagttggattccttaaaggggaaagcacaccattctagtcaaagccttggtaaaacaaccagtttctccaattgtgtcctgttacaaatgaaaacagatttttattgcacatatgcagataactatattgccgtaagttaagaatactcccacatagtttccaaattctggagtaatcaggtagagtgaaacaaatatgcttcaatttttttcataggcgtatgtatactttattgttaaaacctggctgggtgtggtggctcacgcctgtaatcacagcactttcggaggctgaggcgggtggatcgcttgaggtcaggagttcaagaccagcttggccaacatggtgaaaccccatctctactaaaaatacaaaaaattagctgggcatggtgctgtgtgcctgtagtcccagctactcaggagtctgagacccaagaatcacttgaaccctggaggtggaggttgcaatgagctgagatcatgccactgcactccagcctgggcaacagagcgagactgcatctcaaaaaaacaaacaaattgttaaaacctttcaatagctcaaaagaaaagtttccttgactctaaaaaacaacacaaagaatcagcagcatttaagcaaaaaaaaaaaaaaaaagattacttcagtctcctgtaagttcagttcatgcagttaattcctgttctgcttgatattcatgaacatttcagctctgcatgagtcatgaaagtttttcctctgttttgatgtcacagtctttaaagttatcagaagcctgtattcaagagcacctgttaagagttttatagttgattataaaaccaccttttaaagagaaactgcagggctgggcatggcggatcacctgaggtcaggagtttgagaccagcctggccaacgttgtgaaagcctgtctctacaaaaatacaagaaattagtctgggtggtgatgagcacctgtaatcccagttactcgggaggctgaggtaggagaatcacttgaacccaggaggcggaggctgcagtgagccaagattgtgtcattgcattccagcctggtcaacaagagcgaaactccgtctcaaaaagaaaaaaaagagaaaccatcattgcaaaattataactaagacagtgaaaaagatctgaccgaactgactccatgttgcttctaatctccaagctgtccttgttcattcctgggcatagacagaactaactttgggaggaacttagtttatagttgagctttgaaacaaagacgataacagccttttccccaaacccccttcctgcctggggactaggctgcctaaagccacatgattagaagttatggttattttactaaataattcaagacttagctattttcactaaaccaatgtcagtctcttattcatcaatatttacagaagcaaagatttttttttttttttttaaacaaagtctggctctgtcacccaggctagagtgcagtgacatgatctcagctcactgcaacctgtgcctcctaggttccagtaattctcctgcctcagctttctcagtaactgggattacaggtgcctgccaccacgcccaactaatttttgtatttttagtagagatggggttttaccatgttggtcaggctggtcttgaacttctgacctcaagtgatctgcctgccttggcctcccaaagtgctgggattacaggcatgcgccaccgcgcccggtggctcacaagcaaagatcatcctgttttgggctgggtttatagttttgtaatccctatgccaaattttgacaccttataatatttggcagggatacatatgaaatttcttgatcaaaaaatgcaaacaaaaatgtaccctggctattcttaaggcatttctaatagtactttaccaacaattttaaaggtagcttatctatcaaagattttacttaagcaacgtaaatttgagaaaacatttgactagtctttcattttctgataaagtatttgatttgtgcttttatttttccttaagccaattaattagagctgttttatattttttagtagtaaatcattgtgtacacaacacataaatacatggacatattagacatactgatagaagtacatcttaaaggtaagacagatctttttttttcccccttctgtctaagacttgcaaactcttgataacttgtttcattatgcttggcagttgtcagctaaatagctcctaaatctgcatattgaaggacacaactctttggtgaaaaatcagaaagcaaaatttacatcataaagtacagagaggaaaagtctggtggtgctagaggaagattaaaggtggatgccaaatcaaacatacaattatagaaatctatcataggattgtataaggagaccaatttatttagataggtactgcctatcttaactggatctctgagctctgagtagagcccacactgaatcctgggtctccaaaaaggaggctagaccacatgatgctttaaaaaaaaatttttttttggccgggcgcggtggctcacgcctgtaatcccaacactttgggaggccgaggtgggcggatcacgaggtcaggagttcaagaccagcctggccaacatggtgaaaccccatctctactaaaaatacaaaaattagctgggcgtggtggtgcgtgcctgtaatcccaactacttgggaggcttaggcaggagaatcgcttgaacccaggaggcggaggttgcagtgagctgagtctgtgccactgcactccagcctggcaacagagcaagactccgtctcaaaaaaaaaaatttttttttggccaggcacagtggctcatgcctgtaatctcagcactttgggaggccgaggcgggtggatcatgaggtcagcagttccagaccagcctggccaacatggtgaaaccccgtctctactaaaaatacagaaattagcaaggcatggtggcaggcgcctgtaaccccagctactccggaggctgaggcaggagaatcgcttgaacccaggaggcggaggttgcagtgagccgagaccgtgccattgcactccagcctgggcgacagagcaagactccgtctcaaaataaaagttttttaaacaaagacaattctaagtgtctaaactacactcttcattaaaaacccaagagtagcctctgttgcaataactattttagtcagaaaatcaggtaacacaatacaaaagcagtttaatagctgagaggaacttgtttatactcttggggagacccatgaggaaaaacaggtttctcccccaaagggagtctggtgcctccttttttttgttttgtttttttttgaggaactccaggctattataaactattttaggtttctcatgcagcagagggtgcaagagaaaggagagagagcagaagtaaatgaagaaaacagaattctgtcaactgagaagaagaaaaatttgtctcaaaaaaagacagggtcctagacagagaaaaaacaaacccaaaacataaaatccttttaaagacagacagacacacacacacacacacacacacacacacacacacacacacacacacacacacatatcttggatgttagcttttaattaagctgacttttaaccattgagctcctttaaaaaaatctgtttaaatctcattgccatatttctgcttggacaaattgctgctgtttcagaagtaccaaatatcaaacctttcagaaagggcttgatttaggaaccaaacctaggctgtcatgaaaaaaagaaggcagaaccttatgtatggaactgcagcctgaggtgatagctattgctccttcagtttggcctggctagcaaaaacgtggcattgttttgtgaataaagccccttaagcagtcaaataaaaaatctttcctttttttctttttttttcttttgctggccgtttttctccctccaccatgccactttttttttcttgtttttttttttttgtgtgtgtgtgtgtgaatttagccacttcagaggcctcgttccccataatttggaactttccttcaaatttgatcaagttgcatagagttggtcaaacccaaggggaaaaagaccgaaacaacaacaaaaagaaacagtaaagcaaaacaaatgatcacacaacctatacaagtactgagagctctaatggtaaggagaaattaagaccagctggttgttaatcataactgtagctaagacaaaccctaattcagttacttagggatgggtttcatgctgaagactgccctctaccatcctagaagcaggaaaagactcaaacctgtcctccctgttggaagcaagctcaaaactccgtaaaggagttacttgccttccattgtcacagaagcaggaaaacttgccttccttgtgtcggaagcaagtaaaactcagaaacaaaaaaggagttgtacagcaaaataaactttagatcacctccaaattttgggagatcggggattctctggaggaggtgcttccaggcgtccgcaaattgtctgattggtttgaggcacaaagatagctcaagctggtaccagccaccaataggagatttgtcaaaggtcaggggcacctccactcagaatcccttggtggttaccaaaatgtgaaccctgaataactgagacaggtctcagttaatttagaaggtttattttgccaaggttgaggaccctgtgacacagcctcaggaggtcctgatgacatgtgcccaaggtggtccaagcacaggttggttttatacattttagggggacaggagacatcagtatatgtaagatgttccttggttctgttggacagaaccaagaacggcaggacaacttgaagcagggagggggcttcgaggtcccaggtaggtgagagacaaacagttgtattcttttgagtttctgattagcctttccaaaggaggcagtcagatacgcatttatctcagtgagcggagggatggctttgaacagaatgagaggcaggtttgccctaagcagttcccagcttgatttttccctttagcttagtgatttctggggccccaagatttattttcctttcacaggggccatgttaggtagaagccaggctgagaaggaatctgattccttatattggttatatttttttctgaaataaatgttagcttttattttccctccaagctgcaagagccattgaactctaacttctgtgcttctcacatttaaagcctcctgatttgagtacttagtacctgccagacattagcaggtaggagttactattcccacctgacagtcaaggaaaggctcagagaggttctgtaactgggctggggccacagagctagtaggtgatagagctaggattcaaacccagatctgcctaacttcagatcaaagttagtggtgctgtttccacaccacactaaatggcctacttaacaatgaaatttatgatgccagctgatgataagaatcactgggtgttaagattcttggttgctaatgaacttgaattagctcaaacaataaagatgatttttttttgtatcagctaaccaaaccccaggaaggatagaaatacagctggcctgatgtataattgtatccagggactcaaatgccattagctcttatactttgattaaaatatactttaaaaagatgctgttagtggccgggcatggtggctcaccctataatcccagcactttgggaggccaaggcgggcagttcgtgaggtcaagagattgagaccagcctggccaacatggtgaaaccccatctctactaaaaatacaaaaattagctaggcgtggtggcaggtgcctgtagtcccagccactcaggaggctgaggcaggagaatcggttgaaccggggaggcggaggttgcagtgagctgagattgcgccattgcactccagcctggcaacagagcaagactctatctcaaaaaaaaaaaaaaaagatgctgtcagctagcctggccaacatggcgaaaccccatctctactaaaaaatacaaaaattacctggatgtggtggtgggtgcctgtagtcccagctatttgggaagctgaggcagggagaattgcttgaatctgggaggcagagttgtagtgagctgagatcgtgctactgcactccagcctgggcgacagtgtgagacttcgtctcaaaagaaaaaaaaaaaatgctgttagatctctccctctcacttgtttccctttcgatgttggctttcttctctcgggccagctgtctaccagatggaaccatggtttcctgttttacagttttgttatcagaagagtttttctcacttcaattagaaagttctgagcgaggactcctgattggactgttaggggtcgtgtgcccagacctatgagatcaccgtggccaggtgatagggagctgtaagtggcccagcctgggtcagggggctgccctgtagccagggacaaggttctcattgtgtcagtctccaccttaagctgcatttgccccaaagaagtatgtgtgatgaggagacaaggaatgcctgacatctgtctttaaattgtcaaacacattcttctaagtctttccattacgggttatcccaagctaggaataactggtgagtagtttcttgaccttttttccagaccttttttggcgaattatgttaagctgtgacccaggcacaaatggggaggccatactttggtggagcctgggtcacataaatatggtgaccttactagaaattctttcctacttactcattgtttaataatgaacagaactctggcctatcttcttttgtcactgtttaacacccacctcactacctcccacctctcctgctaaacaaaattagccttcagcaggtcaaaacagatttttagctaacttccgtttcttgaatagcatatgatgagaactcaagttagccaggtttgttctcctgcctgtaggtggttgattgggtttgtgatactgtgatacattgcatatctgctcctctgaggtagcccaaataatctggtgggggaaatacgctgttttaatgttattttgtgacctttggcaagagattttatcctccagcctcaacttccatatctgtaaactaggactattctgccaaatattacgaagggtcatgaaaaatgagagatcaggctgggcgtagtggctcacgattgtaatcccagcactttgggaggctgaggcagtaggcttgcttgagcccaggggtttgagaccagcctgggcaaagcagggagaccctgtctaccaaaaaaagaaaaagttacttgggcatggtggcgtgtgctgaagtgggaggatcgcttgagcctaggaggtcgaggctgcagtgagccatgatcatattactgcactccagccaaaaaaaagagtgctgtcagggaatctgggattcataagcatttcccttgactgctcttctttcctttattttattatacctctcttctctctgtatcccctataccttttgctctggcttttgttacatcctgtattaaaattttagataatttactttatgttattttacttttttgagacaaagtctcgctctgtcacccaggctggagtgcagtggtgcaatctcagctcactgcaacctctgcttcccgggttcaatgagttctcatgcctcagcctcctgagtagctgggactaccggtgcacaccaccatgcctggataattttttttggtatttttagtagagacagagttttgccacattgcccaggctgatcttgaactcctggcctctagcaattcacccgccctagcctcctgatgtgctgggattacaggcctgagccaccatgcccggtctaaaaatttagataatttattggaatgttgtgtgccaatgaaaagcaaatcctaagctcctgcaacatcatttcatgtttgattgtcagggtttgtgggccctctgggtcaggggatgagcagtgaattggcagagaggggtgtagggagggtagagaaggagagcatttcaaaacgaatgaggcttggaagggaaggaagaaaagaaacttaaaatgcagtttctgggcttggttgtaaaaatcttgaaagtgagggagataaaaatagttgcttgttaggacctggcaggcatgctctggaggctccctgtttgaattcagttgctaatcaggaggtgggaaacaacctctggttcctgctgttagcacgtttcttgcagttggccttgtcaagaaggataatggactggagctgagaaagaagcatcatgctcactcgctaaactggagtggagaactattctctccttactgaatttcagggatttcagcctgccccaagtcaaatccttgttcccagaaataaagctcgttacatctgtaatgtgaatgattccttccccggccacagctcaataagggctcttgtgaaactttggagtacaacttattatgggttgcctttagtcctgttgtctgggccctgattttttagatcctggagagaacactccctcaggggtcagagttctaacccttagccctatcgttaactccctgtgtcaccctaacaggtgacgccttcctattctaggcctcagtgtttctcatctgtgtgcaatggtttataatgcttacctcacagtgttactgtaaggattaaagaagatagtatatttgaactggggaggcggaggttgcagtgagctgagatcatgccactgcacgctagcctgggtgacagagtaagacttgtctcaaaaaaaaaaaaaaaagatagtatatttaaaaggcctgacatagcaggtgttccataaatcagagctgttgtaggatcttcttaggtctgctaggctcgcctgcacctctcattctcccacctagtctctcagctgcatcctggctttttttttccaatgctcttggggaaggaaatttgggtgggggaaaagagcttacaggtaatggctaattgaagagttggggattttctcagaattttaattatctctgctacttaattagctcctgaggccatggatggctggaggtggctctgtagagggtgcgatttgactcatccaggtcagctccctttctctctgtttcttcgtcttgagtggggagagttattaaggctttgccaaggatactaagaagaggttgtttgaagcctaaagtcgccattttaaaaaatcttcatttgcctttttttaaaatcctttaactgttgcttatctacttttggattcagcctttgtcacagatgagcaagaatccagcttccctgtgtcactctgcttgtttctcagcagcccctcgctccttccttccacctcttctctttcttttgggctccccacttccacccctccactgcctttctcttcccccaagccccaccgtcttccatcttgccttagggaattcagctgcttttaatattagcctaaaccaaacaaaatgaaggtattaggatatagtggaaacacatagaaggccgagattcaccttggttcatctgcctgccagggccttgtcagctactcaggctatcatctgatgggtggcacccatcccacctggttggaagaatttagaacgagtccacggggccttgaccacatcttcatctttgcccttacacgtgcacatgttcttgtcatttgttggattctgtctcccctgatggtgacaatccctgtgtcctttttactcttagctcagtgcagatactctgtgtttctagaataaataaatgactccctaaattgttttatccaaacaccttattttagaggggtagaaaatacttaatagttaaacttcaaaatgtgtgctcttgagggaaaaatcaggaggctttgaatagtgttatttctgggacagaaaatatcggagaagaacatactttctgagtttttcataaaacctccttgttcatttttgaggaaggaggggttacccatactcattgtcacagaagctgagcagaattggggttattagatctcagcctcctgtgggattcctagggaagcttatgagcctgggagcctactgggtggttgatgcttcctccagaatgcagcctggccagccagctgctggggaccctctcagcatcacctttcagttatcaaaggatcagaaagagaacgcaaggcccagaggtggcctcaggaagtagagaaggactgggcctgtgatttgaatgtttgagggctctgctaggagaatgtgagaggaagcccagttaatcctcccaggactccaggagcagggcattatcccaagttgggaaggggattcagaagaactaggcatctaggagtagaggtgacagggtgatttgaaaggaagactttttagatgcaaggaccagcacaagagaaggcgagactcttacacaggggcagttagagaggcaggccagccccaaccaggaagaagtggatgtggagacgtgttgtggtgtgaagttggagaggaaaggaagaaacagtggagggcatggaaaggcgggcagaggggcttgggactgtgctctgaggcagaggggagccatggcaggctctgtgcaggggctgtcccgctggaggagtgctggtttctgtgtaggcggggggagggagaagatgctggagaccggaacagtgtgtgaagggcctggctattgtgggaagcaagtgtggggtgctgagggagatcaagaaatgaactctctctcgacttgtctgccatcgtgtacctcttttctgtcccgagagaagagctagacttgggtgtggcaggagcaggggcaagagggatgtcctagcgtggcggctccagcagcatgctctggggttcagtgatctcatgtgcccaggtttccaggtggcttcttgtgaggccctccgggatctggctcccaggaccaatgtggtctagcagtgaaaagcccctcagaatttcccttctcctcctctccaaccccttccatctctgctgcctcctaggcagtgtttttccctggagcgggtgggagaagctggagctgacagccagggatggtggcaagctgtgttatgtaagtttgaaaaaaggaggcttgcttgccatgtgaatagagatcagatacaaggacagctagaggcagcacagccatgcctgagcagcagctgtagtctgaagagaggtgtctgagccagcagaggaagaagctgctggactgggtggaggagactgtgttcttgtggggaaggagaggtgtctggttctgtgaactgccgatcttggagggcagcctgtgaagcaatcattgtctattcctataacatggtgtgctgcttatatgccatgccttattacatcaatcctggtctgtaacttgtgatggtatgagagccgccattgtgactgtttcaatcatggcaaaccatggcccagaaaagtcaagtgacttgctcagggctgcatgtagagtaagtggcagggtcaggatttgacacagggcttctgtctcactagccagtgctgctcttttactctaaaacaggcttaacagatcatgcctaaacagcccatggggagagtgtgggccgggtgagggagcctggtgccgtgtggcctggcatggatgagaggcaatggcactgggtgggaggagtggaagagggcttgtgttggagccccttggtgtgccgccccagcaggcactgtcacaccccttacccttctcagtctcgttccattttcagcatcattttccaaatcctgagcacctgacctccaggggccaggtacccaacaccggtcctctgaggggccatgggcatggtgggatgaggaggtacacctccaacaagcaactgctggactcatgcctcggccgaagtgtttgtgggccctgtcctaacactaggcccagggaaagaacagagctcgcccctctcctcccgaagttcagaatctccccgtggttctctgagaggctgcatggctcgctccctctctctgttcacatcgttgctcaaatgtcctctcctcacagggccgttccttgccaccctgtcacaacagtacccccctactctctctgtcctcacagggttttattatatatatatataaaaatctgtgtatatatacttaacatatacaggtatatatatatagtgtatatatatatgttaaatatatatacacacatatatgttaaatatatatacacagatatgtgtgtgtgtgtatatatatatacctgtatatatatatacacacacaggtatatatatataccggtatatatacaggtatatataccggtatatatatatatatatatatacaggtgtatatatacaggtatatatatatatttttttttttgagacagagtgtcactctttgcccaggctggagtgcagtggcacgatctcggctcattgcaacttctacctcccgggttcaagcaattctcctgcctcagcctccctagtagctgggattacaggtgatgtgctaccatgcccagccaatttttgtatttttagtaaagacagggtttcaccatgctgacctcaaatgatccgcctacctcagcctcccaaagtgctggggttacagatgtgagccactgcgcctggctgggttttctatttttctttgtgccatttaagaccacctgatgttacacatttgttcattgatttgtctgtctcctcacaataaaatttaagcttcatgacagtgggggacttggtcagtttcttgactgcccacacagagcccacaggtaaggtagcaggtgttcagtggacagtaggtgatgaccgttagagcatggcagcagggtgggtagaagaggacaggtgtaagtgtcagagggcctgggatctgctttcagctttacccagtttttgctgtgtgactttgaacaagttgctggatctcttgggccttagccttcttttttttttttttggagacagaggagtctcactctgtcacccaggctggggtgcagtggtgtgatcttggctcactgcaacctctgcttcccaggttcaaatgattctcctgcctcagccttctgagtagctggggattacaggcgtgtgccaccacacctggctaatttttgtatcttcactacagacaaggtttcaccatgttggccaggctggtcttgaactcctgacctctggtgatctgcccacctaggcctcccaaagtgctgggattacaggcgtgagccaccatatcctgctgggccttagactttttgttttcatcatgaaggggaggaactaggtgccctctaaggctgcttctggcacctctcttctgaaagtctatgtgtaggagacgagggtcgcagaggggtttgcaaagatttgtatcctgtgttcctttactgaagagcctgacttgggtctgcacactgtggggtaggggagtgacatgatgagggctgggtcttaggaggactacaccagtgatgcagtgtgtgcatgcatgtatccatggtgcatttagaaccattcattcaacaagggcttttggagcacctgccctctgtcacatacagtttgggctcagggcttagagtggtgaggcagacagccaacgtcctgccctcctgcagctgattggggcagagagaggctagagctggcctggaatggtgattacccccaggctgaagatgaagaggggccaagtggagttggggcactgggatattagagggtcatgattttttttttattatttttatttttatttatttttttgaggcagagtttcactcttgttgcccagactggagtgcaatggcgtggtctcagctcactgcaacctctgcctcccaggttcaagtgattctcttgcctcagcctcctgagtagctgggattacaagcatgcgccaccacgctaattttttatttttatttatttatttaataaatgtattttttgagatggagtctggctctgtcacccaggctggagtgcaatggcatgatgtcggctcaccacaacctcctcctcccaggttcaagtgattcccctgcctcagcctcccaagtagatgggattacaggcgcccgccaccactcctggctaatttttgtatttttagtagagatgggagtttcaccatgttggtcaggctggtctcaaactcctgacctcaggtgatcttcctgccttggcctcccaaagtgctgggattataggtgtgaggcaccgcccggcttttgtttttcaatttgtccttggaaagatacttaaatagacctgtttgaatctgtttaagaataaatagccagccatggtgattcacgcctatagtcccagctacttgggaggctgaagcaggtgtattgcttgagcccaggagttcaagctcagcctgggcaatgtagtgagactctgtgtctaaaaaaaaaaaataataaatgcattcatatgacagtatcgaagagaaaaataatgaaatgttattagtggttctgctgggttgtattataggaggtttgggttttttctgtgattttctagatgtcctatatggtgtctatattatgactattaatatagacaccatataggtttaggatgtcatggtttaggatgtttcctagatatggtctgccctcaaagtgagtgtcattgtttgctgatgtctgctccacaaagccctgctccaggggccttcaccaagtcccagccttggttttctcacctataaatgaggataattgaccctggtctatgcactttacaggacagttgtatgaatcagaggatacagcggaagaaaaaatgtttggaaatttaggtctctgcaaactaagggccaatatactggtatttgtgacagtgaccggatgggtgggatggggtgataataagagtgcaaggaagggggatgggggcatcgttttgactctgaggagcagctttaaggcctctcacgttccagctccaggtagcaaggggttccccttgactggcagggtagatgtacctgtgtaggctgttaggtgagtgactccagtggaatggaatggaatcatgactcagctcccacccctgccacacatatttgtaagaaaaagacccacatgctccatgcctggtgcagaagtctagaatgggaattcctgccaaaccctgtccccttctagcctgtgtagcctcagcaagcagataggtcttattacttgtttttttctgcctccttcatgatccagccatagatactatatcttaccagtaggggtggttgaagcaacagactttgaaatcctgactgttcatgataacggactccttcctgtggatcatctggccaagtctgcattcttagagagtggaaatcgactgtctttctgttctacttctacagcagctgctcatttcatctcctgacagttgcttcttgaactcagaacaaagggccttggtgtacagtgtttgcaagccaagggctgcctctgatggcggacgggggtgtggtcctgggactcgtggtcagggctggtctgtgtggaatgctgatccttctcttccccaatctacctgtgtcagttccctccttttctattttctcttccctgcagatgtcaagccctccaacatcctagtcaactcccgtggggagatcaagctctgtgactttggggtcagcgggcagctcatcgactccatggccaactccttcgtgggcacaaggtcctacatgtcggtatgaacagaagtttccattgcttgagcttcttgtacgttcagggagaggagcccagtgggtgcctttcctgtggagccagagtcttgtgctgggtaggggacaagaagtgagggaggaggcacagtgctctgccctgaggagatgaagttgaatgggaagatggtcttggtctttcttaggccttggagcataactgggatattggggccttgactcactgaaaggactgtccagctccagagtgtggctttctttctgaaggactgtgagctccagctcccctctgggcatctctacatgatagtcttcagatccacaaacccaggatgctcagatatgatccaccccaaactacctcaccttctccttttctcttagcagtaaatagacagcatcatctccctggtttcccaaggtagaaacctgagcattggcttttaacctgccttctcagcagcccgtcctttcagtatcttgtagctcccaactcctgagagtctgttcagaattgtccagcctcttttctccctcttcactatgtctgtcagacatgtacccctccttctaactgcagcatacctggacccctcgccagagtctctgctccacttcagccaacaccctgtgttgagggtattccctcctgctcctggctctgctggctcacactgtcaccagagcgttgtgtggggccatcctcacactatggcagcaccagcatgttttcttccctcctccataccaccggttccttggggacagggacaaggtgtctctcttgtccttagtgcctggcatggggcctggcatgtggtaggtgttcagggaatgcttggcaagtgggtagatgtttagttggctgagtgggagggtacatggataaaacatttctgagaatgatttggaaaggtggaaacgtgagtctgggccagtgctgaagtgcggcagagtggaggagcgttggagtgagtaggcagtctttacagaagtggcggggagtgcaggcccgcatggaggcggggacaggcgcagaggctcagatcttaacttgtacaaagcattttatgtgttctctgtcaaagcacatgtcatgtccctggaaggtctcatttgatccatgtggttgtcccaggaaataaagattattgttcccattttagaggtgaggaagtctagattcagggaggttaagcaacctgcctacttaaccttgctgagccaggattgaaagctagctgcccccttgccaggcagacgccctttgcacagcacaccctcatttgcctcttggggaggatttggcacctgtgcccagatcccagtgtgaacacatcctcattccttcttgctggcacctaccccccactgagactccagccactgtcaacatcactcacctggcactgacccacatccccacccctcccctccagtgacccacagtggaactctctttctctgtcatctcctcattgcttcttccctaaatgtctaataactgagcagctggcatcctgggccatttgactgccaactctcaagttcaaaatccattaacaggccctgggagttactaatcaagggtttaatggttggggtttttttggttatatggtcagttacgaaatagtccagtgttggagttagtgaaaaatgctactggagaagttaatgtctacgtgaatatactatggccagaataaagattttttcggtagggttcttgaaatacatgtgctatttcaaataatgctcattaaaaataatgcttttgtatagcactgtatactttttttctctttggcttttcccaccaatatcaaccaatatttgtattgcattttacaacatttgacatacgttttctttttttcttttttttttttttttgagatggagtctcactgtgtcacccaggctggattgcagtggtgcaatctcggcttactgcaagccctgcctcccaggttcactccattctcctgcctcagcctcccgagtagctggaactacaggcgtgtgccaccacgcccggctaatttttttgtatttttagtagagacggggtttcaccgtgttagccaggatggtctcgatctcctgaccttgtgatccacccacctcggcctcccaaagtgctggggttacaggcgtgagccaccgcgcctggctgtacattttcatttgatttgatcttcttagtaatcctaagtagagttttcttatgtcattgttactgtcattttcatcatcatcagccaccgcccccccccccccccacctttttttctttcgacatagagttttcgctcttcttgcccaggctggagtgcagtggtgcgatcttggctcactgcaacctctgcctcccgggttcaagtgattctcctgcctcagcctcccaagtagctgggattacaggcatgcaccaccatgtccagctaatttttgtatttttagaaaagatggggtttcacgatgttggccaggctggnnnnnnnnnnnnnnnnnnnnnnnnnnnnnnnnnnnnnnnnnnnnnnnnnnnnnnnnnnnnnnnnnnnnnnnnnnnnnnnnnnnnnnnnnnnnnnnnnnnnnnnnnnnnnnnnnnnnnnnnnnnnnnnnnnnnnnnnnnnnnnnnnnnnnnnnnnnnnnnnnnnnnnnnnnnnnnnnnnnnnnnnnnnnnnnnnnnnnnnnnnnnnnnnnnnnnnnnnnnnnnnnnnnnnnnnnnnnnnnnnnnnnnnnnnnnnnnnnnnnnnnnnnnnnnnnnnnnnnnnnnnnnnnnnnnnnnnnnnnnnnnnnnnnnnnnnnnnnnnnnnnnnnnnnnnnnnnnnnnnnnnnnnnnnnnnnnnnnnnnnnnnnnnnnnnnnnnnnnnnnnnnnnnnnnnnnnnnnnnnnnnnnnnnnnnnnnnnnnnnnnnnnnnnnnnnnnnnnnnnnnnnnnnnnnnnnnnnnnnnnnnnnnnnnnnnnnnnnnnnnnnnnnnnnnnnnnnnnnnnnnnnnnnnnnnnnnnnnnnnnnnnnnnnnnnnnnnnnnnnnnnnnnnnnnnnnnnnnnnnnnnnnnnnnnnnnnnnnnnnnnnnnnnnnnnnnnnnnnnnnnnnnnnnnnnnnnncatattcctagtagagttttcttatgtcattgttactgtcattttcatcatcatcagccaccgctttcccccccccacctttttttcttccgacatggagttttccctcttcttgcccaggctggagtgcagtggtgcgatcttggctcactgcaacctctgcctcccgggttcaagtgattctcctgcctcagcctcccaagtagctgggattacaggcatgcaccaccatgtccagctaatttttgtatttttagtagagatggggtttcacgatgttggccaggctggtctcgaactcctgatctcatgtgatccgcctgcctcagcctcccaaagtgctgggattacaggtgtgagccactgcgtcccggcccagcagcagccccattttatagatgaggctgatattcaggatcctttagcttgaagtcccggaattgggatttaagtctcaggcccactgaccccagatcttttgttctatgtatccacggcaccacctcactcccaacccgcattccacaagcttcatgtttcagattcagtgacaagatgagcctctcatgctgggcttcggacaggctgccctgcgcgtgcaagactgtggccaagctgggtaaagctggaaccacaggctgtagtggcagccagggcacagccgattacatgtggtctgtcaatttaggccagattataggagaaatagagcagggatgaggggttaaagccacagaagccagctaggatttggtaaacacagtgttgggggtaggcaggaggccaaattcaagaggttagtggagctcttgaaacaggatatgaactattgagaagggacagaagagaaaatgcattagcagacccaggggtccaagttaggttaggtgattatcactgtctgtctctcctgcagccagaaagactccaggggactcattactctgtgcagtcagacatctggagcatgggactgtctctggtagagatggcggttgggaggtatcccatccctcctccagatgccaaggagctggagctgatgtttgggtgccaggtggaaggagatgcggctgagaccccacccaggccaaggacccccgggaggccccttagctgtgagtagcctggtgtgtccccatcttggactgttggaggggagggtcccttactttcaggggtttctggagggctgattctctgtacattctgccaagactgattctctgtccctggatgccaggctagggccaggggaagcagcaagggtctccaggtgggtgttgttactaccaacaacttcctaccatttgttgagtacgtactatgttctaggtactgcacttaggactttgtatacattatctaaccttttgtatttatttatttttattattaagggtcttgctatgttgcccagtgcagtggctagtcacagtcttcaactcctgggctcaagcagtcttcctccctcagcctccagagtagctgggactacaggttataatttatttgtgggggttgggagggaaggggctcactctgtcacccaggctggagtgcaatggcatgatcacagctcactgcagcctcaaacctcccaggcccaagtgatcttcctacctcagcctcctgagtagctgggaccacagtcacatgccaccatgctcagctaggtggttttttattttgtagagatatagtctccttatgttgctcaggttagtcttgaacttttgggctcaagcaatcctcccgcctcagcctcccaaaatgctgagattacaggcatgatccaccatgactggcttctaatttgtggggtttttttgttttgttttgtttttgatactgggtcttgctctgtcacccagggtggagtacagtggtgccatcatggcttactgcagccttgacctcttgggctcaagtgatcctcctgcctcagcctcctgagtagctgagaccacaggcatgcgccatcatgcctgactaattttttaaatttttttgtatagatgaggtctcgctatgttgactaggctggtctggaactcctgggctcaagtgatcctcctgccttggcctcccaaagtggtgggattataggcatgagccactgcattctaattttttaatcatgacttttggtagatttattttttattgagatatagaattcacataagacaaaattcacattttaaagtatgtagttcagtggtttttagtgtattgttccatgttgtgcagccatcaccactgtcttattctggaacattttcattaccccagcaagaaaccccatcccccactccccctgcctgatccactgacaaccactaatctactttctgtgtccacggatttgcctagcattatataattttaatagcatttcatttgtgatcacgactataatctgaattttaaagatgaggaaactgaggcacagtgcacttgttaaggccacataggcttgcaagtggccaagtctgactcccaagatgataaacactgtgcagtaccacctgcctctctgaatgtgaatactgggaagtaaacctggtactcagggaatagcctgacctagccaactgttttttatgtagctcctgtctggccagggatacctgccctgtacctccatgaggtccacatgagagagagcttgtataaaggggaaagcagagggggctagaggtagctgatggcaggtcattggaggggctggtggctgtggcctctgaggctcgccggtgactctaggagacaaaaggaagaaacgcaacttcatggagaattaaaactaagtcctttagttatttagttgctatctcatttgtgcctctctcaatagaaggaagggggaaaggacagacataattattatgtctctgctttacaaaactcagaactttgtttggctcagcagtgaactgatttgccaaaggttacgaacttaagatgtggcagagcccagacttgtaccctggcctttgctggtcccctctgtgttcaagccttatctgtggctgtttaatgtttattgtccatgaccctgttctggtcccagggatccatgcccaaccctttgcctcatattaacaagtaatctgtttctgagaagtattttttctttttataaaatttgtagcatacggaatggacagccgacctcccatggcaatttttgagttgttggattacatagtcaacgaggtaagtactgcctggtttccttcaccttggaatttacttgctcatcttaagaaaacacccaggtggccgggtgcagtggttcacgcctgtaatcccagcagtttgggaggctgaggcgggtggatcacacgaggtgaggagttcgagaccagcctggccaacaaggcaaaaccccatctctactaaaaatacaaaaattagctgggcatggtggtgcacgtctgtagtcccagctactcgggaggctgaggcatgagaattgcttgaacctgggaggcggaggttgactctgggaaaaacaaaacaaaacaaaaaaacacatcgctgtcacaggttcagtctactagggagtttaatttaacctctctttactgtatgcacagctttatactaagcaccatgggctgtagaaaagcagtttcaggattagttcgtcactgcctaaggatttgagggaaggcagaggatgttgcatttgtaggagtcagaaaaaaagccatccatcctctactgctggggacctaggctaggtggttctgggtggtagtcacattaagggaagggatatctgaggttagatgcgccattgcgtctcctagtgtgcactgctttcttccaaaatttcacattaatttcccatgcaattctcccaagcattgctgaggtaggccaaattggttcctcttcaaacaggtgaggaaattgagcctccgagatgaaaagtagcccaggtccttcccacccagtgctctttcttccttgccacctcccacctcccattcttacctcctaggaggcttggctgcatggcagttgttctactgcagcctctgttggcacacagcccctctgctgcctagctctttcctgttcagaaggaatggatgctgcctctggaggccaagctgctggtctcctctctcccttgaatggtcccttgattccctcagcagtggggacagtctgcagaatggggcttgctctgggtcactgttctaagagctgagttctagtcctcacctaagatcagactgacatggccctcaaaggaagagcactaggttgggctttgtgttggggatcagtgtctcatttttaatctcaaattaaaaacgagattttgggctgtacatcagagaagtgacatcatggacattatgtctgtgggtcagcatgggtacacacagctcccagcccaggtacataagtgggcccacatttcctggactgcatggaacgccatgagcccagtgctccagagccttgtactgtatagtgctgcatgatcaccatgggaaaatctgaaaacagcctcatttctggaatgtacaggtaacattcttcgagatccagccctctgtcagttaacgttttattaacttttcactgcctctctagggctcagaaaagggatttttaaaaaccagtttgcttctgcaggtgctgtcagacctgggctatgcctggtggtttgcacgtgcccctagctgttgctgccagtaaattgctggttacgttcccatgccgcactccaagatttaccattgtagagtgtcagagcttgaaagggtccctgagatcattaggcccaacctcttcatgtcatagaagagtaaactgaggttcatagaggaatagtgattagttcaaaatcacccgacaagtgagtggacttgacttggtcccaattctaaatgtgctatttgagatcagtggttccaacatggttacccaacaggcagcactggccttctacctgtgcctttccttgactgaatgagagtagtactgcctttggactgcagagaagactttaaaaaaaagtagcactggctggtggtaggggtgggatggggagaggagatggctggagcaaggagccaggcatttttcttatctcaacatgtgtttgcagcctcctccaaaactgcccagtggagtgttcagtctggaatttcaagattttgtgaataaatggtaagttggctccttgttctctggaagcgtatactctggatttgtcaggctccccaccccatttctggaagcaccggcattgcttctgcaggcagagttttgccctttaccctcccgtctgatgattcttggctgctgccataagcccttttttagagtgccaagacttatgtggcatgtctaactacatcatggatgtagtagctgctccttttggtacttgctctccagggattggcacgttgctttttgaccttagtttaactcagcaagaatgtattaacttactgtgggcatgatactgtgcttagaacaggaggatgaatcaagcccaggcaatcctcagcctctagtgtgcagagaagacaggcatgcaaacatgttatttgagctagaaccagtgccaggcaatagctcttaccttgtctttcttcctttaagcttaataaaaaaccccgcagagagagcagatttgaagcaactcatggtgagtctatttattccggattcttacagtacctgtttattcatttgttcttcttctctgtcagtcatctgtgcagtacttccagagcccattcattccctgcccactgtggtccagctgagcctggggctgcagaataccaaacaccagtctcctttgctctcccatcagtttaagggaaagctggggtgacccccacagcctgagtaagcatatgccagaggaaaggcctgagggggccacgggaaagaaaaggccagcccacccccttcatggggatgccgcctttccctaatactgactgcctcaccttacattcagcctccttccagagtcactctccgcctgctgtctcgtttggtggcagtggaaatagctaagtaatactgtaaatatctggacagccatagacggtgtatatagtataatatgcactaagtccatcattttctttgtcccttctaacaagcctgtgaggcatttaaggcagagttactgtctccatactgcaagagtaggctccaagaggtgacttgcccaaggcctcacagctgctgtgactggtggagcaggtctttgggcctgcagctggccccactgttgctcaggggcaggtgccaggtgctctttccaagtgcagcacaagctctagacctgaaactcttggattttccttcctggtgggttttgttttgttttttgtttctttttaacaccacgttctctcgtttccttacatgcaggttcatgcttttatcaagagatctgatgctgaggaagtggattttgcaggttggctctgctccaccatcggccttaaccagcccagcacaccaacccatgctgctggcgtctaagtgtttgggaagcagcaaagagcgagtcccctgcccggtggtttgccatgtcgcttttgggcctccttcccatgcctgtctctgttcagatgtgcatttcacctgtgacaaaggatgaagaacacagcatgtgc

SEQ ID NO: 55 - DNA, 67836 bp, Mus musculus
  source 1..67836: mol_type = genomic DNA
agtccctcactgggacgtctgtgcgcggcgtctcggagcgccggagcagcggtggccgcactttctccaagctggggctgtagctgagctgtgggtagtgcgcagggagccgtccgagcccgaggaaccggtgtgctgaggcgagagttcccggccggcgagcgcgcgcagctggttctccgcgtgggttgggcggagggtcccaggagcgcggcgttgatcgagccgccccgactctgggcagagccgagggaggaagcgagaagcggccgcgcgctccctgctgagttgcaggctctttcccggctgcaagatgcccaagaagaagccgacgcccatccagctgaacccggcccccgatggctcggcggttaacgggaccagctcggccgagtgagtaccgggagtggccgggaggccgccaccgccaggcgaggcttcgtcacgtacggcccggctggcggggggcgaggaactccggccgccgggctatcagtgactaagcactgattgggtgcctgactcacatcgaccgtgcaccctacaagtcccgatccccctctttcccaacagtgtctgtcgtccctggccaccgacatcaatcttcgcccaagaaaacgaaacctaatgcgtccccccctagctattgcctaaagggcatactctgggattctggcctgtaacaagacgcagagcaaattcaggtcgcttctcattaacctttgagacctcctcggggtctgagtgtggacttgggatgggtgagccccatttacttttggtgcctgacacctgtggggccttgtggccggttgatcgcctggccagcgggggcgtgtgttcacagatttccccatggcttttccctggttcactttggggactccctcatccgtggcctttttcttgagaagtaccttgctcgagggaggagtctctcttcatctgtccgttcatgcaacagttcatcccctcaccggttattctcccagctttgcttagttgaccgggagccggaaattgacttgaggcataagaacgatgaccagggaaacaaagccaaaggttgctcggtatctgcaggggccagtgttgcttacagacagataagagtttatttcataaggtgggtttctgagcccacctgttgggtttcttcttcatctttccctgaggtcaggagacttgagaggtatctgataaaatgaaagtagcttcaggcattctgtcctttggagattattgtaacccccctccctcctttccctagattttaataactcaggacctgttggtatggttactgtcattgatacctgcagtagtatcaatggcagggctggtagtggtggatttgtgtgagcatagccagattattaagacttgcttcaaacacatcttttctttaggtccttgacattgcccttgacgttggatttgtaacatatgtctttgagcagcataattagcatttgttcagtgtgtatgtacagcagtttaccccctgtaaaacagactgcaagtccccctcccctctttcaaggtaaggtattcttcagcaactcttttcaggacaaatatttttgtgagacaatggagtgggatgggtagggtctatatgtgtaacccagactggcatagaattagcacaagctttttttttttttttaatcatattatttttaaatttttttattattttatttatttacattccagttgttgcccccttcagtctcccctcccacagttcctcatcacattcctcctcctcgcctctgagagtgcccccccttccctggaaccttaagtctctttccaggattaagctcattctctcctcctgagaccagaccaggcagttctctgttatatatgtgccagggacctcggaccagccggtgtatgctcctggttggtggctcggtgttcgggtgctccctggggtctgggttagttgagactgcaggtcttcctatggggttgctctccccttcagcttctttaattttttgcctaattcaaccataagggttcccgacttcagtccaatggttgggtgtaaattatattatttttaatgatacatgtgtatgtttgtctgcatgggtatgtgcacatgagtgaggtgcccttggaggccagagctatcaagattccctggattcgttggagctagttgtgagccatgagtgctggaaactgaactgtagtcccctgtcacctgcagaaacagtaagggctcttaagttttcaaactgctgggccatctttccaacccttaggataagttttgttcactctagattcttgtcaaaggttagggccctatctaccttcagatctttgattttgcaagtggagatagatacctgttgtcatgctcttgttctttttgacgttgtaactgtactcctttaaaggaaaggtagctttcatgtaaagaactgactagggtgccagaggaatagctctgtaaaagcgcttgctgtgcaaacctgattatctttcagtccccaaatcctgcattggatgtagagaatcaactcctgaaagttatcctttgacctccacacaaatgttgtggaatctgcatgcccacactcacacatacaaagacagtaaatttttaaaatttttgtttgtttgtttgaggtaggggctcactaagtagccatggttgtcctgggactcactttatagaccaggctaacctctaacttgcctctgcctcccaagtgctgggattaaaggcaaatactgccactgttttagttttttgtttttgttttgtttttttttaaagaaacagaatcaggaatataagaggaaactacctctgagttgatggcagaaaattttggatgggattgtgaggttcttaacagtggtttgcttcagagattatgtgctggatcactctggatttgaagcctggctctgttacttgtagttttgtgagcctggacaagtctctgggcattggcttatttgtttatttttaacagaacaaatagtcctaataatagaactaacttacagtagttgtgattaaatgaaccttccagaacagtccacctctggtgtttgggttggatgttgagaggctggtagaccttgacaggtcatgtcctttgatggtggatgggtgtgttaagatgcctctggacaaacaaccctttagcttagttttctgtgcaatctgcatctacctccatgactcattgctgggtgacaataggagacatttctgtgtaggctgctggagacaaacagggactgttcccccttgtttcctagcactaattggggagagtggggacagtgctgtactcctcttcacagcttaccctggggcatgtttctcaagcaaagcctctcctatcttgggctgtcaacagaaagaaccctgtgcttctgatctttgtgcatacaccatggctgattcaaacatgagaaaatgtgaggtaaggaagaggaagaagaaaatacccagcaataagtgaggaattcttggtgtcaaactgtcaaggttgcttttcccctgatactttgagtgcttgctgttaacatagcacttactcattcaaggaagaagctagtaatatgggccctgcagtttatgtaagttttaggggtcctggaggaaaaatggagaagtatctttcttacttaaaacatggagtatattgccagactcctaagtattataatgaaataaattagaaataagattgcatcatcgtttgttgttttttgtttttcctggttccattgcagttataataaagtcccacctcatcatgctggggtggggaactctgagtaagctgcctgcctgtgcccctatccctgcctgtgcccctatccctgcctgtgcccctatccctgcctgtgcccctatccctgcctgtgtccccatccctgcctgtgcccccatccctgcctgtgccccattcctgcctgtgcccccatccctgcctgtgcccccatccctgcctgtgcccctatccctgcctgtgccccattcctgcctgtgccccatccctgcctgtgcccccacccctcccttctctaaccacacttcctgcagcttctttctcctgccctctttcacttcctccagagatgggcagcacgcctccttgccctttgcacatgctgtttcctttggagttattctctctcctttttcttttcctcaatagggaagatgtagttatcacctttgttcccacagaggaccagaagtatgtcccttcctcatgtctcctcatattttaaggagatgtacttaccattgtgatttttgtttttgttttgttttgttttagaactgggattgaactaagggccctgcatatacatttagatccagttccagtcttttttttttttttttttttggttttttcgagatagggtttttctgtgtatccctggctgtcctggaactcaactttgtagaccaggctggcctcgaactcagaaatccacctgcctctgcttcccgagtgctggggttaaaggcgtgcgccaccatgcccagcttataatttttttttttaaagatttatttattggttatatgtaagtacactgtagctgtcttcagacactccagaagagggagtcagatctcgttacggatggttgtgagccaccatgtggttgctgggatttgaactccggaccttcggaagagcagtcaggtgctcttacccactgagccatcttaccagccctaattttttaaacctaagaattgaaaagtcctttacacttgtcttagttagggattccattgcttgaagagacaccatgaccaaggcaactcttataaaggcaaacatttaattggggctggcttacaattttagaggtttagttcattatcatcatagcacaggaaacatggcatcctgcaggcagacatggtgctggagaaggacctgtgagtttgcatcttgattagaaggcaaccaggagagactggcattctcaggcagctaggaggaagctctcttctgcagtgggtagagcctgagcataggagacctccaaagcccagtcccacagtgacacacttcctccaacaaggtcacacctcctaacagtaccactccctatgggccgagcatattcaaaccaccacaacgccataacattaagcattgggcttcttttcttgactgaacactctgtaagcagaaactagaatagtacctgcagcatcctaggtacacagttgttgagagaaccagaatcaataagacttccttttttgttgttgttttttttttttttttgagacagggtttctctgtatagccctggctgtcctggaactcactctatagaccaggctggcctcaaactcagaaatctgcctgcctctgcctcccaagtgctgggataaaaggcttgtgccaccactggcaataagatttctaatgtaagtaggtgtgcttgagtctttaatcacagcagtggagaggcataggcaggtggatttctgtgattagaggccagcctagtctacagaatgagttctaggacagctagggccgttacacagagtaaccctacctcaaaagtccaaaataaaataaaacaaaaagcaaaacaaaatatttctaatatatttatataatgtgtttaataaatgtaataaaccttttttagacaaggactcaatgtgtagttttggctgttatggaattaacaatatagatcagctagccctaaactcaaagagatctgcctgcttttctctcttcggtgttggcattaaaagttcatgccaccatatccaacctttatttttttatatatattttctattacattttaatttatttattactgttttacatttaaaatgggaatttgaagaaaaataagaagtgcaggaatacttcatagaccactttacatgatcaaataagcaattaataccatatccttttacaaatattaactagctctagaaataagttctatgataaggcagttatgagtagacaaactattcataaaaacaaaaacaaaacggcacaatacaagtatccatgtccccatggttggtaattgcacccagctttacaactgcaggtatcagaagtactgtgatgagcagtctcagactggaggcaaccattccaaatgtgccaggtcacaatatttcatgcagttactgaaggggctgagattctgagaaacctgtgtttccacaaggcagctgtggatgttgaatgtggaagagtcagctttttagaagtatagaaaaccaatgagaactatttaagtgtttacaaaatgtggacatctattgtaaaaaaggtaaggatgtttattacagcaggtttttagagaaaaatcattgctggtgttttaaaatagtgaaaaaacaaaacttagaaaacaaatttgaaagaagattacccttaagacatttaaaatgggctcacgaatagccacacagatgtggctcatgactcaggcttctgatctctgtaggtttaaagtcagtgcttctgttcttgtagggaatggctttccttaacagtagtcacctttatttctgcatcaggctacgctctgaaatttgtctgtgattgtatatacatttttatatctaacgtgtgtgtgtgtgtgtgtgtgtgtgtgtatgcatgccacaacacaaagttgggggtcaagggacagtttttgtgagtctcctcttctaccctgtgggctccagggtataacctcaggttgctgtgcttggtgctaagtacccttacctgataatccatttttctggctctctgtattttctttttagagatttatcttgttttatttgagtacacaccagacacactagaagaggacatcggatcccattacagatggttgtgagccatgtgagccaccatgtggttgctgggaattgaactcaggacctctggaagagcagtctatgctcttagccactgagccatctctccagccctttctgtattttctttaaacaatacttttaatctttttgagaagccttgaggagaaaccttgtgttctgagtagaaattgaagcgctaaaggtcagttatctcccaggacttaactttttatttgatgacaggcaagtcccttgtattttcactttagtttccttatctgtaaagtgggatgttaatggtttaccctgaccaacctggcctgatctggtcagatctttagttttttttttccaatgtctccctcactctgggcttcagagtcctctgtgctataggttaggcacatcttcatcttagagtgactgctacttgaactttcccctccattctctaaccctttattttgcctttttgtttgtttgtttgcatggctggccactaatattgtatagcacatgtctgtctgtcctctgccctcactaaagtccagactttatcatggttgggcctttgctttgtccttacatagcttgtagaacagcatctggcacatagtaggtacctgctgttaggtacttggtggttggacagttttaatcttaattattaagctatggtggcacatgcttttaatcccagtgctatggaggcagagacgggcagatagatgacaatgaatttgaggccagcttggtcttaatagcaagctctaggcctgcttgggatgtatagtgagaccctgcctcaaaaataaggggctaaagagatagttcaataattgagagcatatgactgcctttacagaggacccacatggtggctcacagctgtctataacttcagtcccaagagatccaacatcttctggcctccatgagtactgcatgtatttgatgcacagacttacattcaggcaaaataccatacacatacacatacacatacaaataacaaataaaatgttcaaaaatattaaaaacaaagcaacaacagaaagaacttaataactgccttaggactgtattctatggtcttggcagtcctagaagatttgtaaggagcatacttacatctgttagcgtgaaggcccttcaagaaggggatatggaatagaaagacaggctatgtgcttattttgctagaaattgaatccagggccttgaccatactaagcaagagctttaccactgagctgtattctcagcctttgaggaaaattcttgctgtgtaggctggtctggaaccctcctgtctgtttcctgagtcttgctatagataggttgctaccttgtttactttatatgcttgtaccatgactacttggaggttttgagtgggttttgcattgaattttgaacttggatgcttcccttgattcattaaagcaataactaatacggttgctgtcctttagaacagctcaggagaaaagtaaggtcttctgaggtgtgtgtccttgaggagaacgtctctgctgttgtagcagacacagaagtggtaaagagactcttaagttacagcttgggatgggaatgtggttcacttggtagagagcttgcccaacattcaggattccttgggcaaacccaagcactgaatagactgggcagagtacttgaaagtaagagagttaggagctacaggtcatctgcagctgtgcagtttgaggtcagcctgggctacatgagaccctgtctgtgtagggacacaacattttactctcatgtattgatgcacctttaaaagaaagtgagagaatactaacatagagtagctgatatagcccttgcttactatataatgttctgtcagagtttcctgtttcccaagtttacctatctgtgctatactgaagttgtacctttactgccctaagtttgttctttttttttttttttttttttttttaaagatttatttatttattatatgtaagtacattgtagctgtcttcagacactccagaagagggagccagatcttgttagggatggttgtgagccaccatgtggttgctgggagttgaactctggaccttcggaagagcagtcgggtgctcttacccactgagccatctcaccagccccctaagtttgttcttaatctgtctggttgggctcatatgccctttaacatcctccttcacttttctgcaaggttttctgcaaggtagtcttttcttagtttgtggtgctgaggttcaaacctagggtcttactcagttccacttctaagctgtaccccccagctcaatgacacacaaatgcacacttatttttttttccccagttctagagatcaagtccagagccttacacatgctacatatttgctgtaccatcaacctatatctctgtctacctgcatgatttgattttgttttaaaattgctatcatatttacctgctgtaagggccaggtcagactcttgtattgatgtttccctagcatcttgttcaggacctgtgctaaataaatgaatgctacccatttttaaggttcatctgtggctgtagtctctctctctctctctctctctctctctctctctctctctctctctaccaagttttgctgtcctctaactttggtgctcacttgccttaacctcccaagggatgcaagggacgcatccaagttcacagttgtgctctgtaatgtccgcctcgattcctctcccactttgtcttgtttgcaaaaattcccaataagattacgatacccagagaacaaaatttattctgagccatccattgggtctggggtccataactgcattttgattggttctgggtttctgtaatgttctttgttagaaagagaggcttccttgatgaggatggagtgctacacttttctgtggttataaagacaagtgtttagattgtggttagggattatgctaatttagtaaagagattgtgggttctttaagattcataacttcactaggtagtttgctagatttttaataccaggttaagctgtatgtatgtgtgtgtatgtatatattttgatcttttgttctatcccctggttttgttgtcccagatctcaggagagctgtgtgctgagttcattcatgcctggatgaatggagttctgttttaaaagagcaggtgttctgagatctggtaaagggccaaatgggaaaatgctgatcctgcctcagatttctccctgtctttgtcaggggcatcctgctttgatgtcagagaggagtcagattaagtaggggatggggagctgaatgaagagtggacaagagttgtgaccccctcttcactctgagtagttgacttttcaggataatcttgatttataaacactttaaagaacctgcactcattaaattctccacttgtacataatatatgcactttagtttaataatttatttcttgcgtgtgtgtgtgtgtgtgtgtgtgtgtgtgtgagagagagagagagagagagagagagagagagagagatggggggaggggagacggagacggagaggggacgacttggcagagtgggttctctctttctaccaggtgggtgggtcctggtgatttgaattcaggtcgtcaggtttgtcatcaagtgcctttacctgctgtgccatcttgctggtccaagccagcattttttagatctttgctttgagacagggttgaaccatgtaagtaaggctgacctcaaacttgggatcctttgtttctgactcccagtagctgggattataggtgtgcacccgtgcctgctttagctagctgagattagttggtgattgctcccacttttacacatggacacactcattacacttgccacttcagttggctgaaagctgaaaagtagatgtgataaagtttggctttctatgcaaatgtgacttccttgttcatttaggtgatttccaggttgttttttttttttttttttttttttttttgtggtggttttttgagaaagggccacagtctgtagacccgagtggcctggactcattctgaagactgggctgatctctcctcacagaggttcacctacctctgcctccctcgtgctgggagtaaagatgtatgccattgcctcagtcagggtttctattgctgtgatgaaacagcatgaccaaaagcaacttggaggggaaacggtttatttaacttccacttccttactccaatcacttaaggaagtcaggactggaactcaaacagcgcgggaacctagaggtggaagctgatgcagaggccgtggaggagtgctgcttactggttgctctccatggcttgttcagcctgctttcttatagcacccaagactcccggcccaaggatggtcccatctgcaatgggttgggtcctccctcattaattaagaaaatgccacctgccaggttcatggctttaatcccaacactctggaggcagaggcagggagagggagagagagagaggagggagggagaagcagacaggcaggcaggcaggcaggcaggcaggcagacagagagaggcagaggctggtggatttctgagttcttggatctctgatttcgaggccagactaatctacaaagtgagtttcaggtcagaaaaacccagtctcaaaaaaaacaaaaacaaaaaaaaaacaaaacaaaacaaaacaaaaaaaaaaacaaagtgagaggggggaggaaggagaagaaaggcagacaaacacatgcactcaaaagaagttgacctatggagccatttcttaaggttctgctctctcagatgacttgaatttgtgtcaagtgacataaaactatgtatgcagcatagccatgatttccagagttttactatttaatgacacttcgtaaatgtttccttccttccttcctttctttttttgtttttttgttttttttgagacagggtttctctgtgtatccttgctgtcctggaacttactctgtagaccaggctggcctcgaacttagaaatccgcctgcctctgcctcccaagtgctgggattacaggtgtgcaccaccagtatattttatttttttctttttataaatttgccaaatcacaggcaataaaccctgctataaaaataggttgaacggccgggtgtggtggcacacttgggaagcagaagcaggtggatttctgagttcgaggccagcctggtctacagactgagttccaggacagccagggctacacagagaaaccctgtctcgaaaaaccaaaaaaaaaaaaaaaaaaaggttgaacgaacttataatataatatatatttcaactgtttccttgaagcttgggcaatttttttaggtaggtttttttatttgttttagttttagttttaaaatagtttcttagttgttcagaggcagtataaggactcctttaaatagccagttgctttcctttagttattcaccatactcttgaagtggaattatttactgcttttcatgttagttttgcctgcatgttctgcgctgggagctgtttgtaggttactcagatgggtgagagtttctgcctctaaggtcttcagatatgatgtggaaagagaggaggtgattgcagtagaggaaaatggctgcagagtaagagaaatatccccaaagaagaggtacaaagaaagtcctgtagcattcctcccgggaagggagactgaacctccatccgggcaatgagctgctgtcccagaggtgatgacatctgaactgggtcttgaaggatagctagtatttccatgggaatgggggaggggcgtgacaggaagctctggacgagcagttcacaccagagggaagcttgagatgtatctggaggggagaggcgatcagctctgaaaccgtcatcccagcaggtcacaggagatgaagctggagaggtaggtttgggttgtgctgttctctggctaaacagttgtgacaggtcacatgtgaaagccccctccccccaatattttttctaaaatgcgcttgattcttcgtgtgtgtgtgtgtgtgtgtgtgtgtgtgtgtgcttttaagagagagagagagagagagagagagagatatcttgccttgcagcctagacgggccaccaagggtagatcaccgtacctagccgttggagtgcttggatgccagacatgtgccacacaatgcctggcttgccctttgattttaaagtgttacaaatgatgtgattatttcactgtctccagtgtgtttattgttgtattaagaaataataattttaatttttaaccttcacaagtatgccttgagtacaggatagccactcttcattaacattagagatttgctgcctctccaaaccagctggactatgtggcttcctttttgttctccctttggcccacgtgggattaattagtttactggagagaggtatcagctgaagttaatttttctccaccactcgttctagtattttactagagcttacttattaaatattatttattcatctgtttattttcaggcttacttttacttggttttggtggcattttgatttatttcttatttctttctaaagaaatacaactcaagtaatttagatagtcttttttttttttgtcatttgtttaaattgataggttaaagaaaacttgacatttcgcagggtatcttaacaggtgcttttgtgttctggctttctctttctaatctgattaattttcttttaggtaatattcttgtgtcctgagctactatttgatgctattataattgagcactttaaaaattgtgtgtatgtttttttttaagtcagtcatgttttgagttgaatgaagtgttcatagtctatgctttgttaagtttattagctttgattgtctgtgtatgcatttctggatttattggtggtgtctgcaagatgcaactttcccttcagtagtcttggttgctctcaagggcggttcttgtgtctcaggaacacttgagtatcatgaaagaggcctccagaagatctcctgaagagaccctcgttcttttagctctccagctttgtaggagagactattagaagtagatggggccttgcggctcctcagattttagcctggtgctttcaccaaagattgaaggaacttgtacattcctactagtggaacaggagatagttggacttttatcttaccttgtggatgtattgcatgatttcagacgtacttaatggcttgaaaagttgccaagttgcccccatgttgatatttggtaactttaatattcttttaaaagtgttttaaagtctgaatcttaaaaaaaaaaagtgcctcttctatattctattcttttaggtggctgaaggaatataaaaataagaaaatgagagtgccagccctggtagtgtatgtctttaatctctgtattcagttctttctgagttcaaagccagccttgtctccctaacaagttccagaccagccagagcctggaattgtgggaccctgtctttaaagaaggaggaggaagaggaggaggaagaggaagaaggaaaggaaaaaaatgggacgggggattaagtccatccatagtgaaagagcctgagatatcagttgaggagtggagctgtggtccccttgacgtggacaccgttctggaactgacctatcagtaccttaagttactcttaaatgcattcctttttcagaaagagtgtaacaatgtgtgtaattggcctgggctccagactcaggggagttgaagggaggagcctgactaactagccttcatctggtgtcctcatcctcttgtgtaggtccagggtgagtgcattttctttttactgagttggtatagccatgttcatttaaaaattagatcatatgagatatactaggtttgattccaggaccacaaaagtaagaaacaaaataaatgaaagaccttaactgcagtgagtccagagtttaaattatttgtcatctttgcctttgtacttccctctggtaaacagtccctcaagaatgcccttgtcagatgagacttcagagagttaacaggaatgccaagctaactgaatgttcacacagaagtcctaccatagtgccaatctacctttcatccctgctttccttttgggcttatggtgttaggtagggagacaggaagagaagagctacctaacatcccagtaattactagtgtactggctagttttgtgtcaacttgacacagctggagttatcacagagaaaggagcttcagttgaggaaatgcctccatgagatccaactgtaaggcattttctcaattagtgatcaagggggaaaggccccttgtgggtgggaccatctcagggctggtagtcttggttctataagaaagcaggctgagcaagccaggtgaggcaagccagtaaagaacatccctccatggcctctgcatcagctcctgcttcctgacctgcttgagttccagtcctggcttccttggtgatgaacagcagtatggaagtgtaagccgaataaaccctttcctccccaacttgtttcttggtcatgatgtttgtgcaggaatagaaaccccgactaagacaaattggtaccagtggagtggggtattcctgtgacaacctgaccatgttttggggaggactgtggaaggactttggaactttgggcttgaagatccatccattgttaagacctctgtcggatgttgtgtaggagcttggaagataatgttgagaacactgcagaagttggagctctggtgtgtgaaatttcagagggaaaattaaagactcttttcagggccattcctgttttgattgtgaagattctgtagttctggttagctggggctgaagaatcagctgtgattaacaagataccagaactactaaagcaaaaactttgcattactgggactattgatgctggttagctggagctaagaaattagcggtgattaagaagagaccagcatcattgaggtgacatcttctgggaagtattttctgaaagcacagtggctgtgttccagatatagccaaagttgtaccttgtgctgtggctggacttggtaatgtgtaagggtcacccaggtggtactggttttgaaggcatgaaggagttgagcagagcagctgaggcttggcacagtgagaggccatggaaggccattggtgaaagtgcagcctcagttgcaattgatggcccaggactgaaggggtcatgcagtgttttggagatgccagtaccatgagatgaccaccaagagcagcagcagcagtggagtacaggcatctggagcctagaggatgactcgtgtgctacaaagggcctggctggagaagtgacccaagcccttggaggagcccagaagatcgtgagttggatcccagacattggacagttggagattgacttttgcttttgattgtgactgtgccctgatattttccctcttgaagaaagaaactgttttagtggagcccacagttaagagacttttaattgtaaaaagactttggattttaaaagagatggatattttaaagagattgaaattttaagcatatgtaaagactgtgggacttttaaagttatttagaatggggatgaataagattgtaagggttgaggcttactagtgatgtttttgtgtgtcaagttgacaaggggtcaattgtactggctagttttgtgtcaacttgacacagctggagttatcacagagaaaggagcttcagttgaggaaatgcctccatgagatccaactgtaaggcattttctcaattagtgatcaagggggaaaggccccttgtgggtgggaccatctcagggctggtagtcttggttctataagaaagcaggctgagcaagccaggtgaggcaagccagtaaagaacatccctccatggcctctgcatcagctcctgcttcctgacctgcttgagttccagtcctggcttccttggtgatgaacagcagtatggaagtgtaagccgaataaaccctttcctcaccaacttgtttcttggtcatgatgtttgtgcaggaatagaaaccccgactaagacaactaggattgcaaaaatgtgctgtatatcactcatttgtgtctactgataaaccatggtcactgagggctgccaagatgccttagcaattcaagccacctgcctgctgatgcccctgggagccacatggtggaaggtgagacctgactcttgctcagtggcacatgtgtacccacagacacataaatgtaacaaaagtaaaactaaaaaatgtagtcattgaaggcaaggaaagctgctttccccaaggacggcgaggcctacgtttcaggaaagaccgggcttcgtatcatagtatattaacatagagactttggcagattattattcttttttgtttgtttgttgttgttgtttattttttgtttttcgagataggatttctctatgcagcgctggctgtcctggaacttgctttgtagaccaggctagtctagaacttggagagccacctgcctctgtctcctgagtactgggattaaaggtatacaccaccactgctgggctattcttgtactagaacattccttctacaacagtttcttttgccttgtttgtttgtttgtttgtttccacataaagtttaattagtcaagttaatgaaaatattaaaaattttgagttagttatggcatcagaaatttaacttttgttgcaaataatacagtatttggtgtttctgtcaagatgctatgctgccgagagagcaattgcattaaatcttaactcatcagggtcacgttccatgaacttcttgcaaacttttatgacatcctctaacaacgtctcatcgctagttttcccatggttaattggaaatggtttccatccatctaattcatagagatgcccatctacatgtactaacgcaataaaatgaagatctactttttcatctatacttggtgcctcagtctgaccttcatgtgcactggtttcatgagtaactcgaatagcgtcatagttctccaggtatttggctctctcttcagggctcattgatacagactcctccaggaactttttcaatgttgaccctgattcaaagtgcaccttgtctttgttgtttgcaatggcatggattagtccaatcgttccaatcgttccacaggcattgctgatggtttgtttcataaaatatactgatgatgtcacatcttgtccttgagattttatcttttcttcctcttctgttctgaagacttcatacttttctgtgatagggaagaggagtaacactgcgcacactggtcttggtatgatgctaagaagttcagactccatcccgtacacatcaacaaactgccagttaggatgcaggcctaattgcttgagaaactggttggtgacctcagggttggcctccagtggcagccagcgttgaccctccatgactgctccgtcggcctctctccagctctgaccttgccttgtttaatattggtaactaaataactcctgggttaaccataaatggaatttgttgcatccctatttctgagtgtggtaattaaaaaaaaaaatctaagccattttcatattaaaaagccttaccatctttagcagggaaagataaggggaaagagttggaaaagtaccagaaacaagtgacaggtgttttggtgagttatgtttcagcttgctctccagtcacaggaggagtgtaaattgctggtgatcatgtgaggcagaggggatggagggtgagcggaaatcagtggttccggaggcaccgacccttccatcaccagaggcttgcccactgctggggacctgagacaactcctgggcaagttgctttcctgatagacagggctgcccatggggactaaggcttgctttagtcttcaaggtaataaaaatggatgtgtgcaagaagactagtaggatggagtccaaagactaaagaggaactggagaaacagctggcattcactgagggctttctggtctctgtagtcacggatattctacaagaacggttaccagagtccattgtaccagttggcgatgtgaagctcagggaagcttagtagtttcatagggttgtataactggtaagctgtggatctaggttagagcctaggtcaggcctcggctaacatcattccccaccccactgtgtaaaatgcaggaggattttgtagtgttgtacttttctaaactagacattacccacatatagctatttatatctaaattaactaaaattcagtacagtttaaataccagtttctcagccatactagttacctttaaaagccttattggccactgtggcaactgttttgggcagcatacatgtagactatttctgtcattgtataatgtctgtgagtactggtctagaagtcaaccatcttgtcctttagttaattcttgcccttttgctttgcaaaggacaaaatgaaggatgagaaaagaggcaactcattcaaccaaagaacacagttgatccaggctcttagcctggctgcacagtggagtctcccgtgccctctgtctttccttaaaacacaaaccgtagaatttagaagtagtgatttttttttttctgtgcctccagcttcactccgtctctctgttgctagattctttcttctgaagcttttctctcaagttcaaagggtatatccgagttggcttcccccaaggaaataaaagatgtttgttggaaaggaattccacgcttaatatatgaagcggcccttggatccctttgcttccttctttgccttccttccaggcactttgtaattgaacttgcagctgctaaccatctgtcttccaaacagttcagatgacagaggtttgtgtgcctcaaatgctcgcagctgcctgttatttgctgtccacatacatggcatttgtgtaggccagatagaattagattatgaccaaaatgacagtggatcccagcatagtgctgggattgattataggcatgtatcatcacacctcgccccagattacagtgtggttctaattcgtttgttaaagattaagatacttaatgttcattgaactgatattagatatgtatcttgtataccaggtactggtttgcaagatagactttctctctctctctctctctctctctctctctccctcccttcctccctccctccctctctcccttccttcctttttaaagatttatttatttattatacataagtacactgtagctgtcttcagactctccagaagagggcatcagatcttgttacagatggttgtgagccaccatgtggttgctgggaattgaactcaggacttcagaagagcagttggtactcttaaccactgagccatctctccagcctaagactttctttctttattgaggcagaatttactatgaagctttgattggcttgtctctttctcctaagtgttgggactcatagcatgtctcaacatgtctgatcctaaatggaatttaggtgaaaactgaaaaatggggctagatgtagtggtgcatgcttttaagttcagcccttgggaagcagaggcaggttggtctctgtaatttcaaggccagactgatctaagtatcatactataggctagtgaaggttacatagtgagacgctgtctgacttaccaaaaaaaaaaaaagaaatctgaaaattgcatttaaatcttatctgaattatgttactagtatttgctatctatgcatctgcctatttagtctttgaattcagtaaaggcttcttttagatcttagctctgaagtaaattgaagaatcatgtataaatgtcccttgagtcaagctattaaagacatttaaattatactctccagtgtctaaatggcagtctgaagtgtatgtgtgtgcctgtgggggatgggcatgtgggagtagaaaggaggcattgtactgagataatatttttaggacgccagtgtaattagcagacttggggtttagaaaattgccctttagaagctgagaaattaaagttttgggtttcttcttaaataaatgttaaagctccatgcctgaatatgttcggagcgattaaagtggagacactggaataatggaaagtatccagaaaagtctcctcccggagtacaaagacaggaagagaaaggactttagtgatgatgggaacagccggccgggatctcttggagctttgacagctgatgatgtgggtaggagcagagtatccagaggagcactgttctgggtctggtctgtctaatttctagaaagttgagatgggctgagaatttttgttagcgggcccagctccatagctacaggatggcctcaggagagagccgtgctctcctcggtggtgcccctgtgggtgcaggctgttcagtgcaaagtccagcatcctaaaggagtaggaatgaattgtctcttctgtggcccatctgaattcagaggggtctaaaagtctttagcttaagccttaatgctttggaatggaggtgctatgtgtgaagcgtgtgctttgagctccttccctggtatagctgttagctcgacatttgaccatcttttgcccaggctgcttctctgtggcgtggtggtgatggtaatcgctctgtctcttagggtgtagatcagatgaggtaccattcagcatactttccagttctaagtaggtagatttaattttattcttggaaggaaccctggagatgtccttttgtggtcctgtcgtttggcagagaaagaatctgggtctagaaagaagggttagaagaagttggcatgcacacagcagttctgttttgaatcttgtgttctgagtggcacagcctctgctggtgctgcacaacagaaaggtttggctccagccaacttaaatctgaattgtgattctgcttcttacttaccatgtggccttatgtgtatgctcttacatccttgagtctgtttccacatctgtaagatgagcgtgaaaacatttttccagcaaaaaggatttctagactgtggtgtaaacagtgttctgtgattaacaggactgatggtaatgggcagggctcgaccccaggccagggacttcactctctctctcaggtgagctgagacaacgttcttagtttcctgagagcctccgatgctggaactcttcagctgctctttagccacacagactcaggatagagacaacaccggacatacttggaattttttgtgatgtgcaggaagcaaaagaattattttcagtgaaacaggagtctgcaaaaggcgcctaggaaacaactgcctagtgcatcctaatatagactcctctcggccttgttagctggccatctgcctgtccaacaccaccaggaagctcagcttttttctccacagtgtaaggaggatttcctgggctttgcatgcatgtgtgccctagtggagagtcccagtgaggaaggacagtctctggcatttgtgacagaagacagatgttggggatcatctaaacatctttccctggccccttactcatactgtcttactggggagtctctttgacatcctcagtaagtatagaaacccacatgtatgtcataataaactataagccatctcttggctaaatccatcacagacctttcctgcactcctgtctaggcagtggtcacctactctgtgcatactcatcacagttcagaccacactgttgcctctgacatggggaagtctgggctggatgattctttttttttttttttttttttttaaaattgtgtgtatgatatgtgtgaatgtgggcttccatatcacagtctgtgttggaggtcggaggacagtttttgggagtctattctgtataccagcaggctagctgaccagtgaatttctgggattttttttttttttttttgtctctgcctccgatctcatagtaggagtgctgagattacagatacaaactattgtgtacacctttttgtgggttctgaggcctgaactcaggttattaacttgcacgataagtgcttttacccactgagccatctcactggctctagatcatcagcttaaaaacaaaaacaaattatatttatttgtgcatgtgtatgtacatgtatgtgcatatgtacagttgcatgttacccacagtgtgtatataggtcagaggacagttctttccctccaccatctagattccaaggatggaactcagatggatagacttcgcagcaagcacctttacctgctgagctagggcaggcctgtcttctttgcccccagtgcataacacatttcctattgtttgtgtccgtttccttcactgtaacaattctgaggaaatcagctcatagagaaaaaaggagagcgggtcttcaggagtcagaagagctgagagattgaggtcagcctgggctgacccctcctcctacaacaggagaaaagagggaaaaggaagcagggagaggagagaggagagaaggatggagagaggcttacgtgttgaggttccagtccattgattgctgctgttattttgggccttggggagacagtacatggagatggtggcacatgacagagtaaaattgttctcttcgttaccaaaaatacaaaagagaaaaggtgacatgggtttgtacctagctgtccaccccaccccactcccatctcctgccagtagtatcacagggtgaggctacacctttcacacttgggcctttgggactgacgtccctgggatctgatttggaagttgtgctgatgtaggagcagctctgttagcttctgtggtgtttaactttgactttagcacttggttattttggcttatatagcatttgtgctgttaggctcagtgtgcttgctcttgttgtcatatttgtttattcccttgtggaatcctatggcgtgctggtgctgtttctacttgatggacaggaaagcaggtttgtttttttgtttttaattgaattatttatttacttatttaatgtgtgtgagtacactgtagctatcttcagacacaccagaaaggggcattgttccccattacagatggttgtgagacaccatgtggttgctgggaattgaactcaggacctctagaagagcagttcagtattcttaatcactgagccatctctccagcccggggaagcagtttttgttacaggacttatgcatgtcatacaggccactgaaagggcctgcagttctctttgctgctctacagcagacagctccttcccagcccagagggggaaacatttaacaagcatgtactggtatggacatctacactattttatgctgtgtcctcagccctgtgcctggcatggagggaggctcagggaaagcctggaaggcttggatggattggctagcctttttataattccatgctttctgcttatccctagcaacctgtaaatgctgggttcatgatggatatgtgacattggtggctgaatttacacagcacctggtggcttttcacactccccctcatgcctctctggagactagaatgggacagatggccacagacaaagtattctcagctctgcaccctctcttcaaatcacagctgagggaaagttaagtttttgcaacaacacagttttggtaatgtgatttcaggctgctagtaagttgcttaactctctggatagatcacacctcagcaacattcatttagtaccagcttgatttcatttaggtggctgtagttctacccaccaagcctcctaccccttaataaactgagactgataaggttaactctctgagccaggcagattctgggtccagaattcaatgaatcatctttttctcattaacacctttaatttcttctccactgagtatagatgtctgctttaaaatgttaggggtggaaacactcatgctggtttagcttccttcctgtgtatggacttgaagagactgaggccagagagactgagcagcttacctgggagtgggatttagtgaaaatctcaaagagacccagggctcctggtttctctgagagcagggctcctgatttcttttggggcccactgcctgcccttcacttctgtcttaagaaagagaaagttctatgatctatttaattaagaaatgaataaaggtagatttttgttcatactagaggccccagcctagatttagatctagagttcttgatttaaaaaactttcttttaaaccaggtgatggtggctcttaagcctttaatcccagcacacaggaagcagagggaggcgaatctctctgagttggaggccagcctggtctacagagccagttctaggacagtcagggctacacagagaaaccctgtctcgaaaacaaaaaaaaatgaacaagacccccccccccacttccctctcccccccaaaaaaaaaaccaaaacaacaataacaaatcaaactttctttaccagacttggtggggcacactcttattatctcagcagtcaggaagttgaggcagacaggttgagagttgtaggctagcctggtctacatagcaagccctgtctcagaaacaaaataacactaccctaaataattgtgttgcttgggctggttttctttcctagtcatcatttttctcttgcggcagttcaaaatttataaggcctgaaagagttaatactcctctcagaatagccaggcgtgcgtctcccaggaagtagcagagaggcaggatgtggcaaaccagtgggtgaatgagagccctgctccttggaagaaaaggaagtgggagcggcgagaggcgagacacaggaagattgcagaggacaggtctttcttttcacctctgcgctagatgtggttctcctgaagctaagcagacccacaatagccacggcccgagaatgcaagtcgtgctgaatttggagttgcccattcttcgcacaactactatctcaagtttaacgtgtggtggactgtccctgttccgtcttttgctttgtaacttcagtcactggtgcattctcatctccctattgctcttttttgtttgttcctttgcttgctttttgtttttctttttttttaaaaaaatatttagttagttagtttatgtatgtgagtacactgtagctgtacagatggttctgagccttcatgtggttgttggaaattgaattttaggacctctgttcgctccagcccaaagatttattattatacataaggacactgtaactgtcttctgacacacaagaagagggcgtcagatctcattacaggtggtaattacagctaccatgtggttgctgggatttgaagtcaggatcttcagaagagcagtcactgagccatctcactagcctgctttttgtttttcgagagaaggtttctctgtgtagccttagctgtcctggaatgaagtctgtagatcaggctggccttgaactcacgtagatccacctgcctctgactcctgaatgctgggactataaggcctgtgctaccatgctgagctaggtctgtcttttaattacctctgagaatctacactggttgtaatttggaatctaagaagttagacatgccgggcggtggtggcgcacgcctttaatcccagcacttgggaggcagaggcaggcagatttctgagttcgaggccagcctggtctacagagtgagttctagacaagtgtacagcttctggaaagtcacctctccaatgcatttacctttattaattcagaacacattcctacccattctctgtaaatggccatatagcagtccccattccacagggcaagattgttctcctgcttactgtcagagagcttttgttcctaaccagatgtccagatgccagcagagtcagtctttaccttctttggcttcctctttcatcttttgcttaagacctttgttgcaaattcctggcctgccttgttagacccgtagtgtgactgatactctacttgtaagcttgcagatcttagaagtagatagtcctgatagtagattcagaatcctcttgtccctatggtaactttggagactatacagatttgggcagcacttgactggttaagggcacagtctttttcaagactgatcttattttagacactggctggaagcttgggagttcccaggctacttgtacttcagatgaagtgactacaaattcagggttctctttaccttctcaggtttcagaatttgctagagtaattatagaatgtagaaagttactgattgctgtcctaattacaaatttattgcataaaaattataataatcaagttaaccaaaggaagagacacaaagttaggcctgcagaaaggtcaactgctagtgtcctctgcttgtgtccacagggcacatctctctttggcacactgatgtacaatatgcacagattattgtttaccaggaaagttcatctgagtcttagtgtctggagctccttgcagggttagcttcatcactggtgctgtgatcaaattcagtctccatcctcctgcattctctgcaagttttgttgatagcacttatttaagagcccagtttactagctgaatgtttggcctttctgctgtggccaacccttctcccttgttcagtagactgcctagggacccaccctgagtcacctcagcataaatcaataggctatactgtgaagaacaggcacacctgttactcagggattgcatgggtttatataggctgcctcccacagagggcagagtccagccaagttgctcactatacaacaacccccttccacaaagctatctcctcctcattgccagaaatctagtgtcactgttaccctttctttctttcctgtccaggtggtcacacagttgtgccagctgacttcagtctgtcccatatcatcgtcattgttcactgggtactgtgctctttgctttctccctgtgtccgaggtcactgctctgtaactctatgctgggtcctactgggcctggctcttaatacaaaattcactttattttcttacttcagaatttgcttttataccagcactctggaggctgaggcagaaggattgccatgagtttgaggctagcatggactacatagtaaattttaagccagcctaggttatagagtgagattgtattgcaaacaaaacaaaagaagcaaaaacaaacaaaaaatcagaaaaacccacccgaaataaaaaagtttgttattgaagaataaagtatatattataaccccatgtatataaaatacactacagtcaggtatggtgcacatctctaattccaatacttggtaggtgaatgccagatgatcgaagagttcaagatcctttctgtgttgataggatcctgtaactttaattttttcaaacgcctatttttgattatggttcttaaatgctttaacctccttgtaacccaccagaagtagtggaaaagaagggatacggggaagtggacctgtttagaaaggttcttttggagcaactcttatctgtgttgtcctgaaatcagcagttcagttcacaggttagcaggcagtggcagctcaatccacttgcaaacacttcacatcagcagtccagctgggtagagtcaggatagcaaacacgaatcagcagcagtgccatgacctaacaaagacaaccaggcctcagcccacgctccagtcagcaggagggaccaacaggaacatcaggagatcagtgaagatcagcgaagacgaagatgggagacctacaagcactgaatggctagctttataagcaggccttagctcagcctccatcactgtcctttttatactctctccaaacatcatgtgtcctccacgggtcttgccttagcaagacaaaactctgccaatcagcccaagtcctcagaagctgcaaaaaagccatggcacagcaccagaagttttttggtgcatttctctctatagagtcccaactaatgcagttcaactatgcagtgtaaagcaggccagtacatggtgtcattagcagagactcttccgtcatgtgtcctttctcgtccttgctttatcagaacatcctctctcctgtgtttgcttcagagaaaccttccttctcgagtttattgtagtctttcacctgtgtccacttcagctaaatgttctttcacatgtttgccccagcaaagcaccatcgagctgactttccaaagaacctttaagttttctttcacctctgagctataccggagctcagctaaaatgaggcttgtttgtttttggttttctttgctagtttgatttctttttttttttttttttttttttttttttggtttttcaagacagggtttctctgtgtagctctggctgtcctggaactcactttgtagaccaggctggcctcgaactcagaaatccgcctgcctctgcctcccaaatgctgggattaaaggcgtgcaccaccacgcccggctttgatttcttttttttctttgtttgagacagggtctctccacataactctggctgtcctggaagtcactgtttagaccaggttgacctcaaattcagagactgtctgcttctacctcccaagtgctgaggttaaaggcatatgctaccatatgcagcttgccagtttgattttaataactaagtttttctgggtcccaagtgttacttcttccaggtaggttttactctgttaggctggctgctgttagcttggaggcctgacatagttttccacccatagttgaagaactccagtatctaagcaatcacatttggactgctggtcctaatagtgagtgagctgatggagactttgtcagaggtgatttgtccttcgggtgagacctgtgactctttctatgtgcgctttaggatgggttcttagtaataaacatgcccctgtgtgtaagggagaacacagagagaactgaaggctgctcaaagtggaccgcaattggacacgcatcttagttttacttaattttggcttttaatattatatttgtgtatgtgtgtggatatgtgtgcgagtgcatgtgtctgtctggttttttttgtttttgtttttgttttttttggggttttcgagacagggtttctctgtatagtcctggctgtcctggaactcactttgtagaccaggctggccttgaactcagaaattcgcctgcctctgcctccccagtgctgggattaaaggtgtacaccaccacgcccggctagtctgtctgtctttgtgaggtgtgcaatgagatacaggtgtccataaaggctagaagaggatgtgggatcccttggagctggattacagacaggagctacccaagggggttctgggaactgaactcaagtcctccagaagagcagcaagtgctcttaaatgctgagccttttcttcagccctgttttttgttattttttgtttgctttgctttgcttcgctttgttttgctttgttgggagacagtgtctctcatagcccaggctggtcttgaactgtctgtgaagtcaaggacaacctttaacacctgctcctcctgtctccaggtacttgacccaagacttcatgcttgctaagcaagcactttaccaactcagcacattccatcctagagacagattgtgcctagagatagatgtgtttcttgtctcctcagtctgcttctgagctcaggtgtattagaccttttgtcttagttaggattttactgctgtgaacagacaccatgaccaaggcaactcttataaggacaacatttaattggggctggcttacaggcaagaggttcagtctataatcatcaaggtgggagcatggcagcatctaggcaggcatggtacaggcagagctgagagttctacatcttcatctgaagactgctagtgaaagactggctttccaggcatctaggctgatggtcttaaagctcataccctcagtgacacacttactccaacaaggctacccttcctaatagtgccactccctgggccgagcatatagaaaccatcacacctttctccttgggaacttgactgcctgctgctgtatcatgcagtctaggattgtggtcacaatgtgttttcaccttctccctaattgaacagctgtgtgtgccaggagtggtggcgtactgcatgaattctaggcaaacatgggctacatagaaaagccttcccctccttccccccacaccccccaaaacaaacaaacaaacaaacccaaaactgggggctggacagatggctcagcagttttagcacactggcagcttgattcccagcaccaacatggctgcacacaccatctgtaaccctaaccctgaggaagaggatgtgttcatctgggttccaactgggctgtaattaggctctttttgcttttaccgtcctgggccctcctgactacccttctagcctgtgtggcttccactatttttatgcttctgcttttcccagtgagcttgtctcggccatgctcttcctcttccccacatccctcagagtatgtcagcctgggagttcctcctcacagcttacaaaacctttatccctttcccctgggaataagtcactataatagcaaagtacctggtatcagggatgaaccaggggtgttttgtttgaaagataggaattttttcttcatcactgtttgaagggagagtcaaagtctgaccttccagactcctaccatggaagagttctgtacttgtccctggtctcaagtaaattaacatgcatgccatgctctagtatttgagacacccatctttgcatctaaattctactttttatcagattattgttggtctttttgccgttcatttgttgatgtttcccctctccccaaacttttaattccttcctgtgctgtgtagaagagtgaccattcaggagttatttcattgctgttactgttgtccacccaggtagagttagaagtgctcttactgcattcaagcagcagcacgacaccaccctctgattcaggatgttgttcagtattgggatcagcctgtgtatggagtgggtggttccatcactccagcgtgcgtgtgtgtgtgtgtgtgtgtgtgtgtgtgccttagtgtgactgtctgaaaaaacactgtgggaaggtatttttttttttttttttttttttggtttttcgagacagggtttctctgtgtagccctggctgtcctggaactcactttgtagaccaggctgtcctggaactcactttgtagaccaggcctgcctcagcctcagcctcccaagtgctgggattaaaggcgtgcgcctttttgtcatctttgtttaggaggataggaatatgagtcttagtgatttctttttaattaaatctatttccttggtttttgtaaaggtttgtttattgacttggaagctatctgcaaaggaagataaacatttgttctaagtgacatttttttcttttctttttcctttaggtttttcatgatagggtttctttgtatagcccaggctgatgttgaactcacagggtcacctgcctctgtctgtcaagtgctgggactaaaggcgtgcgctagcaatacttggctgacattttttcttttaagcaatacttttttcatatatctatctcacaatatctttttttataaacaaggtctcatttgcaccctggctggctggctttgtagactagccgaccttaaccccacagagctgcatgctgagtactaggataaagacacaggtcacctttcccagctcattaagtctatgtcattgtctgcagaataatttatgctagtaagtcagtcccctttcctttctttttcctcccttttttctctctgagtctgggttgtactctgtagcctaggctagcttgaaattcttgagagtcattgacctttgcctcctaggattgtagtgtaaggcaccacacccggcagcccattcttttccttacctgtttatcttcttagccctgttccttagttcagtacaaatctctaatctctacaagactagtagatcttggttacaaaaaaccatttctgacttaggccttctctgagcattagaggaacctttgggcactagacatgtacatggtgtacatgcatacatccaggcaaaacattcatacatccaaataaaatatttaaatttaaaaaactctttggggcaggcataaaaagtcagaaaaggacttacaggtggctgtgagacaaactccagccctctgtgagagcagagagtgcctataaccggtgagccacctctccggtgttctttttttattttttcaagacaaggtttctctgtatagccctggctgtcctggaactcactctgtagaccaggctggcctcgaactcagaaatccgcctgcctctgcctcccaaatgctgggtttaaaggcgtggactaccacgcccatgcctctgccctctctttagtgtactctcttagcaagacagagcctgccacctatcaagctggctgtgctggcgtgcacctatgatttgtgtctggaagcttgaggacgacatagttcttttgtctaggcaatgtataactccacgtcctataatccttaaaccagcttctaagttcagtagctatcgagagaagtgtgagagatcttgaaagttgtgttcctgacatggtcatgcccgtctgtaattccagcactagggaggttaaccccagcacttgggatgagtttcaggacagcctggtctgtataatgagttccaggagttcagaactgctagggttacaagtgagatcctgttttgggtgggcgggtctttaaaaagaagaaaagagttctgggagctgggagacctgccaccttgtcctctctaagcctcactttcctgttctgtacaatgaggattgaatccatttgatgtccttgaggtctctcttttactgcttaatttaaactgttaagccacaagacccccagtatggcagtgtaattataattaggcttagcaggtcctggagggagagggaagagccagcggtcttacccagagtatcattctttcatggtgctactgatgtttccagactccaagtgacaacccttgtttttctgtgcattgccatttcaagcccataatcttcttgtatctccttgaacttgtgtttactgttagacagccatggtgcagaattcacatttcactgtgctgtttttgtacttgagggagtttgagtggatcacagctggtctctggagagaaggagggctctgtgtgtgtgtgtgtgtgtgtgtgtgtgtgtgtgtgtgtgtgtgggaaagggagagggagggagggagggagggagagagaaagagagagacagagacagagactgagacagactgagacagactgttggagctctagttttgttttttaatttccagtgtcatttttggtgactttagttaaaaataatggtttcaaaagaggcaggtttttgtcctctgagctttgtggatttgtggtgtggatcagcagtaaggacctctcttcttgtttcctttgcttgaagcatttcaccttgagagggaaaaacaagacttgtggctggcttctcagtacaagatgaggtgaccctgaatagcaacaccttattgattggtttctttccagtgaacagtagaagctgagctgctgccatgatcttcactttacctcagatctactagtttgcctttcattctctggaaagacttaaaaatgttgaaagtgctataagaattcttaaaggaaagaaggaaggcaaggcacaggtcttgctggtgctgccttggcttctgctcccatgctcctgcatggactgccttaccattatgtagaatgggttagcatttcaggacttctcatgagcttgtgtgtgactctgccttcttgaagcgaagcatgaaactattacaatgtatagaagagaaatctgaaacctggcaaggaaaggtggtttgtgcagagtcccacttgttaatcaagttagtggatcattaagttaaggccactgattcactcttccacccccaggggcctccggtgtgtctgaccatcacagcacacagcctgtcccgcgggtctggtgggactaggactctggaaagcacacctcagcagtcatttccttaggtggtgaggaagggattagaccctggacatggaagtcagaaaggagagaaggaaggaaggaatccatggacctggtctcttttggaaaatgccaaattaacttgtgactactctgctcccctcccatctcttttcttcccccagtggaactcactctgttgaactcagagagtcacctgcttctgcttcctgaatgctaggattaaaggtgtgtgccaccccactccagcatctcctcccttttaaatccattctggaagtagaactcaggcccctatcttgtgtgccaagtgtttttactcactgagccatctctctggccctcttctttttctgatagagtatcactgtgtagcccaggctagcctgagacttgtgataatccttttgcctctgtctccctagtgctgggattataggcatctgtcatcagagttgtagtttgtttctgtagagctaggcaagtgatgagtcagcatcccctttcaaaccttggggagcaagtttttactggcatgaactcacagagaggcagagttgctcctcttttattgaagaaggttagataggttgttgtgcaggggggatgaacttgtgtctgagacaaagttgcctcctttgaaatatggaatatttggagtaggtatgatgttaaggtttgagtcttggctttgctgttcactcagctgtgtggccttggctcatttactcctcccgcccattcttgagtttgctctagtgatttgtttgatcagttccagttcatagatggaatgcacatagcagtgctagggaaagagtgtgttctctctttagacattctcctcctagctgtgctcatgaatggtgtgtgcacgctcatgtgtgtgtgtgtgcacgcgcgcgtgtgtgttttggggatttcggttctatgagataaggtcttatatgtagtccagactggcctggatctcaggatccttctgcctgatactgggattatagtatccctataatcccagtcatcccatagtaccctgtcatttatgtggtgatccaaactcatggctttgtttgttaggaaatcactactacctgggctacatccttagtcctagtctatttatttttgacagcagcttttggattctgaatttatatgcctccctaagacttccaggcagctgtaatgtcacctaagtttggggggaagtatctgtctgtctgcatttgacatgcgtttctaaatatggctatggatccttttgtgaagagactagagagggaggaagggcatgtgcatccctaacctgttacacagtcttacatgttagggtctcataaccgagggacgagggcactgtgaaatttaactaaatattttagcagaataagaatatcaactagctgcctcgggctcttcatctaccttaacaaaaggctgttgggtggtttaagtagaaatgtattttatcatacttgttgaggttgggtgttacaagattaggctgtcaacacaatatggttctagggaaggcccttcctggtttgacaatagctgccttttctttgtgtggtctttcactgtgtgtactgggagcaagagggccactaagcctacttgactagtatccaacctgtatgacctcctttagtcttaattcccttcggaaagacctgtttcacacacatccgtatgtgactatggaagggtgtgcactgtttagaccatggcaccatcctttccccatagttactcaatgaggtgtgccagtgacatcatcttgtggcttctcctgcagtgttggaccagcctgtattctggagccatgagatctctgtttctttcttcttggcctttggagaggatgccaaagaatagaggattatacttctactttgactggcatatctgggggacaccagcactctgatgtgtaacaagtcctgttttgtcacttgtttagactggagagtgacatcagatgaaacacagtggatgccctctttacaattcataagattaagcaacaggcttcactgaaccttcttcagtctctgtatgaaacactgtgatgtccgtggcatgccatgtgttcagctggtggctgcttcctgccatgctcacttggtttctgcgagatagctggctcccaagcccgtctctgcagcttttggcttggcagctcagttgtttacatcagatcgactgatgtaaatcagatgcagtgcccctcaagtgaagtgctttcctatttgtctgtctttgaagactaggtaaaactgatgagatagtaaggccacgatgctgtcacattagaggagcagtaagactgggggaatgaggaagttttgaatttgtagactagacatgtgtttacattttcattttatctctcagaattaggacttggaaatcatacatgatatttggcattctgggttcatatagacctttaatctcagttctctgagttcatggctagcctggtctacatagcaaattccaggatagccaaggcaacaaagagagaccctgggctttttttttgttgttgttgttttttggtttggtttgtttgttttttaaagatctggagccagatccttactcagagggccttactttgcattaaagaatgagttggggcccagtaaatggctcagtggggaacagcatttaccatataaacctgaggactgagcttgggtccccaagaacccacgtaaagctggattcattagtacatgtccgtgatcccagggcttctacagtcgggtgaggaggggaagcaggaggctctctggaagcttgtgggccagctagtctgtctgtcctgtgcagctggagagtgagtgactctgccttgaacaaggtagaaagtgagagccagcacctcaggttgtcttctgacctcctccacagacgtcctgcactcatgcagacagacacacgtgaagaccgagtaaaggagtgtgctatacaaaagtaacagacttaggtgtgtcttttatggattgtgatccaacttttctgattgccctgcttcctagaccatatactagaacagaagaaaccgggcgtggtggtgcaggactttaatcccagcacttgggaggcagaggcagaggcaggcggatttctgagttcaaggccagcctggtctacaaagcgagttccaggacagccagggctatacagagaaaccctgtcttgaaaaactcaaaaaaaaaaaaaaaaaaaaaaaaaagaacagaaggtttccactgctctgttccaattaaaagtgggtttggttacagttgagaaggtttagtgaattttattttgtgtattgtgtaaatgtaattaaaattcattgttttatttctgaggtagggcttgttatatagccgcctaaaccagcctaaagctcacagtcatcttgcctcggcttcctgagtgctgagattataggtagtcaccacacctgtctctagtgagggtttaaaaagtgacatgtatttctgtgtgtctgagtttgagtgtgtgtacatgaggacggctccagaggcgttgggtcctttggagctggagtcacgggtggttgtaaactgcctgacatgggtgtggggagcacccatgttctctagaagagcagcagcaagtgcttttaatgtcagagccatctcttaggtgcttgttttcactcttactagattccttggttcctcttgtagacctttaatatgttgagagaaatccaggaccctcattgttcaatgctgcgttgtgagataaagcagggttgaaggtgaggccctagggatgactgaaatgagcagagccctggcgagttgaactctttctttcgggcgttaccttccttgagtcccctgtgggcttggcccaggagtgcacggctgcagggcaggcggggcagagcgagcgtctctgtgctgcgccagtgctgacctgggcctcctcggggcaggaccaacctggaggccttgcagaagaagctggaggagctggagcttgacgagcagcagcggaagcggctcgaggcctttctgacgcagaagcagaaggtgggggaactgaaggatgatgactttgagaagatcagcgaactgggagctggcaacggtggagtggtcttcaaggtctcccacaagccatctggcctggttatggctagaaaggtgagcttatctgggtaaacagctaattatcaattaggagcctgaatgggtaaaagaaagggtttgtttgtttgtttgtttgtttgttttcgagacagggtttctctgtatagccctggctgtcctggaactcactctgtagaccaggctggcctcgaactcagaaatccacctgcctctgcctcctgagtgctgggattaagggcgtgcgccacgaccgcctggcaaaaggaggtttttacttaggactttttttgtgcagttagattgaaaaccatacatttgtcaagtgcagaaaggagctgcttttttacacccagttctagtgactgatgctcaggccaaagctgagtttcatggcttcagtcttgacccaatccctttcctgttcaccacgtcataacacgtgccctgtatagagagactatgttctaccatgtttttcagctcacccggctctttcttctctccatgtttgtattgtgccgttccttctagctttcccagtggcatccattttggggacttacctcttgtttatttcctgtcagctgttacaactcatcaattgtcatatgtcatacttattgtctgtggcgtgaccttattaaataacattaaatgtgtctgtcacttgtcttctggttagaacaaggggcaatattgaaacatattaggcaacagctgacattttggctaaatcaatcctatcaggttcctgaagtcaaggaggagcccgtggggtgattagggttaccctacgtcaattctgcatgcctttatacaccacagccctactgaaccgtgtccagaaggccgcatttccctcatctctagaaacttggctttaaaaatggctttagtgggtaaaagtatgtaagtatgctatactactgtgagtactcgagtttacatcaccagatcctacataatagcttgatttgtagtatgagtatccgggatcccagcgttttcatagtgtcgtgggaacttgtgcccacctagcctggcatatgccacaggaaaacagtccaggggctggagagaaggatcagcggttaaaagcagttattgctcttgcagaggacctgggttggttatagtacccacatggctgcttaaaaccatgcttactgcagttctgcacacacatgatgcacatacatatactcaagcatacacatatacaggtgaaggtgaggacagacacctgaggttgtcacctgacctccacatgtgcactattacatgagagtacctttattcacacacgtgcttacacacacatacttagactttacacacccacacaaaggtaaattaataattataatttttaaaatttatttttccaagtgtaggggttcatggctgtagtaagtgtttgaaagaatgatgcagtaagattgtgagttccctgactgagctacaaagtgagctaacctgggcaatatggtgagttcctttttcaaaatcatagagagctggaatgtagcttggtggtagagtacttgtatagcgtgctcaaggttctgtgttcagtcatcagcaccttaagcaaagccaaaaagctgtttctcttcttaccttcagaaacttaaatcttgaagaaagacattcttctttactccacttcttaaaagctttcccctcccgtcttcccttcagctgatccacctggagatcaaacccgcaatccggaaccagatcatccgggagctgcaggtactgcacgagtgcaactccccgtacatcgtgggcttctacggggccttctacagcgacggcgagatcagcatctgcatggagcacatggtgagcagctggctgtcagtctttgcagtggcctgggaacaggctggctctggcctcattgttggtttggatggcgaccagctcttccctgcctccccattccacaccctagaggcctaggagacccgggggcctgactggagtctggtatagtcacaggatgacagcattgcttctcttcaaagagaggtgttagatgccaggaattctcagtgggcttttctccagtatatttcctaattttctcctattttgatagccataagattttgatgtagttcaaatctggctaatacagtataagtccagtctatgtctctgccttcagaaggtttatgatatactttaagggcagccttgggattttttttggaggagctgacgagagcacccccccccccccccacacacacacactagtgaaaggtaagagcaagtcagggagtgggtgtttatgggccagttacatgtgtgggagctagtctgcaggcccttccttttcttcccagtgatggtgaccataaaaaggctcatgcttattgggcatatatatagtaatcaagtgtcatcctaaacagcccagaagatttcctgtgcttcccaaagacatggctgcactcttgttggagtgaaaaggggcaagaaccttctctataacctttagacatgtagaagtggttccaggatccaagttctaaatgacaccatgactaatgcctgcaacagcatatatggcccttcctgatcatagaaggaatattcaaggccagcctggtctacagagtgagttccaggacagccaaggctacacagagaaaccctgtctcaaaaacaacacccccccccccaaaaaaaggatttatttatttatttaatgtatatgagtacactgtagctgttttcagacacaccagaagaaggcatcagatcctgttatagatggttatgagccaccatgtggttgctaggaattggactcaggacctctggaagggcagtcagtgcttttaaccactgagccatatctccagccccttgctgctacttcttaactgtaactttgcatgcagttagtaagtcctatttagtccaatgcctgtacttggttgacttcactacatagagatgtgggactgggctttttctatcctttaagcttaggattgccagctttgtagctgatagaatggcataggaatgttgggaatcagttgtttatgtctttttccttacataaatataaataaggatattgtcatgtttgtcaccatgttgtgttcctgtcatcctctcttgtatctaggatcttgtgcatagtaggtaaatacttaactcctaagctgtgtcccagctccaccactgtcttgaaagttcacattattcctgacaccctgctacagagcaggcactcagtaagtctgtgtttacttaaaaccattgtcttagttaggcgtcaattgctatgagaaatatgataaataccacaaccaaaagcaactgggggagaaaagagtttatttcaacgtataactcccagggcacactccattattttttttttttttttttttggtttttcgagacagggtttctctgtatagccccggctgtcctggaactcactttgtagaccaggctggcctcgaactcagagatccacctgcctctgcctcccgagtgctgggattaaaggcgtgtgccaccacgcccggctggcacactccattattgagagaagtcagggagctaatgcagagtccatggatgaatgctgcttactggctggctcctcatggcttcttcagcctgctttcttgtagcacctaggaccaccagccaagaggtaacatcacccacaatagtctggtcccttccacatttgtcattcaaggaaatgcactacaggcttgcccataggccagtctggtgggggtatttttaattaaggttccttcttctaaaatgactctagcttgtgtcaacctgacataaaactagccagtgcactatttaactgtgaccttgagtagacgtcctcatcgctcagattctcatttcttacaaatgagtcttctcatttgtaaggtggtcatgattctatctgttttgttgctgtgcaggttagaatgacaaacatcagtcagtatgccctccaattcagagtatgcattctgcaagtgctagttcctgctttatttccatggggctggcagttcagagtcaggggagtctacaaacttgatgtctcttatgctttcagcctgccacagtggctgatgtctcctgtacccatttcctttgacctctacacctaggctgacgttcagaatggtgcctggtctgaatggatgtcccctcctctacctaaggagtctgtgctggttgccccctgcccctcaccctaacacatataccatcattttgaatatttgttctatgatcaggaagggccatatatgctgttgcaggcatcagtcatggtgtcatttaaaacttggatcctggaaccaacttctgcatgtctaaaggttatagagaaggttcttgccccttttcactccaacaagagtgcagccatgtctttgggaagcacaggaaatcttctgggctggctgcagtccctgacctggggtgcaaattcttacttgggtcttagctcctgccccttaggactatttagatagggtctcattacacagtccttattggcttggaggttatgtaaaccaggctggcctttaatttagaggtctacctggctctgccttctggttgttgggattaaagaccatgccaccaagcctggcaggactattctactttttctcctcttcttcctcctcctcctcctcctcctcctcctcctcctctttgaacttgcagtgttttttcctgcctctgcctattgcctactgggataacaggtgtgtgctactgtgcctgacatctttggacctttgggtttcttgtactctttgttgatggttcctccccgaccctcccttcttctagcccaaaaagagttttgatgcaactagaaagggaagaagagaagttgagtcaatgctgataagccagaaacaggaagggccagagtagccttctgtcctcttaggacttgctaaagtaatagaaggtggatgtcggcataaccagttataataacaactagctttcaactctcctatcatttgccaagtccttttcacattatgtaagttattaatcacatcacccccatctcatgagatggattgtcagccctctcagctggcaggttgagatagttaagtcctaggagatttcataattgacataaatcatatagccagtgagtgccatcgtctaagcaggtctgcttcctttggtttcatactctctcctctctgtgcaggttctatactcactggaattctgcttctcaacagagaaatgactggatgagttctctagggcccctctccgagcttacactgtttccatggtttggggcacttgtagccagtcacgatttacactagttaatcagcatggcccagtttcataaacttacttttagtgcttattatgtgcattgtcacatgaattgccctgagaactgggaggatagagctctgcacagctggtggttgtgctctcacgttagccgtcagagctgctgagcaccaggtatgctgtttcaagcccactctgctgaagcatcacaagttctgtccctagttccatgcactcaaatgtctcccgctaatatgggatcaaagaggtggtttgtgggtgaatggggctgcactcctggaagcttacttcaggggctaaagttaggccccaaacattgataatgggtttaatggtctggactggggcttggagggagagagctaactaagctttggaagcagcaacaaggcctttgcctcacttgctctaataaagaacagtatcttttcctactttcattttattttgtaagtttttttctctttgtaactcagtgttttgcccatgctgggtaccactgagtgacacctcctgtcatggaccagtgtttttatactagagaagaactcatcctgtcctgaaggtctaacaggactctgttgcaagtagctgttgttagaaggccatgcagccataagagccacaagaggtctttcccagactcgggtctctgccaggcctcctatatcagagccccttactgcaaaaactggctgccacttgcctccagggtgggtcatgtgaagaactctgccctgtagtcacatcccagcttctaaaaggttttgattggtccccactgtcacagtctgtttgatattctatgtcattaacatgccattccagcaggtgattagattgcaagcatataaagctcaaggaattttacatcgtacagtaactatcacctcagttctgcatctggccatatttgcttcatcgactattgtccacctatctactgctcaaataggttttgagatgcattttaaagtcagtttgtgtcaccagcatgcactatccattttctgaagcacccagccagggattcaattcccctagaaatcagtctgaattttgagagccaagcagaaaggaagctccctcaccagaacggaatgctcttgtctgcagagaggagcctttctgctcaattggtagctgagcaaccagggagaagggagttggagttggtggttttgaggcaggagtaaaagcttttgagctattattttcataaagcatttgtctcttctatagagaatcatcacaaaagtaccattgacttagttaataattggcttctaaaaataagcaccatgtcagcagtggtagtcggtgatcgcaagttcttggcaacagtgaagcagaactagagtgctgcagggctggttgcaggggcctgggcagtcctgactagcttgtgctcctggcatcttgtgagctcattgttctccctctaggcttgtcactctcaagggtaaagggaaggagtcattttggcttctttttaatagcttttcttttcttttttctttctttctttctttttaaactaggggagtatgcagtgtacactcagagtgctcgctctctccttctctctcttctcgctctttccctcctttccttcctctctctcagctcatgttctcatcttaaaacaccaggagcagattccctcacttctgcctctatcaagtgtcagttttctacatgggaactcggccacagctggccatttctaacctagtctgatcagccctgcatgtcttcatggagccatggtaagatagaaatactttcttagcaaccctgtgggaaggtcatatgtattaagttagctgggttgccttctgtcctttgccatggttactgtcgtttgaaaggcagttctatttgttgcctaaatggagaaagaaacatgagaaccacctggttctttctgccctatttgaatccagtttcacagagcagctttgtcaccttgttttatacagtcctttcttgactaggcaaagccattcaaactaaggagctgaagcagattctgctagaggcaaattagaagtagcttgttagttttctgtgtttttcctccattggtgaaggaaactgagagatgcatggcttttgtaggagcctgctgacttggggaaggggttcctggggtccggtatcatccttacttagaccaaaggggcctgtagcacttaaggcagccaaaacaggaccagtttgatggcatgagctcagcatggtcacagctaaataaaggaaagtaagtgtatgtataaagggtgttctccctctgtctcaatgcttccactccctagacactctgccatagtgaagttctggattgaggtccagagttctctactctacttggttggctcacccaccaaggtgctacagtattcatcatggtcagaagtcatttgctatattactcttcactttctgcctttgagacagggtctcactatgaaccaggagctagactggtagccagcaagccccaatgatctcctgtctcttccctgaacagtgttggggttacaagtgtgcacacggccatgcctggctttttatatgtatgctggtgatttgaactcaggtcctcatattgcatagtcaacactcttactctcttaagaagtaagagaagttttctaggtttggccttgaccacagctgggcatttctagccatgtctgttcctgtgactgcacagtatcccaggagtgtgacgctgtttagtgtcttggctttcagttttgctgaaatattctgtccatttctttccttgctccttcctttgtttgattgagaaactcctcccctcccctcccctcccctcccctccctccctccctccctcccctccccctcccctcccctcccctcagacttttagaacatttgctgctcttgcagaggacccaggtttggttcccagtactcaaatggtggcttaagccattgctaactccattttcaagagatccagagctcccttctgggcttggaggacatttattcatttttactgtacctgcatgtacatgtgcgcaccacacgcatgcatggtaccctcagaggccagaggaagatgacattgaattccttggcactggaattaaagatggctgtgagctgccatgtgggttctaagagccaaaccagggtcctctgtaggaacaagtactctgagatggttgagccatctctcccaagacctcatttaaattgtaaaaatgtgtgtgtgtgtgtgtgtgtgtgtgtgtgtgtgtgtgtgtgtagagcatgcacatgtggaggacaaatgacagcttttgtgacttgtttttctctgtccactgtgggttctgggcactggacttaggttgtcaggcttttttacctactgggccatggtgctggtccctcatagctaactaatgtatcaagtttttactgtgcttcatgtatattagtttgtttaatccatgtaacagcccatgattataatagtgaccttataattaattattcacagcattttgcaagttgcagaacctgtttagaagtacactagatagtaagggacagagttagtgtttaaacttttggcaggttgactatagagcctgcacagctgacgctatcttatgctgtcagtgtaaagcaagacttttttcatgaccactgtatataagtcatttgtttaaagaagctcacaggattttgtttgattgtttgaagcctgcctgagttctttgatagctggatgaaactgaaggataataattcgttaaacagatgtgttgcatgtgaaacttactttcttttggattttaatagttgaggtgatagaaatgttgttactaactggtatgatattcttgttcttaggatggtgggtccttggatcaagttctgaagaaagctggaagaattcctgagcaaattttaggaaaagttagcattgctgtgagtatgtagtagagtttttttccagagtaacaaattttagaaaaagttagcattgctctgagtatgtagtagagtttctcttctagagtgacgaattgagagaaaataggtgagagaggaaggtgagtcagtgaaggagttgatttcagaaataagcttgctagagcatttcccataggatgaccttaaacatctgtacttctgtccctgctgcttccctactgctgggatggcagatgtgcaccccacacccagttttattctgtgctggggatccatgtggctcttactcctgcaaggcaagcactttacccattgagctaaatcctcagcctcaactttaggttaaaacctgtgtctgaaaaacagggcaaggtatctttgttagagacaagaaaaggtctttaaagttgggggtttagaaaacaatctttcacagagtgttttgaaaacttacattggccacccttaccttaggctaacagtagtgctttatagaactataaagtgatgttgttgcttaatagacagataagttgttggtggaaatgtttaagaagagccattgtttttctaagccagtcccatttcagtttcctttttttttaattttcctctcctccaggtgataaaaggcctgacctatcttcgggagaagcacaagattatgcacagaggtgagaaggattgccaggtgtttcattctgaattacagttgaaatctggaggtttcacatctttttaaaatgtgtttaggggctggagagatggctcagcggttaagagcactgactgctcttccgaaggtcctgagttcaaatcccagcaaccacatggtggctcacaaccatccgtaatgagatctgacactctcttctggtgtgtctgaagacagccacagtgtacttaattataataataaataaatcttttaaaaaaataataaaatgtgtttagccgggcagtggtggttcacgcctttaatcccagcacttaggaggcagaggcaggagaatttctgagttcaaggtcagcctggtctacagagtgagttccaggacaaccagggctacacagagaaaccctgtctcaaaaaaccaaaaaaaaaaaaaaaaaagtgtttagttttgttttggaatgaaagccctttactaaacagggcatagtggtgggtgccttgggaggcatgggtaggtgtatctctgtgcgtttaaagcagccagagcaatatagagtgatcctgtataaagtgttctattactaacatatcctttattgtgagacaaggatcttattatttagccctggcagacctggaactaactatgtagaccagcttggcctgagaactcagacccgcctgccactgcctcctaaatgctgtgattaaaggcatacacatcatgtacatttgctgatatagtctttgttttattgttttaaaagaattatctattttatgtatgagtataccagagctgtcttcagacacaccagaagagggcgtcagatcccattccagatggttgtgagccaccatgtgggatttgaactcaggacctctgaaagagcagtcagtgctcttaaccactgagccgtcttcccagccttgcttgttttttgagacagggtttctctgtgcagctctggttgccctgaagcacctctttttgtaaggctttcttttcaggcagattctctttagtgagggcagcatagacctcaccagccacttacacagcaggttctgcatgtgctcaatcccaggaaagcttcaccttctctcccctgtccacaccagtgctgggcctctgatgggctttcaattaggcctgttgtgccagggcattaatgtgcttgtggctggtcacatagattgatacccaagcaaaactatttggtgtttcagaagaagattatagtaatgaggaaatttgttaataattgttgaggagaaggaatggatgttgaaagcaagcaaatggaatgtagggtggagcacagtactagagcatgttgtagcatgggtaaggctgggctcaattcccaggattttggacaaaaggaagtaaaagggtttccatggcaaagtgactaagccttgagtcaaaaatacaaacaaacaaacaaacaaatacccagtaattcctaacagatggtcaaaacaggagtgagcagatagcttataggccacattgtgcctgctttctttagatttgtatgttctgcaagctaaggatgattttcaaagcttggtgacatgtgatagttgtgtgcaattcaaattttaacatccctggccaggtatggtggcacatgcctttaatcgtagccctggggaggcaggggcaggtagagctctatgagttcaaggccagcctagtctatatagcaagttcagaacacctagggctattggagagactctgcctcaaacaaacaatgagcttaatgtctataaataaagtcctgttagaacacagccacacttacttgcttaagtgttctctgtgactgctttgtggctgtattggtattttcaaacagtctcttgtgaaagaaatgactcatcctaaaatatttactctccagttctttactacaaaagcttcctgttgaggccctgaagtgtgttgacatccataggaggccttctcttttctgaagagaaaggcagagggggagataggggcagggagggggcagagaagtgggcctggaaggagaggagggaagggaagctgtggtcagtctgaatgtaaaggaaatataataaattaattaatgggggaaaaaggttcctgacccaagttaagagaaggaaggattaattgccttggagaaggtaagcaccaaccgtggctctcagcttgtttctgtgggttcttgaagaatgacagctttacagctcttttttttttttttgcttttttgagacagggtttctctgtatatccctggctgtcctagaactcactctgtagaccaggctggcctctaattcagaaatccacttgcctctgcctcccaagtgctgggattaaaggcacttgccaccactgcctggcggagagcagttctttaggggttgccatagcccagtaacacagaatactagagaagggggggggagagggagggagggagggggagcaccatgaatggcaggaggagacatgagagagaagtaataggttttctgagaagcccctaggagcggagggcaggtactagctggaggggtggtgtcaggaggacttgactttggtccttttggaatcagtgtcacattatagctgtgggttgggggttggggggaggggagctgtgattgaacctgctggtcatggagagcagtgacctactagcaaccctggggccctgattgccagtctgttagcggtaacactcagagaggagtctcatgcccaaagagattggtttgctatggaagtctcattacctggttattactctaaaggtggtcctattaactactaccaaatcaagagggaaggcagctcatgagacctgacaccgtggaggagcaacagtagagtcattctcagcctgaggctaggaaccatgttaattagaggcttctgttgtgggattgtcttctatatgggaacagctggttttcttgctggaagtaaatgctgactggctccatacagcaccgccactcagaggtggctacagcaactctttggagtttttccaaacatgtctttccccagcatcctggttgcaggtaaaacttcatggaaagttccttccaactctacccctttgagtgatcctagcaaaactgtaggtaatttatctgtcttacctcttccatttcttgggacaacccaggatcagatgaaactggccagtaaatctctaatagcaccaaggtgatggtacttaataaaagaacattaaccctagcattgtggagtcagagacaggcagatctctgagtttgaaccagcctgctttacattgcaagttccaggccagtcccagtcagggctaagaacactttgtcatgtgttattgcccccatccccccttaaaaccaaatacaaacgtatggtcctagactgctatgtggttgctgccttcacagaggttctggtccaacttggagaagtgagaccatagtgagtcagattaaagactgatgggtggatgatgcaaagggttgggatttgcattgagacagtgggtttcctttcaccctatcagtaaagggctaggattttaggagcatgattggcagaaagtgagctgcagttgaaggtagtgatgagcacatggttactggttactctctctatggatctagagtaagcgaggactaaaactgtccttaaattgtcagtctctcttaagtgtttctttaagggcctggctctctctaaaccaggaaggattggtaagtggcctcttaacctctggtctggacttttttttgatgcctgactttggagcctgggtccacatagtaacatcactagttatcgttcccacccctacccccatttaaggcaaataaatttccatgggcctatcatcttatggctcttattttccacctcctactgagcaaattaggttgaacatgtcaaatgggtttttagcttattttctttagtgtataattagtgtgcaaggtaataagtccttttcccgtcagcgtcagcagagagctgattggctttgagataagcctgcttttcttctaaagtaacagaaatagcacttaatacaggtgtcctggttggtggggttttggtgtgtctgtgtgtatctctgttgtttgttaacttgacataagctagggtcatctggaaagagggaatattaaatgagaaaacagggtttctcttcctatcctggaattcactctgtggaccaggctgaccttgaactctacctctgtctcctgagtgttgggattaaaggcatgcaacaccatcaccatgctaggtcttattttcttggctaatgattgatgtaggagggcccagtttactgtgggtggagccaccccggctgtgatcctgagtggtataagaaagcagctgagcaaaccacagggagcaagtcagtaagcatttcctccacggctcctgcttcaggagtgtgacctgagagtttcttttggtcatagtgttttatcacagcagtagaaacatatggagggagggtttgtgtgtttgtgtgtgtgcacgagcatgtgcatacgagtgtatgcctgtaggtgtggaggagttgacatgtcttcttcaattggtctctgcttcattttttttcagacaaggtctctttctggaccttggagttctctgatttagctagcatggctggttagtgagcctcagggatcctactgtccctgcctccagagcactgagattacaagtgtgtactcctgtgacccacaggtcctcatgcatggcaggcacttcactgcctaggccatccctctagccccaccacaggtgtctttgatgggaaggctacttttttatttttgtcaaggaacttcattatgaatcctcagtttccatgtcaacagggtgggcctgctctgccagatattgctgtagaatcgtagaaatgagaaaagagggtttgaaggatttcccttgctgacctctttttctactctgctcattgaatgtgacccctgttgtatgctggccctcagcctacatgaaccgggtatttctggaaggcaggctggggctgaaagagacttagacttcgagaaaagataatgaagtcaagacaaatatttctctgatcaaggccggagagtttgctaagagagtgtgcttataagggggaaggcccatcccccgtcagcccattcttggtgcctggagccagcctgtaggcgatctacagggtgtgtcttcggaatgtcactaggacctttcagcaggaagcagagtcttggagaagagcaaatagagccatcaaggtcagaaggctccaccctaggtaatctccttctcagtggcagcaaggtcaaagtctggatcagcctgcttcaaggctgagggaggctacagacccctatatatcttgctttggcttttcttatattctgtctccaaaatctgtacaactgctcagaatgtcatgtaccataagaaaggaaccctggactctgtaatatgtcagtgatatcatttgtgggcccattgctgttgggctaggtgagcggtgagttggtgagagggtacaacctatcatgtcttgactaggagagagaaaatcctttaaatgtgtttgtctgggcttgggtatgagatcttcagggtggagaggatttagagttgctggttaggactgatgggcttcccactgggactctgctgcttgaatttagctacaaccaggtggaagacaccttgaaggcctcttgcagttagcgagtctggaggaggtgaatgggctggagctgaggaagcagcgcgtggtaactagaggaggtagatttctctcacacctggatctccaggatttctgcctgtcccaaggcagattggttcccagaaaggctcattgccacagccaactacagcttgctaatggctttaccaagcctcaaggcatgaccggtggtgtgtgagctgtagtcagggccttgactctctagtttggcaggagccctctgttaggagtctggaattcaaatcccaaactactcttaggttgccctgctgttatgacagtgacaatgctgtggtcttctgctccctgttcccagtaccctcccactgctactgggaggagcaaagggagagtgttcaaaagatctgggccttcagctttggcttgcccaaactcctagcctgccccagctgtcctcagctgtcttcagctgtcctcgttacatccattctttctcaggaagtggaacctggtgggaaactagaacctttcatcagcagtctagggaaagtttaggtgggaaaaaattacatttacaagtaatggctagttgaaggctttggagttcttggagttttgttttgtttttgttttgtttttttcttttaaatctctgctgctcagttctctgaggtcctgggtagccagaggtagctccatgaaggctaggagtagactcatttcatttctccatcttaaggagggttcttaatgctctcctaagcatgctgggaagggggtcaggccatttgaaacgtaaagttgctattttaaaaaatctccttagggattggaaatgtagctcagttggtaatgtttgcctagcaggcatgaagtcctagatttattaccagcactgctggcccgcatccttaatcctggtcccaggtgtttggaggcaggaggatcagaaggtcaaggtcgtcctcagctacataggacgcttgaaaccagcctgggttcatgagaccatgtcttcacaatacgtaaacaatagcaaatacaatagctcatttgccttcaaaacaaacatttcatttctcactatctaagatcctgtcgatttcggatccagccttcatcacaaatgagcctgtctggcatccgtctgtgtgtccctctgcttgctcttctccagggctcttccttcttccttccattctctcctcacactctcttgggtgtcccacccacacctgtctcctgcccttctcttcctccatgccttgctcataaagttacatcttagggagtgcagctaaatgtgcccccccccccccagcccaagaaaaaaaataaaggagacatagaacaaaggaatcccctggaaggcggagggcttcactgcctctttcaagcacctgccagccttgccagctaagcagctgccatcaggtgggtgatagcagctctgtctgctgtcgtggtcatccctgtgtacactgtccctctggcgatcacagcctgctggacagcgactgcccttctgatcattgcatagtgcaaggattctatgtagcataaccaagtggctcccgaggcattcgtagacccttgttttagcaggtaggaaatgtttagaagttaaacttgccattatgtgctttgaaccgtggttaatttggtgtcaagaaagaatattttatccagttagttttacatataacttttttttgttgttgttgttttgttttcctttttggtgctagataagcactctttctctgaactgatgaaccctgaaccctctgcccttattctttgatctgctttttttttttttttttttttaagaagatattccccagccgggcatggtggcgcacgcctttaattccagcacttgggaggcagaggcaggcagatttctgagttcgaggccagcctggtctacaaagtgagttccaggacagccaggactatacagagaaaccctgtctcgaaaaaccaaaaaaaaaaaaaaaagaagaagaagatattccccattgctaaagtgaattggcccgatggggcaggaaagggagtaccattcagtatgttatgggcttcctagcagcttgggagcccagtggttacttcacactgcttggcttaccaacacctggccctgaaaggttgggggagaactggaggcttagataagctgttgagaagtgctgggcctctcctgtgccctttgaggcttctgctgggacagtgggaagaagctcaggtaaatctcccaagtcgggaaggggactcaggctctagacaccagaagtggacacgggagggcaggtagacaggaagacatttcggatgcagggaacagcaaaagagaagaaggcaggacttaacacactgggcaattagagtcaggccaacctggattagctcagggagagagggagataagaaacattgggaagttttcagagccagccaaaggggctttgtttggactgtgtttcaaggcaaacgggagccatagcagtctgtataggggctattctggaggagttctagctgtcatgtgtagaagatagagggggaaaatatggggagaggaagagtggggggcagcaggcagctttgggaagctattccacagtgccctttgagattaggaaatgaattcattctagccttgttggacacctcacactttctactgccagaaagagttatctgggctaactaggtgggggtagggtgaggcgcattttctgcctgacactctggcagcattctctactgcgctaggtctcctgatcacgaggaggggcttcatgcagtatatctggctctcaaggcctgaagggtaaagcctctcattttctccagccccagtaatccctgcagatgggtgggtctaggaggctgaagctggagttcagaaccacataagggagagcagggttatgtaagctcaagtgcagatgcctgcttgccatgtgaatagaaatcagatgcaaaacccagctagaggcagctcagcctcggagagcagcagctgcagcctggagggagagaaagcagcagtgccaaagaatgcggccaccatggaggggatgctctgggctgagagggtcagggcagcttcctctgggatggtgtgtgtgtagtatatatgtagacaagggctcactctgtgatgtgagccaccctgctcagaggaaccaggactttccaaaaagtacctgtagcataggtggaagggctcccgccagtgctcctctcttgcttcaggttatacctgaaatgccatgggaaacatttgcggtgggggagtgaggggccttgaggagaaggcttatgttagaaggccttccatgtgctgcctctaccagccctacaggcacatcactcccttggctcttcctaagttgctcccatatcccgaacatgtgacctgaggtctgttctgcactctgtaagctggttagagaaagaacagctggcccctgccacctacctagtgttaaagtagtgctccaatagaagaccgtgcaggtgtgccctcacaccttgcagagtaatggctgtgagtgttacacagtctctcattggttgaattatctcctaagaccagtagtatatacgctggatgctactgggaatttggcagcatgcccctgccctttctgtggtattgcaggggacctatttgaggcaggtgctcagtaaccagtaggcgaaagactggtgaggatgttagacagagggccgtttttgccctgtggccgtgaataaacccttgacccatacatagctctgtattggaagtgggggaggaacctgatacatttaagatttctccctgtgcctgaatgatcactgagagtctctgtgggaggtagagttgtagagaggtttctggctccatagagatgctagaccgatagtgagggctgggtcttcgaaagatcacaccgtggtgctgagtgtagatatgctcattccatggtttgtgttggctcagcgtttaccaaggtaagacagactctgagagctcttcttgccttgctagagctggtgtgaactgacgctgaggatgatacgggctagcccgctcaggggaagggctacctggaatattataagactgtctcccctctgcccccagtttactcttgggaagatttttagaatctattgaagaagaaacaagtaagccaggcagtgctagtgcaggcctttaaccctagcactcaggaagtagaagcaggtgaatctctgagtctgcgccagcctggtctgcacatgagttccaggacagctaggactataaagtcgttttgaaactgtctcaaaaaacttttataaagagtaaataacttagctgggtttggtggcatgaacctgtgatcccagtactggaagctgagcaagcaggaccatgcagccttacattcctttttaatcttagtagtagacacaccgtgtcttgctagtacaggtacctgaagtaatagcctttgagctctcctcctcctgtttgttttggtctgttgagacagggtttctctgtgtaaccctgggaactagctctgtggaccaggctaaccttgaattcaaaggtctgtctgcttttgcctcccaagagccaatgtgccctgctccagactttgacattttgactggtgatgatagctgactccttctgatgagtcatatggccaggtctgagtcctcagagaatagacatctactatctactgtctttggagtttgcaagtcaaggattgcctggattggggcatatggtgtggtctagagagcactgatccttcccctccccagccaccctgccttaagtctctcatttcttgttttctcttcacagatgtcaagccatccaacattctagtgaactcacgtggggagatcaaactctgtgattttggggtcagcgggcagctaattgactctatggccaactccttcgtgggcacgagatcctacatgtcggtatgaactaaagttccctttttccagtgtttctgcaggcttcattcttagcatcagcagccacatattataaccatggagccataagtttgcactgtatggtgatagatagggattgagaaatgagaggtgaattacagtgggcctctgggggagagtaagaatcttccttttacaaatgttcacatataattggggtctcaggcattgagacaacctcaagagattgtgctgtccaagctccagagtctgacttccttttctgaagagacttgagaatatatctgacatcttacgtgattgtcagaccctcaaacccaagacacttggacatgaccacaccccacctggcttactgctggtcctgttatcctctagtggccttgcgtagaggatatgtttgaaaccctttcctccactctgcttctgtcctccctatttactgaatgtctctgggtcatttcccggcctggcgtccagctcctgcttagagtccactctagctcagctacatcctatcttatccttctccccagagcccgactctcctggctcccagtgtcacctgattactgcatgcagctgtcccattgcccatggtcatattatcatggagtttttcccctccttgtaccacaagcttcagcccaggtgtctttcgtaggacctggcagggtctggcacattaagggttaggaatgctggtgagtggctgatgtggggttgactgaatgagagggtctttggatagtccatttctaagtgtagcagggaaagatggaaatctgtgggaagtgcttcagaggcagtgcacaggaggatgagagtaagggtagtttttatacaaccaagggaaaagtgcagaaaaaaggtgcagatggtaaggataggcctaaggcccagagtgtttcatgcacagtcaaagagttgtcatagccttagggggtctcagtccatccctgcagctatatcatcagtagagataaaggttcctatgtaagagatgagaacagctagagctaggaagccagcagcccctactgcttatgtaggggttatgaccaactccccattgctccttactgctctcctcctcccctgtgactcaagctactgtcagtatcacaataaccttaccccacaccccctctttagtatctatagggaagttctaatgcacacatattccccctccccccaactccactggctacagcggagttctgctctttgctgatctcttcttctgtagatggggaggctgaacagtttgcacctggggccgcacagttgccaattctcaagttcattaggccttggaacttactgatccatgatttagtggctgggtttttgttggttatatatggtcagttttaaagtaatccatagtagagttggtggaaatttttcatgggagaagctagttatgtgtctaaataaatgcactatgatcactgaaggtttttgtagggtctgtgacaaactaatgctcagtgtgcagacactgtgctgtttcctctctgctgcttgtcacctttgtcagcgaatgattgtgtagagttctgccttgtctgaatgttttcatttcacttggttcctgctgtgacactagaaagtagagtggaaattttgttgtcatcactgttacgagttagcagtggtgatttctgtatataaaaatccccattttatatacagggaacctgagattcaggatccccacagtgcttaagtctcagagtggggaactcatgataagcctctcgtgtgtctgagacatgctacttatatgtgaaggtcaggggccagactgggcagagcaggaaccacaagcggccaggacctgactctgcggatgctgccggctgagacagggtccagggaaaatggagcagtgaggagaggtcagagctgtaatgcatggaggccagaggaactcttttaactttgaggtgtcagagtaggggacaccagaaggtaaaagcaccgaagccgccctgggggcctgtctagagcaagaactaaccatccatctcccccgtagcctgagagactccaggggactcactactctgtgcagtcggacatctggagcatggggctctctctggtggagatggcagttgggagataccccattcctcctcctgatgccaaggagctggagctactgtttggatgccatgtggaaggagacgcagccgaaacaccacccaggccaaggacccctgggaggcctctcagctgtgagtgaggactgggaggcaggggtggtggtgggtgagtctaccctttgactcatagtgacaagtagcctcttatctgtatctataaagtattttctttttcttctttataaatctgcagcatatggaatggacagccgacctcccatggcaatttttgagttgttggattacattgtcaatgaggtaagtgctgccaggtttccttgaccttctgcataagacagtaagtagagggctggagagtttactgctgctagattgctcagcagttaagagcactgactgccctaccagaggtcttgtgttcaattcccagcaaccacatggtggctcataaccatatatgctgagatctgatacccttttctggtgtgtctaaagaaagctacagtgggctggtgagatggctcagcggttaagagcactgactgctcttccaaaggtcttgagttcaaatcccagcaaccacatggtggctcacaaccatccgtaatgagatctgactccctcttctggagtgtctgaagacagctacagtgtacttacatatgataaataaataaatcttttaaaaaaatttaaaaacagaaagctacagtattcatataaataatttttaaaacaagtaaaagaaagcaagaagaaggtggtggtggcatgcacttttaatcccagcacttgggaggcagaggcagatggatctctgagttcaaggccagcttgatctacagagtgagttccaggacagacatgctacactgaagacaccctgtcttgaaaaaaaaaaaaaaaaaaaacaaaacaaaacaaaaaagtaagtagttatgggctgtggggatagattagtggttcagcatagtggctactcttgcagagaacctgggttccattcccagcactcatacgacagttcacaatcatctgtaactccaggtcctaggaatctgacaccctcctctgtgggcacggcatgaatgtgatgcatagaccaacatttgggcagaaaacctatacacaaaataaaatggggggaaaaaacaagaaaaaggaaaaacggcttgggggaaaaacaacccactagttattgtgtgtggtgtgcacctgtaatcccaatacttagagtgagactggagagttccaagcctgaggtaggcctgtactacatagtaagatccctgtctcagaaagggaggtgggaggggaaactgtggttgagttgttcatatggtgtggtcctcagggtgcctgagctttgctcttggaattgtcagctcagagtcccttcttcttttcccaagatgaggagcctcccgttcactactgatgtctgcctgtctccatttactaggctgtctaatgcatgtgcagacatctgagcacaggaggtgcgaggcagagtaagtgggatggatcggagatggaagagcaggagcccctagtccccatgatagctaggagtggtgggtggagaactgcaacatacagacttggattattattttatgtgctgttaaacagttgtaagtgactatagaaagagatgaggaagccaggcgtggtggcgcatgcctttaatcccagcacttgggaggcagaggcagacgaatttctgagttcgaggccagcctgatctacagagtgagttccaggatagccaggactatacagagaaatcctgtctcgggggaaaaaaaaaaagaaagaaagagatgaggaatatccatgatcaatttctgtgaaaaacagcaaattacttttggattacttcctgcaatcccaacacctggcaggccaagggggaattccatgatttctaggctggcctgcactgtagaatgagactgtttcagagtaagtgggggagggggatcttttttaatgtatatgcctattgtaggtgattaaaaatttcaaactcttggatgattttactatgaagaaccagaccacttgtgaaattatgtataagtaagtttacattaaggaagggtaagactcactgaagtgtaggttgggcagtacagggacgtgagaaggagcccactgggccagcatgctgccctgcagcaggagcagccttggcagttgagaaggggtgagtgctgacatgtttcagaggcagcactgtgctgtggactgggctcagatcaggccatcacccatccttgattcaaaacatttaaacatccttgtatactcctctgaaaacagacccttaaaagcacaagtgggtctattgcttgtcacgaacctaacagggaatatcctggtcaccacagaggttataaatcagtgagtgcttttctgcccatcacggagctgtttccttctctactgtgtgcagagcactgtgcgaagcagcagagagggacaaggcagagcagtgcaggcttgggttcatcagtgcagggtgggccatctgtcctctgcctgctgaaacctatatggctctgggagggaggtccgtgagaggctgcctggaccacctcctgtacagctctgcacactgctttgcccacagtgctcacagtctgttctcactctgttcttaaagccagctgaggtggggaaactgtctctgtcctctttacataggtaaggaaactgaagctccaggatgggcagtagccggcatcttttccccagtgctttcacctgcctctttccgttccctgatgccaagagcctttgctagcacccagtcctttcttgcctgtcccctcctgctcaggaggaacagacactgtccttctggaagccagctgtttcctcttgaatattccacacaacctcagcagttctctgggtggggcttgtcctacaggattgggccactgttctacaatctggttcgcagctgacctcaaactgactaagacgtcagggtgagagggagggcttgctgggctttttagtaaggggcttgtgttttgttttttctgcagttttgggaatcagacctatgcctcctgcatgctatggaagctctgccactgaactgagcattcctgcagtaccactgcttgttccatttgttttagatcgggtctcattttgtagcctagagtagtctcaaatgcctcagcctccccaagtgctgggacgagaagcaggcaccacccaattcagagatctatctacctctgcctctggaatgcttgggctggtatttcattagagcagcgacatcttaggtactggcacaggtcatgtaaactaacaggtttcctggaggtactctcaggatcctcgtgctgcatcatccacactcagcctctgtagttaatgttttattaacctctgactctccagggttcagcaaggggggttgtggctgggagtaccatgaggagtatctcctggtttgggcatccctgtagcttctgttgttggtaactgctagtggcatttccaggtcagccagcactcttacactacacttcctgtacacctgagtacctacactcagagggtccagagctaaaacacagccttctataggagagtgaacaggctgaggggaataggtttgttctgtcagagtggtagaatacttgaagtactcccaataaggtgagccaggaggagttagaggtcccaagccactttcctggaactgatgagggcagcagaggccagaggcaaggtgggtgtgatggagaggtgatggagcaggaatcaagagtttctcacatgttgacatgtttgcagcctcctccaaaactgcccagtggagtattcagtctggagtttcaggattttgtgaataaatggtaagtttgtaccatgttctaagactccacccccctccccctgcccttaccctatcccctattaaccttggctgctgccatacctcatatcccttgtgatgctgggactcgtgactatctgattctgggtgccactctcccctgaatttcagggaccatcctgttgctttctgaccttgatttagctcagcaagacttttgtgtgtttggcgtaatgatggtgtgcctataatggggggtgattgcaggcactggccctcagccttcataagaggcaggcagacaaacataagcagggactgggaagtagcactcctaacattatttatcttcttttcagcttaataaagaaccctgcagagagagcagatctgaagcagctcatggtgagtcttacagagcctgtttgttcatctgagccatttttctgctcattcccactccttatacttcagtcaggtttagggtttcacagtgccagggatcaaactcctctgtcctgtgggtttcaggggcacctgcgatgcagtcagggagggacttccccgcagccttagttctgactagttcacctcacatatccagtatcctgagttactctccaactggttctagtttgatggcagtgacacacacgtggtactgtaatgtccagacaaggccatgccctgtgtagccttgagtgtagtgtactttctaacaagttgcccagggcctcacagcttctctgtttggcagagggggtctctgggctgcagctggcctacttgctgctcaagagtgagcactagaggcatcttctgcgcggtccccaggccacctcgcttttccttcttggccatttttaacagaatcccctttccttgtttcctgcacaggtacatgctttcatcaaaagatctgacgccgaggaggtagacttcgcaggctggctctgctccaccattgggcttaaccagcccagcacaccaacccacgctgccagcatctgagcctttaggaagcagcaaagaggaattctctgcccagtggcatgccatgttgctttcaggcctctcccatgcttgtctatgttcagacgtgcatctcatctgtgacaaaggatgaagaacacagcatgtgccaaattgtacttgtgtcatttttaatatcattgtctttatcactatggttactcccctaagtggattggctttgtgcttggggctatttgtctgttcatcaaacacatgccaggctgaactacagtgaaaccctagtgacctgggtggtcgttcttactgatgtttgcactgctgttcatcgtgactcactagctggctgcctgtattgtcaggattctcggaccttggtacttcactcttgctggtgacctctcagtctgagagggagccttgtgagacccttcacaggcagtgcatgcatggaaagcatgctttgctgctactgaaatgagcatcagaacgtgtacgtcatggtatttttattttttgcttttggtatagaactcagcaattcccatcaaaaaaacctaagcagagcccatcactgccatgatagctgggcttcagtctgtctactgtggtgatttttagacttctggttgtatttctatatttatttttaaatatacagtgtgggatacttagtggtgtgtgtctctaagtttggattagtgtttctaaattggtggttattttgaatgtcacaaatggattaaagcatcaatgtatcaagagttctatctttcttccagtctaagtaccaatgctattgtaaacaacgtgtatagtgcctacaaattgtatgaaaccccttttaaccactttaatcaagatgtttatcaaatctaatctcttattctaataaaaatactatcaagttaaaataaaagggacaagagattt

SEQ ID NO: 56 - DNA, 33864 bp, Homo sapiens
  source 1..33864: mol_type = genomic DNA
ccgatcccgttatcgcgagaagccggtccgcgatcttgtggccgcccctcccctccccctgcctctcggactcgggctgcggcgtcagccttcttcgggcctcggcagcggtagcggctcgctcgcctcagccccagcgcccctcggctaccctcggcccaggcccgcagcgccgcccgccctcggccgccccgacgccggcctgggccgcggccgcagccccgggctcgcgtaggcgccgaccgctcccggcccgccccctatgggccccggctagaggcgccgccgccgccggcccgcggagccccgatgctggcccggaggaagccggtgctgccggcgctcaccatcaaccctaccatcgccgagggcccatcccctaccagcgagggcgcctccgagtgagtgggcaggggtcagccggaggcttggggtgcacggggcagggagccctcggggaaggacggggcgaggggacgggggttcgcgaggagtgcacgaggcaggggggtcacgggggaggacggggtgagtggtgcacggggcagggggttctcgaggggaggacagggcaggggaccctcgggggaggacggggcagggggccctcgggggaggacggggcagggggccctcggaggacggggcgaagggtgcacggggcaggggggtctttgagcagtgagattgggcgaggggaggtccttgtggtggaaaagatggggtgtggggttcctgaagagtggaattgggataacgggagtctctgagtagtgaagttggggtgaaggatgtctctaagaggagaggatggggacaggggtccctgagcagcgaggttgagtgaggggaggtccctgcagtgcagaagatggggtgtggggcttctgaaaagtgaagctggggtgaggggagtccctcagtaggaaaatcggaatgaggggtgtccccaaggagagaacaggatgaggctccccaagcagtgagatcggggtgaggggtatctctaagaggagagaacacagtgtggggtccttgagtagtgaaatgagggtgaagagttcctaagaggaaaggacggagtaaaggttgccgtagtcatgagatgagggtgaggggagaccctgagtagggaaatcggggtgcagggcattcctgagaggagaggatggggtgtggggaggtcaggcagcccctgaggaggaaatctgggcaagggggctccagaggggagaggatggggtgaggggtccctgagtaatgagactgagatggggtagggtccctggtaggaaaagacggggtaagggtccctcaataatgagatagggccaagggaggtccctgtgggaaaagacagggcatggagtcactgagtagcagaatggtggtaggtctctgagtagtgaaatggggtgaacggtccctgaatagtgaaatcggggagatggtggggtccctgagtaatgagattggagtgaggggagatccctttggggaaaagatggggtttggaatccctaagtcgtgagatcaggccaaggagatgtccttgcagagagaagatggggtgcagggcccctgaattgtgagatggggttgagggggtccctgggaggagaggatgtgtcggtgggggcctgtgggggaaggataggcaaggggtgttctgcatattgaaatgatagtgaagcgagtcccttgggggagagatggggtgagggggtccctatgggggaaagatggggtgggagggttcctatgggggagagatggggtgagggggtccctatgggggagagatggggtgggagggtccctatgggggagagatggggtgagggggtccctatgggggagagatggggtgagggggtccctgtgggggagagatggggtgggagggtccctatgggggagagatggggtgggagggtccctatgggggagagatggggtgggagggtccctatgggggagagatggggtgggagggttcctatgggggagagatggggtgggagggtgcctgagccacaggttgagagtgcagcacctgggtggggaggacaggctgagaggtcttgggggggcggggagcggtccttttggggaatgagtccctgagtaatgaggttggcatgggatgaagagggcacctagggtgccaaggtggggcaggggggtcccttaggggagaggatggggtgaggaggtccatagacaaccagggaaaagggaagagaggggaggacagggggctcccagaagggtcaggatgtgggagaggggtgtcctagggggtcacgatggggtgggagaccctagaaaggtcaggatcgggggactttgggggggtcagggtgggagttctggggtatctgaggacaagggggtgtcttaggggtgtcaggacatgggggggctttagcggggtcaggatgggagttctagcgggttccagatggaggggtttctgctgggggaggtctagtgggatcaggacaggggttccagggggttcatgttgtggggggggtcaggttgggtcctcgggggtcatgttgggggattctgggggggtcaggttagggggtcctcggggggtcatgttgtgggggttctgggagggcagagcagggggtcctaggggtctcatgttggggttctgagggggtcaggatggggtcccagggaggtcaagatgtcaagatgggcatctctgagagggcatctcctgcttgtggcggtgcccagtgtgtggagtccctgaagctggaagtgtgaggagacagggaagccagagtgtgaggaacgaggaggcgtggggatcaggggaccctgctggcccctgaaagcagaggtgcagattctgaagtgagtggaccggaaaacccttgtgaggggctgacccagtgcagaagctttgaggaggtggagggcgaccagaggcctgggtgaagggatctgagaaaggggtatgctggggtccgggtggcgtgctggcagaatcgcactgctccaggacgagggaggggactgggtgttgggggcacacactggtggggtcatgccagggtgatctctgcactcccgttctgcaggccgaggcagggcagggcgatccccggggcccttggctggggtccgggtgccgtgcctgcggtgtgacccctcaagaaccaggtgtcagggactgtggcatgtctggtggcctctcccgcttgggggtcggccttctgtgacccagatgaagactcttgatgccaatgtgtgcaagtcaacacgggcacagccagacacggggacccgttcctcattctctgcacagaactcgcccttcacatttctcttccgtgtggggtttgattcccatctcttgaaggattcccccaggagaggaagctggctgtagggacgccaaggttttgttttgttttgtttaataaccacagttgggttgccagtaaatttaagatggattagtcagctgactccagaatgcattttcaatgttttgagcagtacttgagaccttccaagtctgccatcagaagtgttcattcatggctgggtgtggtggctcacgcctgtaatcccagccctttgggaggccaaggtgggtggattacttgaggcccagagttcaagaccaacctggccaacatggcaaaaccccgtctctattaaaaatgccaaaaaaattagctgagcgcggtgatgcacacctgtaatcccagctactcaggaggctgaggcaggagaatcgcttggacccaggaggcagaggttgcagtgagctgagatcgtgccagtgcactccagcctgggcgacagagcaagactgtctcaaaaaaaataaatattcatttattcattgatgttattcattcattcattcatgttcccctccttaccttctgtcccactcccagggtctcgccatttctgcttcttctgggtccttgttcagcagctcctcagtgagcacctactagggccctgtttcccctcatgggggacactaagatgagcaggggttgtcctgacctcaggcaggtgttgttacctcgggcaggttcccccacccctgtgagtctgttccctcctgcctgggcctccggggacgatggtgagaatggaatgagatggtgtttgtccagcccaggaagcggtgcccaggcccctgccttccagcgagctctttgcagcaccagctccagcgccatcgcctcggttctggcctgtgtgccccgtggcttacgccacttccagctgtaggcgaacagtggtcgaactttgggattggaaatttccagatggaaggagcagtccacgccttcattccctgcttcagtcccctctctggctgtccaccttggctttagctccttcctgaattgggacctctggaggtggcctgttcttccagagagccatttaaagctgcactgcctggttgagtagcccctggctacaggcaacacataaaacaagaattgcccaaacccacgagagcataggcgcaataatgccattgtagatttcaaaggcttaagacggaaacagtgtgaaacattcattcatttttcatactggttgtacgttgaaaatgataacatttttgatgggttaaatcaaatgtgttattaaaattaatttcagccaggtgcagtggcttatgtctgtaatcccagcactttgggaggccaaggtgggcaggtggcttgaacccaggaattcaagagcagcctgaccaacatggcgaaaccttgtctctactaaaaatacaaaaattagctgggcgtggtggcgggtgcttgtaattccagctacttcggaggctgaggcaggagaattgcttgaacccgtgaggtggaggttgcagtgagccaagatcacaccactgtactccagcctgggcgacagaatgagactttgtctcagaaaataataataataataaaaattaattaattaaaaagagccagacatgatggctcacacctgtgatcctagctactaggaaggctgaggtgggaggatcacttgaggacaggagttggaggctgcagtgagctgtaatcgtgccgctgcaccccagcttgggaggtagagcaggaccctgtctctaaataaatgaagtgagttcacctgttctttttaaacatgggtactagaagattttaatttgtgcgcatggtttacattccattgcttgtgcacagcaatgggttcctgtgtgcattgcgcttagttgtctgttactccaggatctggttctgagtcaaggcatttgtgaaaatagcttactgtcgaaatttcctctgaagattccttgaatcacccaataaagtgcaatgtacttgcttgtttaaattgttagaaattttttattgtgtagaaacaaggtcttgctctgtcacccaggctggagtacattgtcacgatcatggctcactgcagtctcgacctcctgggctcagcctcctgagtaactagaactacaggcatgagccactgtgctcggctataggtctcactttgttgcccaggctggtcatgcttattttttgttttttttgttttttggtttgttttgttttgagacagagcctccctctgctgcccaggctggagtgcagtggcaagatctcagttcactgcaatctccccctcccgggttcaagcagttctcgtgtctcagcctcccaagtagctgggactgcaaacgtgcaccaccgtgcctacctgatgcagcttttgtgctgagccttctgccctctactcttggttctcattctgtgctctgaggctgctcagaacgcttgttcctctatctcctgcaaagacagacatcttggcccgggctccgttcacccgatcccagcttcctcgtctcctcccgacatggtccggagctcgtgcgttaggaaggaggtctcccggccgcgtgcaatggctcacgcctataatcccagcactttgagaggctgaggcaggcggatcactcaatgtcaggagttggagaccagcctgaccaacatggcgaaaccctgtctctactgaaaatacaaaaattagccgggcatggtggcgggagcctgtaatctcagctacttgggaggctgaggcaggagaatctcttgaacccgggaggccaaggttgcagggagccgagatcgcgccactgcattccagcctgagcaacagagggagactccgtctcaaaaaaaaaagaaaaagaaaagaaaaagacggaggcttcctgggtcctttgagctgcagcttatccttgaggtcctgaggtctgctagacttgttgagacaggatcaaggcagcgtcctcagttcccggggagccgccctggattctggtcattggtgtgtctatgggggtacacagcatggatcctttccttctacaccatgaacccctcaagtgcaggaatccagtctgtgtcctcctgggggccgatgcaccacggccacatagcaaacggccagatggagtctccctaggtagctaacccctaccctggggggtctctgcagggcaaacctggtggacctgcagaagaagctggaggagctggaacttgacgagcagcagaagaagcggctggaagcctttctcacccagaaagccaaggtcggcgaactcaaagacgatgacttcgaaaggatctcagagctgggcgcgggcaacggcggggtggtcaccaaagtccagcacagaccctcgggcctcatcatggccaggaaggtgagcactgcggggtcggggaggtcggggagtggtggggaaggtccccctggaaacaggaggcaggttgggaaggcagccgggtctctgcattctgattagctccaggctctgtccctcatccccaccagggactctaggtcctgagaaagggcccagcttctgggcagatgggagccgtgccagccacaccagccacacacagctgtgccctccagtgactactttctgccctggagggcacttgaaatccatattcccagaaagctagcacgtgggggtttcagaaatgcgagtgtgttatggttctccagagaaacaagcgatgaagacgaagcgtgtgtgtgtttgcgcctatgtgtacagccacctcagggcgatggctcagccagtgacagaccgcctacgcagcggtggcgacgtaagatgatcaggccatgtttttgctgtgccttctgtatgtttatttttatttttatttttactttttgagacggggtcttgctctgttgcccaggctggagtgcagtggcatgatcttggctcacttcaacctccgcctcctgggttcaaggattctcttgcctcagcctcccgagtagctgggattacaggcacacaccaccaggcccagctcatttttttgtgtttttagtagaggcagggtttcgccatgttggccaggctggtctggaactcttgaccccaggtgatccgcctgcctcggttctctatatttaaataaacagacagcagctcagcactgcgctgtacagagcatgggagcctgggtgtggaatgggctttccagtgtttgcacagtgacgacatcgcccagagagggatttctcagtgtatccctgtccttaatgatacttgagtgtatgtgtagagagagatttattctaaggaattggctggagtgcagtggtgcgatcttggctcactgcaacctctacctcctgggttcaagggattctcctgcctcagcctcccgagtagctgggattacaggtgcatgccaccacacccagttaatttttgtttttttagtagagatggggttcaccgtgttggccaggctggtctcgaactcctgacctcaagtgatcctcttgcctcggcctcccaaagtgctaggattacaggcatgagccaccgcgcctgggcaggcttttccctgaaggccttcagctgattggctgagactcacccaccctggggtggagtaatctgctttgctcagagtctgccaatttaaaggttaatcacatcttaaaaacataccttcccagcaacctctagactggcgtttgacaactgggcaccgtggtctcaccgaggagacacacaaagctgactgtcacccaccctttgaaagtctgcaagccctggtgctgacggcccccgtgcttagtcatcccgggctcctgggccatgatgcagcctctgtgctctgtgtttgagaatagtgcccaggggatacagggaggatgtgaccacttggggacagtggctcttaaacacagaagtaggggacttagtgttgacagggtgttcagctcctcaccggtgttctttcagacctagaacgctgcctcttcctggaagcccaccatcctgtagttccccaaactgggggaacgtgactgcacctagtcccgtgggtctgcgcaggtggcagcagtgcttgagggccctgccttcctcgggagcagcggctcaactcctgcggggatttagctctgcagctctgtcttctggcctctagagtgctgccctccctccctcctgaagtgtgcagccgcggacttgctatttctgtccccgtactgcaggcagcctcttccaaaccggagcagccttggaaagctcaggtccgcctccgcccgaagcactgggtggaaaaaggcaagcgtgtggttcacacagccacagcagggccttgagacagtgccagtcctcgtgtgtgccagggaccctcaggcttctgggggagcctccagtggtccctgatgggctgggcagtggacatgaacccaatgcttgctgtatcagcagctcctgctcctgctgacaggcgcaggtgaagccgggcccacctgcagctttactgtagcggggaaagggagatcggggcctttgaacctgagggcaggcgtggctgggcaggttctgtggtctggtgggtggagatgtcccagcatcagctctgggtgtcagtactgtccttccgtcatgtaagatgtcagtcatcttgggggaggcggggaaagggcgcacgggactctcgttactatttttgcaacttcctgtgcttctataattctttcaaaattaggttttctttaaagtgcccgaaaactcgggtgggagaggatgcattgagctcgtgggctcagcggctctggctgctatgcaggtagggctgcaagggctcctttcatttcatcttatttatttacttatttttatttatttatttttttgagacagagtctcgctctgtcacccagactggagtgcagtggcacaatctcggctcactgcaacctccacctcacaggttcaagcgattctcctcccttagcctcctgagtggctggcatgcctggctaatgtttgtatttttagtagagacggggtttcaccatgttggccaggctggtctcaaacatctgacctcaaggaatccatgcatcttggcctcccagattgctgggattacaggcgtgagccaccgcgcctggcccagtctcggtatttgaggtcatgctggtttgtaaatgtctttttggcttgaccgtggcctctgacccctctcccattggagcagcgtccccgcgttacctgggccagggagataggtgaagaacttgctgcttgttacgcgtgtggggcttctttgaattgtccatgctcatagcagagatgagagtgtttgttctcgcctctgagttcctccactccgctgtagcttacttccagggtggcggtcacacggcctgcccaaggccacctcacagtaccagctgctgtctcacaagtgacgacctgagtcgaagccgctgccaacacctttgacgcgtgttctcattaaaattgaacagcagcctcgttttacagttgaagaaaccgaggctgtgtggggtcagtgcctgaatcggattcgaaccctcttggatctgctcggacttgggagcagctgccggggctgagcctccagatccactgcactgcggtcccctagctggccaccgctcccagcctgtgtgttaatttttaaaatctcttgtagagatgaaggcttgctacgctgcccagtgttgaactcctggcctgaagcgatcctcccgcctcagcctcccaaagcactggaattacagatgtgagccactgccccggctctcttccaatttttgacaacacctaattcaggatgtttggaagcgcagtgtgggctgcacgtgactcttggctacatccagcttgggagctgtcagtttctgatccatgatttacgaggttgctgagatcattccaggcctgcggggtggcggccggggggcggctcggtcctcctcttcccctcctgctctcgctgacactcagtgaagctctttcctctcttttcctactccgaatcccccaaccccacccctggctcaaattcctcattcttctgtagcaaccgtctccacctccgagccaggtctggcatttagttttaacaccctgacaccatccacatttaatcagctattagagctggcacggcctgggctgtggtgtcctggaaagaatacgggctccagtgttccccgaggcagccccagtcctgacttagcagctaatgccactgggaacatggctccgaggctccgaacctgagcttgctcagtcagcaccagtggggcagtacacccatcccccgggcttgtcagggtgaactttagagggtgcaggtgctcaggaacgccccctcccctcctgtccatctgtctgtctgtctgcctttccccttgcacaccctcagtggtggctgcccgtttatctggaatgctcgctcgacaggccccaggtattacagaaccattaaaactgagatcacgccgcagccgccctgtgcagactggcctccctcgcctctgctatttactacagccttccagaaggcctctcgcttccgacggcctcatttcacgttcggagctcctgggttccaaggcctctgggattcctcccagtagcccatccgccacttcctctcctaaattacgacttgcgacggccagccgaacgcgcgctctttcctgcttcttgtcacccatctgtggctcctttgaagtttttggtcaggaactgagccgtccaagacagcagcccccgttcagatgtggctaccgggctcttaaaatgcggtcagtccggacgtgctgaacatggaaaacacgcaccaagcttcaagggctcggtgtgaaaacaaatgtggccttttccagtaaatctcccaacctccacgtgaacatccaagcttcagtaccaggcccttgtgcaacgggagtgagcaccagcacctctcagttacagcctggctggaggggagagcatcctggggtgctggggtggccctggggcctgtggggtcaccatgagggagtggagtagcccaggggccaccgtctggagctggattctgcaggctggcctgaggggagaagccagcgctacaggggcaggcaggggcgggcaggcaggggcaggcagcgccagggctgcggtcaaggtgggagacgcttagcctgaggagcggccgggcggggggaggtgggcaccgtgccccgggccctgccatgcttctcaaggtcacaggcctagagcaggggccactccccacacacgccctgtgctgtggccacggtcagcctcctgctgccctgaacacagcgagggctccttcatgcctccgtgcccgctgacaggcggctctttgtccctctgcctggaacaccctcccccatctcctcctcatggtgactctgtccttcctcaaggcccggccccagtgtcacctccttgttgctgctccccaggcacctgggttgattctccttggtggactttttgccacattgaggtggtcttacccattcctgttcccgtcctgaccccaggtctcctccaggaaggagctgtctccgtgcttggccgccccttcactgactgcacctgggcctggctttgcctctgtggcggatgagtggaaaccatgtctttttcttgtcttattgcagtggctggagcgggatgctgtgattctccagggtgccgtcccaaagcctcaggctgctccttgccatgctgggggtcctggctcttctggggcttgtccatggggttaggggttgcccgtggtgtttttgttgttgttgttgttgttgttttgtttttttgggggtttttttgagacaaagtctcgctcttgtcccccaggctggagtgcaatggtgcgatctcggctcactgcaacctctgcctcctgggttcaagtgattctcctgcctcagcctcccgagtagctgggattacaggcgcctgccaccacacccggctaaatttgtatttttagtagagacggggtttcaccatgttggtccggctggtcttgaactcctgacctcaagcagtccgcccacctcagcctcccggagtgcgggattacaggcgtgagccacacaccaggcctcctttctgcatctcttgagcggatctttggcttcttgcctttttaaagtggcaccggggtcaacttgatgaaaatttcccctgccgtcttgaacttgggttgaaggagagggagaattctcaggggcgcccgcggctctgtgtggctaacgtctccacggggtgtctccagcttgagggtgggaaggggctcgggatagacccaccccaagtggagagaggcctggaggggagccattgccctgcctccctcctgggaaaggcaagcactttgtcaaagtctgatttgatggggaaaaatgctttcacacagctcccactacaactgagtgggaattaagtgtttgcttaattggtcttttttgaaaacaggtttattgaggtgtaattcacataccttacagtgtcccctttgaaagtatgtgactcagtggattgtaggatattcacggcatcgtcctcatcaccacagtcaattttacagtattccatcaccccaaaaagaaccctgtccacatcagcagtcacccccatcccctcctccagcccccggcacccacacatccccttcctgtctctggatcagcctgtcctggacatttcacagaaatgggatcacatattatgtggccttttgtgtctggcatctcgcactaagcatgacatcctcagggttcacccacgctgtggccggggtcttggcctggttcctctttacggctgagtcctgtttcagtgaggggtgggctgcgctgggttggcctgttctgccctgggtggacgcctgggttctttccacccttgcctgctgtgagtcgtgctgctgtgagcacttgggacacgtttctgtgtggacgtatgtgtccacttctaggcagacacctaggggtggaattgcggagggggtactgagttggtcttgaccactgttgggaacgcctgcagagcagaggccccaaatgccttcatcccgttttcgggcaccccccaagccagtctcgcccctctccccttgcagctgatccaccttgagatcaagccggccatccggaaccagatcatccgcgagctgcaggtcctgcacgaatgcaactcgccgtacatcgtgggcttctacggggccttctacagtgacggggagatcagcatttgcatggaacacatggtgagtgcgtccggggcaggggcaggggcagggcctccacggaacagagcatgttggggagaaggaagaccccctcacggcccctttcctcagaggcaacagtgcgctggcttccaggggatccttctcaaggcagtcgatgccatacaagtatgtatatgtagatgcctttggttttgttttgttttctttttgtttttttgagaggcagtctcactctgtcactcaggctagaatctagtagtggcacaatctcggctcactgcaacctccacctcccagattcaagtgatacttctgactcagcctcccgagtagctgggattacaggcgcccgccaccactcctggctaatttttgtatttttagtagagacagggtttcaccatcttggccaggctggtctcaaactcctgacctcaggtgatccacctgcctcgacttcccaaagtgctgggattacaggtgtgagccaccgcgcccagccaatgattttgttttttaagcactcatgtcttcctcccagctttgctttttctcttgctgtatcccgggcgtccttatgacagcagagagggaaaacactcccgttttggggggtacgtaggttgtttccagtctctgccctatctcaaataacatggcactgactcgcaggcacacctgtgaggtaagctgtgtgagggaattgctgggttccagggtagatgcaattaaaaactgatccctattaggccgggcacggtggctcatgcctgtaatcctaccattttgggaggctgaggtgggaggatcatttaagcccaggagttcgataccaggctgggcaacatagtgagaaaccatctctataatttaaaatattaggtgagtgtggtggcacgtgcctgttttaaaattgttaacaacatttaaaaatggggataaaaatagcaccagctacatgagaggctgaggtgggaagatcacttgagcccaggaggttgaggctacagtgagctttggtcacgccactgcactccagcccgggcagcagagcgagatgctgtctcaaaacataacaaagctgatgactgtttttaaatggccttctcaggaaagtgtggcagtctgagcttgtcaaggcaggcctgtgcctcccccagctcagatctgtgggaccacagtctctagggtggggtacaggcacccccttcattgactctgacgtgcccccttgttaagacactctggcctcgaagcccagaagtgggtgagattgggtggaacaaaaggagaagtggccagagctcaaaaccccggaggaaatgctgccgaccccgccacaccgagctcatcaggtatcagaccgcctgccgcacagcgtcgtttgcaaaaccagaatgcttgggtgacaccctgcaaacgtgcgatcccctttgacagttttgtaatgaaggcaggaagtgaatttgagcaaggcccccacgtagccatgtgacccgagcaaggcagcacccgccttggagcccctttcccgcctgcgagggagacctggcgtctgccccgctgctcgcagagtcacgttgccggcggcatcaaagggcgaggaaaggatgaggaagcgctttgtggtctgaggcagcccctctgtcatgtggtgctccctattcctcctcctcgtcttcctcgtcttccccctcctcctcgcgcccggcaggcaccctcgctactcaggagttctgtccatcctcgttttgtgtggctgactcagttctcgagcccccttcctcccatgcagaaaggggacagtgtggcaacccgcccccaacctctattcttggtgaatttaaaatgggggttcccagagtgggtgctggcaccccaggggacaccacacagaccaccaggctgcaggagggagacacaggccgtgctgtctgtgttatggagtgcaccctttaaaagttccgaggtggtctagccaggggcggtggctcacacctgtaatcccagcactttgggaggccgaggcgagttcaggagatcgagactattctggcttggctaacgtggtgaaaccccgtctctactaaaaaaaaaaaaaaaaatacaaaaaaaattagccaggcatggtggcgggtgcctgtagtcccagctacttgggaggctgaggcaggggaatggcgtgaaccctggaggcagagctttcagtgagctgagatcgtgccactgcactccagcctgggccacagagcgagactccatctcaaaacaaacaaacaaacaaaaacaacgtggagcacgttgatttttaaagcattgggtgagccctgacagggcagcatccgtggaagtaaagtcatccaagggggccatccctgccatcctcgccggccctgtgaattctctccatgctgaacgatgctctcggaattcacctgagtgcccataggtttccatggaagggcctgcccagcacctgattcattccctcccaggccaccccagtgaggcaaaggggcagcttagcaccggggctgaggatgggcgtccgggtcaggtctcggccccaccgctcacccttaccacgggttcgggacaggactcttgccgcttctgctgtgaagctgagggaggtcgtagtccctgctggggtgaggactgtgtgagctcctcccaggatggcacccggcacgcacaggtgttgcatccatgtcctggctgctgcagccatttccctgtatttctacgctgtttcctcatatttctatgtcatctttattttgcatttttttccttctttttttgtggggggtagggggtacaaggtctctctctgtcacccaggttggagtgcagtggcatgatcctagctcactgcagcctccacctcttgggctcaaacgatcctcctgcctcaaccttccaggtagccgggactacaggtgcaccagcacgcttgagtagctttttaagtttgtttttttttttttttttttttttgagacggagtctagctctgtcgcccaggctggagtgcagtggcacaatcttggctcactgcaagctccacctcccaggttcacgccattctcccgcctcagcctcccgagtagctgggactacaggcgcccgccaccacagccggctaattttttgtatttttagtagagacggggtttcgctgtgttagccaggatggtctcgatctcctgacctcgtgatccgcctgcctctgcctcccaaaagtgctgggattacaggcgtgagccaccgcgcccggcaagtttttttgtagatatgggatggcactatgtttcccaggctaatcttgaactcctgggctcaaacgattctcccgcctcagcctcccaaagtgctgggattacaggggtgagccaccgtgcccagtgatgtatttatataaaatggcaagcacttgttggtgactggaacttaggaacagtggggctggctgcttccctggggtctgaacctattactggataactcggggcaagaacccagtggacagtggggcctcatgggatggggaaaggagagccagtggcttacggacctcgtagaggtgccccttggcctttctgggggtctcgtcctatctgctgaagaatgcccgtcttgttctactgtaatggaaactggacatgtccatcagtaagggagtgattaaagaatgatatttggctgctttgcagtggcaaagtgaaatccacaatggtgtactgaatgggagtatccccacagtacaacactattcatgtagtggaggggtggttgtagaaaataaacatagcatgggctgggtgcagtggctcacgtttgtaatcctagcactttgggaggccaaggcaggcggatcacgaggtcaagagttcaagaccatcctggccaacatggtgaaaccccatctatactaaaaatacaaaattagctgggcatggtggcgcacgcctgtagtcccagctcctcaggaggctgaggcaggagaatcacatgcacccgggaggcggaggttgcagtgagccgagatcatgccactgcactccagcctggcgacagcaagactccatttcaaaataaaagaaaaataaaataaacatagcattggcccattcatttgtttattgtattttcaagtcagggtcttgctcagttgtccagcctggagtgtactggtgctgtcctcccacgtcagcctcccgagtagttgagaccacaggcgtgagccaccatgcacagctaatttatttgcttatttgtgtagagatagggtctctccatattgcccagactggtcttgaactcctggccacaagtgaccctcctgcctcggcctcccaaagtgctgggattacagacatgagcccatttcgatgttgttttaaactctggctgggcaagcatgctttaatcccagtgctttgggagaatcccatgagcccagtaggtcgaggctgcagtgagctatgattgagccactgctctacagcctgggcaagagagtgagtcccgagtctgtgtttccaaatacacagcaagatgcgggggccaggtgctcactcctgtgatcccagcactttgggaggctgaagtgggaggacctcttcagccaggacttcgagagcagcctgggcaacatgaggaacccccgtctctacaaaaaattagcaggacatggtggcgcgcctgtactcccagctacttgggaagctgaggtgggaggactgcctgaaccaaggaggtggaggctgcagtgagccaagatcacagcactatgctgcagtctgggcgacccctgcctgaaagaaagaaagagagagatgaagaaagatctggaacaatataagtcacacttgaggggggaatggtggaagtgatgcggcgtccaggttatttatcctcatttgaattttttataagaaaaatgtgtttgccgggtgcggtggctcaagcctgtaatcccagcactttgggaggccgaggcgggcggatcacgaggtcaggagatcgagaccatcctggctaacaccagtagtgaaaccccatctctactaaaaatacaaaaaattagccgagtgtggtggcgggcacctgtagtcccagctactcaggaggctgaggcaggagaatggcgtgaacccgggaggcggagcttgcagtgagccgagatggtgccactgcacccccgcctgggcaacagagcgagactccgcctcaggaaaaaaaaaaaaagaaagaaaaatgtgttcacctactacctacgtaacaaaattacagttacaagaccattttaaacatcacacacacacacacacacacacacacacacacacacacacacacacacggtagacgtgtatggtcatgcacagagtgagatttggggtcagcagtacacagctgcaataccccctgcaccacatcctgtctctgtgactcagacaaattgcttaccctgccagactttggtctttatagctggagatcagcccttctcaaccaggggcagttctccctcccaggagacacctggcactgtctggggatgtgtgtggttgtcacaactgggggatgctcctggcgtggagtggatggaggccagggacgctactcagcgccctgcagtgcccaggtcggccccaccccagagagtgacctggccccgatgtcacagtggagaaaggcggctgcagagagagcgatgctcctgtgaggcgtcttccaccagctcctgaggctgcagcacagcgctccgcccgccctcatctccggggagaggctctttgaattttctcactaaacaaacattgattgcggccccaggagaaacgaagacggaaggagctgtgctggggagcaggggttttagggttgcgtttggtgcgtctgtttggttttcgccaccctgcctctttcgagtcgttggtctctttctggtttttgtttttttgagacagggtcttgctctgtcacccaggctggagtgcagtggtgtgatctcggctcactgcaaccttgacctcccaggttcaagggatcctcccacctcagccttctgagtagctgggactacaggcgtgcaccaccacgcccggctgattttggtatggggtctcactgtgtggctcgggatggtctcaaactcctcagctcaagcattctttttgctttggcctcccaaagtggtaggattataggtgtgcgccaccacgtgcggctttttttttttttttttttaattgaggagtcttgctctctcgcccaggcgagagagaagtggcacgatctcgactcacagcaacctctgcctcccaggttcaagtgatcttcctgcctcagcctcccgagtagctgagattacaggcatccaccaccacgcccagctaattttttttatttttagtggagatggggttttaccatattggccaggctggtctcaaactcctgacctcaagtgatccgcctgcctcagcctcccaaagtcctggcattacaggcgtgagtcaccgctcccagcccatgtccggcctcattttaagtaattcttttaaggtagattgataaaaactgagaatagaagcagcttccacctggccctggctcactggagctcccgtcctggcacctcctcctgggctgtctgagccctggccatacctgccctctcaccctgtgtgtctgcgtcttcagcctggagctggtggatggagtcacgtgtatgctttagaggtctcaaagcgtgttgggttttctagaactgccttcggcctttctctccaagcctagctgggcagaagtggccagagagcggcaacccgggcacccctgagtcccaggatttctcccccggctcctcccacccatgtgaatgaaagccatcccagggaaggctgggcttttgcaggagtcctggagcagcatggtggggaaatccaggctccccagccagcctctccaggctcctccagcccgccctctctagcctcagttccactttcctctctgctgagcacagaagagacgcacgccagacggtggcagtgggaacttggcctgtcacccctgctgtcctgggggtggcctggcaggtgtgtccggagcctctgcctctgaagaggcaccttgggtggctcccagtgcctggggttttggcatttgggggttttggtccccaggtttgttgccaggcagccttgggcaagacatggaatttctgtttcatcatttatgacatggatgtggggccacacccggggaccagcctacccatgatgactcgtttccaggccctccgcaggatgcccggcacagtggcgaggagaccacaggctgtggggaggggccgaggttaccgtcacctgggctggcgtcactgggatccctcctgcagtccatgcaccccctggcccctggtcctactcggcctggcctttctgccctaggtggcagggacaggcgcagggcagacgcccagcagtggagccgcagggcttggcgagggagccccctgggggtctggacgggcacacagcgacccgccgcctcctcccacgcggggcagcacccgcgtctcctccgcgccctcaccctccccttcccttcgtgtgctgggaagaggacgcaggcccaagacgctggtctccagcctggccgcctcccgtggcgcacagacaagcccaccacgtaggctgcagggagtgcgggccccacagctgcctgagcccccggccgcggcttgggctggcccggagcagagcctctgccgtggcgacctcaggagggccgagtcacgcaactgattcgaggatgggacgggaggcgggggaaccctgggccctgttccttccccaccttgtgggtgggtgttcagacccaaaggcagaactgtcagaagacgccctgcccttggcccgtgggtggagttgggctccggcccctgcttcccgtcaggaggcagaccaccccctcgccgggagtggggggacgcatccgtggcttcccggccacctgcgcagagcctgcactcactccttgtgtgccctctaggacggcggctccctggaccaggtgctgaaagaggccaagaggattcccgaggagatcctggggaaagtcagcatcgcggtgagtccaccgcagacccacatcgcgcccccaccgcactctgcacggacctcttccacacggccagggttccgggagccactcacagtgtggtgggggttagggtggcccctgcagaaagagagtggccaaggctgtgcccacctgctgtggagcttgaacaagtgacgtcccttttggggcctgaggtcaccatctgccaagtgaagacgttataggtccctcttcactcttagtatcctctgtttgccacactggtcccctctgcccctcgtggcagggggatgttggcagctggcacgttgcaggggacaggagcttgttgaaagggagactctggggtgggatgtgggacgccaggacctccagacacactcaccattgctgttagaaatgtcaccggggccaagggcgtctctgctgcccggtctccagcacagctgctccgtagagccgtgtggtttcagcagaccgtgcgtgttgcttcttggagcttgcaccttgtccatagcaggggccgagtcccgcctgcccataccagtgttggattaagacacaggacgcatgctgccagacacgcgtttccgagttgaaagctgccgtcacactgcctgtgctgcttgcttcacttctcgggatgctgcttccagggcgggcctgggggaaacatcgtccttcccaggcacccttagcccgtcccatctgggggcccttagcacagtccctgggaccccagatgctgcctttcaggctgatgtgggcaaactcggcagcccagcctactcccgggccatgggccaccatctcagcttccctggggctaagccgtgtgctctgaatcaaaggcagtagtggcatcggcggcactgcggccatgggaaccggggttgacttgcacacgccagcacagggctgtcagcactgtctcgtctctggcctcgcttgctccaccccagcgagctcctcacagcctgaaatggttcctgccgcagctccctcgctccagctctgactgctcagctctgacccccgggctcggtcaggagctaagccctggtggccttgtcccgtgactccctccgcgctcccctgcaggttctccggggcttggcgtacctccgagagaagcaccagatcatgcaccgaggtaaggcccagcccgccctccccagagccccgggggccggcaggcaactgttgggcgcccctcacccgcagcctgccgcctccagatgtgaagccctccaacatcctcgtgaactctagaggggagatcaagctgtgtgacttcggggtgagcggccagctcatcgactccatggccaactccttcgtgggcacgcgctcctacatggctgtgagtccccgctggctctcccctccagctctcctccctgctgctctcccccaagctctccccacccagctctgccagccagctctccccctcagctctcacccccatgtctcctgcgcagctgtccctcccagttctcctgcgcagctctccccgcctcccacgaggctttcccaactatttcgtgggcacacactcctacatggctgttagcacccccgggacagtcccaccccagctgcaccctccccttcatcagctctccccacttgccacaaggcacgtctaaagctggtgcctcctgggagcctgcttttcggattccccttgctctttattttttatttgttaatttactaatcttttgtagacacggggtctcgctgtattgcccaggctgctcatgaactcctggactcaagtgaccttctttcctcagcctcccaaagtgctgggattccactagcagtgagcctgagccaccacgcccggccagatctccccttcctgttggaattctctcttaggtttttgtctctagcagtgcctaccaggtttctttcttttttttttttttttttttttttttgagacagagtcttgctctgtcacccaggctggagtgcaatggcacaatcttggctcattgcaacctccgcctcccacccgggagcaattctcctgcctcagccttccaagcagctggggctacaggcatgtgccaccacagctgggtaatttggtttttgtttttgttgttgttgttgttttttgagacacagtctcacactctcacccaggctggagtgcagtggcgccatctccgctcactgcaagctccgcctcccggattcacaccattctcctgcctcagcctcccgagtagctgggactacaggcgctcgccaccacgcccggctaattttttgtgtttttagtagagacagggtttcaccatgtcagccaggatggtctcaatctgaccttgtgatccgcccgcctcggcctcccaaagtgctgggattacaggcgtgagccaccgtgcccggcagccttggctaacttttaaaaaaatgtttttagtagagatggggtctcgccatattggctagcctagtcttaactcctgggcttccacctcaacctcccaaagtgctgggattacaggcatgggccactgcacccggcccttagttaatttctggaccaaggaattggaatctggggtctttcaggaaacgactggggattcagcaacctgccaaattgagccttggagcagcctctgagatgttagctgtggaggaggaggcccctgcttcctggggcccatcatccattcccaaaagtgctgagcattgcaggctcttcaagagctgcggtcaacaccagctccaggcctcgggctggaagcctcttcagcaagtgccgcagggaggccctgggtgggtgagccgggaggtagaattgcgtaacagctctctatccattgctgcggtcattagccatggagagggtgacgggggctgtaacggggcaagcctcccgggttccagctgccatcctcgcccctctgggctctttcctccctggctctgctgcagccggagcggttgcagggcacacattactcggtgcagtcggacatctggagcatgggcctgtccctggtggagctggccgtcggaaggtaccccatccccccgcccgacgccaaagagctggaggccatctttggccggcccgtggtcgacggggaagaaggagagcctcacagcatctcgcctcggccgaggccccccgggcgccccgtcagcggtacggcctgaatctgcaacttccggtctggacgcgcagtgccctgcgcggggcctgctgtgccagggtcagcagctgcctcccctctgcccctggcgcaccacctgtccccctggatggtgccgactgtggtcagcagtcctcccatggtcctggggtttccggggacagagctggaagcagtgagcaccccaaacctgttctgtccggggcagctgcacctgttgttgccagctggagggatctgggagcgcagctttgccaccaagcccctgggcagttggattttccaacattttatcccgaaagcattcaaacgcacagaaaagtggaaggaattggccgccacagagcctgcattctgcaggtgacacgctcctgtgctgcgggccaagccttccagggagtcctgaagtggagattggacttggcatggccctcagtggcctgttggctccggccccaacacacacaggaggggacacagcccgggagggggcgggagggctcaggccccagggacagctgggctcgcagaggacaatccggcacttagggcgggcacctcgggagcgggagctccctgacgccagtcagagagggccgagcggacacttccaccgcctgagggaagagccgggggcggaccctgcttggtgcagaatcacaggagggtcctgtgattttttttaaagtcagacatcagggagagttggtggcgtcagaccccaaaggaccctgtagcggactgtggttggttttaaaaccatgtttccgaactacaaagcacacaccccacaactcatttcaggtgagcagttcagtggttttcagtcacagtgctgcgccccatcacctctaattccagaaccttctcagctccccaagaggaaaccctgtccccatcagctgtcactctccatccccttcctgcctctggactggcctgtcctgggcatttcacagaaatggggtcacacacttgtgtggccttctgtgttttgtgtgtggcttctctcctggagcgcagtgtcctcaagggtcatccacgccatggtgcgtgtcagagcctgggtccttttgaaaggctgagtagtattttatgacacgaacaggccacgttttgtggtcctacccggatggattggggctgtgagaaggagattttcatagcactggcaagcccacctcctcctctccagccagactgctgggatgtcttgatctcatcccagggagaggcccccaagtccttatcctcaggcctagcctcagcctctcccagtcccaactctcaggtggtataccatccccagcccagggccccagcccacctgcccatttcaggacgggcagaaggcgaaagtccagctgccaagcccaggcctggccagctggttctcagacaggggtcagccacccctagccagtctcccgtcctgagtggcacttggggcctgcccccatcaccgccagcagctccatgcaaggtcacgcggctgtccttgcctgcggtcagcaccgtccctccccctgccctccagagaggaggggtgatgactttggcacgtccggcaagcctcaccgagccaaatgtgtgacttctcaaaaaatgttcttgttccttttgccttttttttaattcactagaggctcaggcaaggagtagctgtcccagggaatggaacccagagtcaggcaggggagctttgtccagtgcctctgcacacccgcctccaatttaggctggcatgtggaggagggcgcctggtggtgatcagccccctgggagcccaacccccagcagaagtgaggtggccatcggcccatctcacctccatctctctccctgtgcaggtcacgggatggatagccggcctgccatggccatctttgaactcctggactatattgtgaacgaggtttgtgcttgatgccttttggcttttcttttccttttctttcttctttctttttttttttttttttttttttaggcagagtctctctctgaccagagcaagagtcaccaaggctggagtacagtggtgccttctcggctcactgaaacctccactttccaagctcatgtgattctcgtgcctcagcctcccgagtagctgggattacaggtgcgcaccaccacacccagctaatttttttttttttttttgagacattgtctagctttgtagtgcagtggcttgatctcagctcactgcaacctccgcctcccaggttcaagcaattcttgaaccaattccacgtgtgtcgcgtctcccatcttctactgtgctgcacaagcccagctccttcccaagggcattgtttttttatgaagacgaacccagaattcccaccgcagcctctcaccctgagtccagagggaggtgtgtgccagcagccctgggctcaggccgaggagccagcctgccccttgagcagtggcccagtgtctctgcatcagagcgtcctggcgcccgtgggcgtggactcataaatcaccccgcttccacggagaaaggtacaggaatggcccttgcctcttggaaggaggcccagagagcctagaaggacctgtaggtcccggggtggctcctgctccgtcagtccccataacaacccagtgagccacagtatgagggtttccaccgcccagatgagtaaaacaaggcacaaggagggacgcggcctccttccaggcctgcagctgtcagggaggcacaggactgcaccccaaggtcctgttggccacgtgaccaggccgggccacctccctgggccttctgtgggtttctgtgtctttggtggccctttggagctggggcagagaaacgggcatttgagctgcctgcagactgggctaggcctggggttgggtggcgagatgatgacggagccaggtggggtggccctggtgacccagctctccctgcacctagcagccacacccatgcccagtgagcacatcccccgacctctcccccgcctcttcccgcccctgcccctgcgcgggaaaggcctgcccctgccctgctggcaccgcttacacggccactcccgctccggggacgtgtgtcaggccaggctccccagtgcttgggcttaaaactgtggacccagtttggccgggcacggtggctcaggtgtgtaattccagcactttgggaggccacagtgggtggatcacctgaggtcaggagttcgagaccagcctggccaacctggtgaaataccgtctctactaaaaatataaaaattagccaggcgcagtggtgggcacctgtcatcccagctactcaggaggctgaggctggagaatcccttgaaccccggaggtggaggctgcagtgagccaagatcacgccattgcactccagcctgggcaacagagcgagactgtctcaaaacaaaataactttggatccagatgtccctctgtggggcccagtcccaaagctcatccttcagccagtgacactggggaaggaagcaagtgacgacactcgagaggttgtcctgttgataaaagggggacgcaccccactctttccctctaagcagccgtgactctcaaacgagagctttcgggagaaggccacctctgacagggtgcagcccagttggcatgtggtgtcggccaggcctgcagggtgggtgaccggacaggacagtgaggggtagagagggctgcagccgagggtccctgacgatgcccagggctgaccccaccctctgttctcctccacagccacctcctaagctgcccaacggtgtgttcacccccgacttccaggagtttgtcaataaatggtaggtggagccgggctgcccacacccctggccgggacccagatgtgccactccttccgggtcctgggtggggcccgtggcccagcctgcccatccagaatcccagtgcagcgttaggcaggactcagcccaacgggaagccagattccttttcccagagctgtggggctgcagctcccggctgccatgccatcctgtccgtgagcccaggggtgaagcaggattgcaggccctgtgcacatgacggtgtccccagctcactgtctgcagcaggagaagcctctgtctggtccccggacccctggtgtgctgactgtgggctccccgggatccgcccgcaggttctgggagggtcgccagccccactccattctcctgcccccaagcacccagcagcacctgtggcgtgggcttcacaggcatgtgccgcagaccacggggaaggagctgcggacaccccgctgcccacagggccggtccatgtgtgtgagctcgggacgccgtggaacggcaccgcactcctggtgccggagttgccccgggcccttggcgtgcgctccggcgatgttgccccgggcctggggttttattagacagttagctggggttgcgtccaggcttctgacccaccaggcggggtttcccaccctctttccctctcaccctcccgctggggggtgtcctgcccctggcaccaaagtgcagaggtggatccctcgtcctctgccaggaggcagaacagagcagccactctgtgccactctctctggtcggagagatccaggccccctccgaccacggcccacacgcgggtgccccggggccaccagctgactgccctgtcttgtctcctccaccgcctcccggtcctgcctcttggaacccccagcctcatcaagaacccagcggagcgggcggacctgaagatgctcacagtgagtgatgccagcgggttctgggaccgggagggtgcaggctgccacccaggccccaggaaataaggctgctgggcctggccctgcccggggagccagcacctgcgaccaggatgtgggcaggccgggtgtgccaggccacgccgaggaccctctgtgggtctctctcatccatgagagaagccatcctgggctggctgcggggagcagagggtgtgtgcgtgggaacagctctgggctctgagctccgccgctcctgcctggtgctggtcccgcacccacaggatgagaccccgggcttctttgccctcatgagaggctggaggcagctctcagccccccaggctcctttccctgcaaactagagggtgaccatccctgttctgcacactggcaagcaggtcccccgaggccgtgcgtacttcggtgtccccttaaacccccatcctctgatatcctcggaagcccagctgttcaccaaaactcgcctccccagcggggactacaccctcagaggagggccccgggcatcatcctcctgccctcagcccagcctgcatcccgagtgctttcccataccacagccaccgtcagcgaccttcaaacccctcgacagctgattggcggattggagatgccacccccctagacagcccgttactttctgtgcctgtaagaaaagaagagatgccagctacagacacccaaccgggtgccttctaatactggaatgtggctttcagttttgtttttttcttgagagtcggacagagtctcactctgtcgcccagactggagtgcagtgaagcaatctcagctcactgcagtctcagcctcccaggctcacacaattctccagtcagcctcccaggtagctacgattacaggcacccgccaccacacccggctaatttttgtatttttagtagaaacaggctttcaccatgttgtccaggctggcctcaaactcctgacctcaggtgatccacctgcctcagcctcccaaagtgcagagattacagatgtgagccaccgcacctggtcaaaaaaatttttgagatacagccttgctctgtcccccaggctggaatgcagtggtgcgattgtagctcactgtagccccaactcccgtgctcaagtgatcctcccactcagcctcctgagcagctggggctaccgatgtgtgccaccaagcccagctagtttttgtgtgtgggttttgtttttccccgcaaagatgaagtctcactcttgtcacccaggttggagtgcagtggtacgatctcggctcactgcaacctccgcctcccaggttcagggaattctcctgtcttagcctcctcagcctcctaagtagctgggattacaggtggctgccaccacgcccagctaatttttgtatttttagtagagatggggtttccccgtgttggccaggctggtctcgaactcctgacctcaggtgatctgcctgcctcagcctcgcaaagtgctgggattacaggcgtgagccaccgtgcccgacctgcccagctagttttttttatagagacagggtcttgctaattgtccaggctggtctcaaactcctgggctcaaatgattctcccaccttggcctcccagagggctgggattacaggtgtgagccactgcacctggcatgtgtgactttttttcttttttaatgaggcaggctgggcattgtggtgggcacttggaatcctagtgccatagggggatggctctctgaggccaggagttcaaggccagcctgggcaacatggtgagactgtgcctctccaaaataaataaataactaaaaagagaggggtactaatgttgaaataactttttttttccctcagacggagtcttgctctgttgcccaggctggagtgcagtggcgcaatctcggctcactgcaaactccatcttccaggttcaagcggttctcctgcctcagcctctcgagtagctgggattacaggctcgtgccaccacacccggctaatttttgtgtttttagtagagatggggtttcaccatgttgaccaggccagtctcgaacttgtgatccacccacctaggtctcccagagtgctgagattataagcatgagccactgggcctggctgaaatagccatttttgaaccagcttcttaaaaatgctcccctgttgggtatcctggacctagccaagatgtgtcctatcaagttggttggtttttcacccatacctacaccgacttttaggaagataggcaccttggcctgcctccagctgcaaaagaggcagcattcaggggcccaaggtcctggacaccaccctcctgggaaccccaaaggcctctactcacccactgtggggtggcccagcacagcctcttccccaagggcacccgccctcctcccccagcccttccaaccaagaggcttctcatgttgtgctgtcctgtacaggaaccgctggtcacacgtggctgttgaagtgtgttcagtggggccgggcacagtggctcacacctgtaatcccggtactttgggaggccgaggtgagcggatcatttgaggacaggatttcgagaccagcctgggcaacatggaaaaacccggtctcaactaaaaatacaaaaattagctgggcatggtagcacgcacctgtaatcccagctacttgggaggctgaggcgggagaattgcttgaacctgggaggcagaggttacagtgagctgagatcataccactgcactccagcctgtgcgacagagcaagactgtctcaaaaaataaaaattaaggccagttgcggtggctcacacctataatcccagcacttcgggaagctgaggcaggaggatcatttgagttcaggagttcgagaccaacctggccaacatggtgaatccccgtctctactaaaaatacaaaaattagctgggtgtggtggcacatgcctgtaatcccagctactggggagggtgaggcaggagaatcgcttgaacccgggaggcggaggttgcagtgagctaagatcacaccactgcactccagcctgggcaacaagagtgaaactccatctaaaaaaaaaaaaaattaaagtaaaagtatttaattaatttgttaaactgaaataaaattgaggcttttgttctcaagccatgggagccacagtccaggggctctggagcctcatgtgctggcgagtgggacggtgcctgtacaatgctcttcgcggagttctgtggaacagcccgttcttgcctgggctgtcctgctccgggggaccctggcaatggctgaggacattgtggtgtcacgacttggggaagcccctggcatggagtgggtggaggccagggacgctgctcagtaccctgcagtacccaggatggccccacgccagagaatgatccggccccggtgtccacagcggccggaggaccctgggcttgcgcgagcgtagaccctcccctgggagcgcaggctgccgtgctggtggtgtccccgccccaggtggagtgcagcatcctgagacccctcccaggcctggcacacgccgctgcccctttctgggtttctttccctctcctaccccgagtgcgtcttcctgtggggaagggagggtctcctctgttttttgctttctgtcccgtaccatctgccagggctgggcagacgctggccctccccgtcctactgtgactccaggcccgggtgctcacggctcccctttccttgcagaaccacaccttcatcaagcggtccgaggtggaagaagtggattttgccggctggttgtgtaaaaccctgcggctgaaccagcccggcacacccacgcgcaccgccgtgtgacagtggccgggctccctgcgtcccgctggtgacctgcccaccgtccctgtccatgccccgcccttccagctgaggacaggctggcgcctccacccaccctcctgcctcacccctgcggagagcaccgtggcggggcgacagcgcatgcaggaacgggggtctcctctcctgcccgtcctggccggggtgcctctggggacgggcgacgctgctgtgtgtggtctcagaggctctgcttccttaggttacaaaacaaaacagggagagaaaaagcaaa

SEQ ID NO: 57 - DNA, 33864 bp, Pan troglodytes; identical to SEQ ID NO: 56
  source 1..33864: mol_type = genomic DNA

SEQ ID NO: 58 - DNA, 18786 bp, Mus musculus
  source 1..18786: mol_type = genomic DNA
gaaaaagatctcgcgagagctcggcctgcgagcttgtggccgccccctgttccccgacctcccggctgcgctgcagcgtcagcttcactcggcctcggcgtcggtctgctcgccccggcgctccgggctcgtccgccttccaccttctgcccggcctaggccgcagccccgggcccgcgtcgcgccgccccctatgggccccggctgaggcgtcgccgctggccgtggagccccgatgctggcccggaggaagccggtgttaccggcactcactatcaaccctaccatcgccgagggcccgtcccccaccagcgagggcgcctctgagtgagtaggcggggcgtgtgaggacaggggcgggcctcggcgtgaagggggcgtgaccacaagtgggggtgtggtctgaagggatagcagcgcccgggaggacaggggctggtcctgagaatggtgtggatggaggtgagaggggcgtggagttcgagggctggaacaaagcctggttgggggtccgggcatggagggggttgtgggggggggggtggaggcagggccagttgggtgagtcacgtggtgtgtcagcttggcccggggaaaggggcgtggtctaaggtgagtggcctgtgagcttagagggccgtggcctttgaggactagaacaaaagcctggttggggtcggggccagagcagtgaggctggtggtcttatcaggttggccagatgggagaggggcgtggcccaaggggagagccctgagtcctgtgagcgtagaggggcggggcctcggccggaacttggctttagaaaagttggtctggagagtagcagtgcctgaggcagggtagggatggggacaaggtgcagggatctgagagaatggctttgggaaaatctctgctgttgaaggggaaacagggggcaaagggggcggcgtgggtacaagaggggggcaggtcctgcaggtgttgggaccaagaaaggggagctagagagaggtatgacttggagtaaggagaggggcctgaagagaggcagggcaattggagacccaagaaagaagacgtcctgaaggtggccaggagaatcaggggagcagtgaggctttccgggtgtgtgtgtgtgaggtgtggtatggttagaggaacagaggccgtgcggggtagcctagcctagcgcttaagactgggtaccaggtgagtggagcagttgaaggcatgacttgtctgaggaggcaaggctggccttgcaggggcagagggaaggaacctgttggaagaagcaaggggaggtgcaggggagagcctggcttggggagtacatggtgacctagtggaaagtggacagtgcccttggagatgggtgtgggggtaacagactcactatgatggggtgggatgagcgatgcagttgggtacaaagccttcctgaaaaagggtcaagtaaggacgattgatcaaataaggttagggataaggtttttttgggaggagaaggggaaggctggtcttcctgaagggaaaagaggggtgtcccaggtgaggacagcctaagaatccttgagtgataccagaccagggaggcctctgtcaggaaagactcggtgagacacccctttgtgggcatatcagcatgatggaagtgcctcagtctgaaggcagctgttgaggaccccagagtgcataaagatggcctggggtgtggtgttccaggaaagaatggggagaaggctttccagtgtggaacttatagtaatggcatgagggggacctgaggcgttgggtgaagtgcctaagagactgaagcccatgatgaaaaatgtcagagaagggggtgctaggtcttggaggttgaatcctgctagccaaagctaatggcttaaaacacccactgggagacatgggagggcttaggtgcttcccagcagctaaggacaagataaaggggcagccagaaggtgctgagtgcttcaagggctacatacagtacagcctggggtcctgtaagggcgactggtgcattctcatgctagcaggctcatgggatgtgtgtgcaagaactgggtgtgacagatggtcaggtgggtggcttttctgagggcctcccctccccttggatgaagatggaggtgggaacaggtttgtttgtttgtttgtttgtttctgagacagggtttctctgtgtagccctggctgtcctggaactcactctttagaccaggctggcctcgaactcagaaatctgcctgcctctgcctcccaagtgctggaattacaggtgtgcgccaccactgcccggcaggtttcttagttataaaagccaagccggtgctgctgaggaaggatgatcaattcaagccacactaggtcacagtgtgcattcaggggtggtctgggtagcttttagaccctgtcacaaaggatagacccctctacctagaatccaccagtgagggactggatatgggtgtacctagtgtgtgggtggcctcagctttgattagcataatcacacatacaattaaatcccaggcatggctgctgccactttaatctcctccctcttgggcctggttcttggctccaaagctacttgaaatgccctcataaagacagggtcttagcctaggccttggtgcacctggcctctgctcctttgcctcttcatgtagcctgggggtactgggggttctctgaggcagtttgtcatgattcctccatacctggagacccagcctctgagtctagtaatgtgtccatttcccacatgatggggatcctggagcgcaggcgtggagttcaggtccttggctcaccctctgctcctggggtgctgcagggcaaacctggtggacctccagaagaagctggaagagctggacctggatgagcagcaaaggaagcggctggaggccttccttacccagaaggctaaggtcggtgagctcaaggacgacgactttgagaggatctcagagctgggtgccggcaatggcggagtggtcaccaaggcccggcataggccgtcaggcctcatcatggccagaaaggtgagaaggttctgggtgggcatttgtcctgtcatcttctatggttggtcatatgatgctggatcggggtcttactgtgaagccctggtccatttggaatttgctctgtagaccaagcaggcctaaaactcacagatttttgcctctgctggattctctggcaggaatgtggcatactggtgagttctagcctggcatgcaccaaatgttcttcccttccaagacaaaactcttgccaggctggtctgtgaggcactgatgattagctacagaaaggccgtgcatggagtttgcatgcctgttagtctgtgatgatctgccagggtggtcctgactcagtggccagagcgctgggccagcgtacacacggccctggggtccatccccagtcccatgtaaacccggcatgaagtgcacgcctgttatcccaggatgatgagaagtgcaaagtcatcctcagcagcatcctggtccaaggccagcctgggctacctgaggctgagcatggagagaaactaacacaataaaccaggtccgctctgcagagcagcaggactgatggggttccgtgctcagagcagagagcttggttctgttgggatggtgctgggcatcaacccagtgtctcagtacactgggcaggctctgctgagagagagtgggtgcctgtgatggtagatttgtctgctggttggtaaggggtcagggaagatgggcacgctggagcctcagcaggcttgaaggctacttggaagcagtgacctgctttctaccttcagctgattggatgaagtcaccctgtcacagggtcacctgcttttcttatttgaaagcttaccactttgtaggttgcccattccagccacaaggaggctggtgtttgtgtgcacactgggctccaggaggtcggtgtatgtaggcaggaggctggtgggtgtgcacgcaggattctagggatttggcaagaagatgaagatcctcagcctgtaggattctagccagctgaagatggaccctgcctgcctgctggcttatctcccttagtgccaagagtcccctcaaggtgtggaacagtgagataaggacatcaccaatggtgacacctgcacatcagggtgctggtgtgtcaacacacctgacctttcttgaagtctctagctggctgttaagcaaggggagccacctcatccccagccagagtcctttgctggccctgaagattttgctttggcatcctggactctccacccacctcatgcagaacgctgctgtgacattcagagggcagaaggggaggcctgaatcacccgggagctccctctcatcttccgggcagctgtgatgtgctggctgcaacagaggtgccgattgtgtgggagctgagcctcagcagtgtctggacgcaggtccctcctgatgggcaatgttgagagctgtgtgcatcccctcagctagcatgccctgtctgccacatgggagtgatcatcaccaacagtggacagacagtgcaggaggtccaacatgcccaatccatttttgctctttgtgactggtccaacctctagtgacatctttgaccctctgtcctgggccccttgtggcttgagcctggtatggtgagcagaacttgtgtggggctgtagcatacaggctggaagctggttctccacagctagtagcgtttttgtccaaagctcgtgcagcctgaaggcctcatctccatgccaactgttccctgacaagagcaccgtgcacagaactgcttacctgtgtgtgattgctggaagctggtgacaggctaatggcacagtgagcaaggcaggagcaggcttaggattgcatgttcttggaaacttctatgtcctctggtccaggctctggacaggttgccatggcatttgtcaaagacagagcctccagaacctgctgtggtataggctccgcttatcttgcagactgtttgtagtcacagaggaagtatcttccagcctttgcaccccatttccacatttccctgatagatcttgcttacaagctggctccactaccagcagtgggtacacagagacctgcagtcaggtccatgcaagggatccaagtcctctggagtggcagagatctaagtgtccagggcctatgtttgagctgcaccaggtggccaccatgcatttagactgctggagacagatgtgggccaagaggctaggaccacacattgccacccaaatggctcctcagcctctagtctgtaccctgcaggactaaggaagtagcagacaagtgtctggatgaggccttttgagttcctcctccaggctcagcatggaaagagaaatccatcccggctccttggctgctccctggtactccaggcccccagggctccaacacactggcacattccactgactgcccacatttgcttccagcttgcccaaggttttcagagcagacctgggccccacgggccccagttatgtgggcaccaagaaatgcagtcctatcatatggtcccatgtccaagcacgtggacttcctggcaggaggcaggagaggggattccgtacttgtcacagttgtgaagtctgtaaagcatgggaggcccgggtacaggaggtaggttcaagccagtctgggctactgtgctaggcttggttgagcatttggggttttaaaatatgtgtggcgctcagccttcgtgtggaaaatactgttgttttgatgcaagaattttttttttttttttttttttttttttggtttttcgagacagggtttctctgtgtagccttggctgtcctggaactaactctgtagaccaggctggcctcaaactcagaaatccgcctgtctctgcctcccaagtgctgggattaaaggtgtgtgccacctctgtccggtgcaggatctttttgagacagggtcttattacatagccatggttattctagaactcactctatagatagaccaggctggcctcaaactcacaaagatctgtgccacgctgaaacaagaccttgctctgttgcccctgctggcctggacctcctaatcccactgcctcagtctccttaggtttgtcatcagaaatagaggagtagtggccccatactgggctctcgttttgtggttttactttggtacacattttaagttttttttttctttttagtatagaatagagtttattaagggtatgaggaggggagttaggagggtggtagaggcagagaaaggcagagagaggaagagtagagaaatagaggagtagtggctggccatgagcacgtgggggtgggggggagagggaagggagggaaggagagcaagagaacaagagcaaggagttttgtttatgtatgtgagtgctttgtctgcatctatacctgtgtgccagaggaagacattacagatggctgtgagccaccatgaacctctggaagagcagctagtacttttaaccactgaggcatctctctaacctgtgatttacttaaagaaaaaaaaagtttgtctatgggtgcccagaggcaggaaggaattggagtcacaggcggttgtgagcagccacacgtggtgccagaaacattagtctggcctctgcaagtcctcttaaccactgagccatctctgcagcctgttctgtggtttctgcgtgtaagagtaccgagattgttggtttccactgaaatggtgcccgtggacagcaggcgctgcctgcatggctacttggaggatctcccagatgcaggtacctctgcaccaggatgaagtggagacataagggttctttggaaagtcagttgtgttagatggtgttttgctggggcaaacacatgaagatgaaggagtgttttcctgaagtagacacgggtatgaaaggctagggcagagtcatgaagaaacgtttcgctgaagcaaacacaggagagaggatgttctgctaaagcaagcatgtgaaaggacagatgatgaaggattcattgctaacaacacacatgtattagtccatcttatgttgcgaagttgagctccatttgtcaggacttcagaaagagaaacgcaccagaaaacgtcaggtggtgtactgaggcaagcgccatagagcacgtgtgatgattggagggagtgtaaataggactcaacagactgtgggaggagcttgttggtagagctggctgtgcagcatcatggcgctgagagtcacagcttctcctggtgttcctgttggccttggtctctcctgttgactcatgctgaggcctggctgactctgctaagttatacattactgctgttgtgtgtttgctctcctgactctactgaactggactactggtgtattcatgaaaaatgattgcaagtagatcaagctgccactgctgacctgtgaactgaactgctgatttccagacaacacagatagggttgctccaaagaacctttcttttttgtttgtttgttttttgttttttgagacagggtttttctgtgtagccctggctgtcctggaactcactctgtagaccgggctggccttgaactcagaaatccgcctgcctctgcctcccgagtgctggcattaaaggcgtgtgccaccacgcccggcacccaaagaaccttcctaaacaggtccacttctcccgtatccttcctttttcactacctctgctaggtggtgggctagaagcgaagtgaatgagtcattaaaagtaggctttgagggctggagagatggctcagcagttaagagtactgactgctcttccgaaggtcctgagttcaaatcccagcaaccacatggtgacttacaaccatctgtaatgagatctgacgccctcttctggtgtgtctgaagacagctacagtgtacttgcatataacaataaataaatctttaaaaaatgttaaaaaaaaaaaaagtaggctttgagaaaactatagttacaccagaccctttctggtatgggagccagtgcgtgacctgggaggaaggagaatcatgacatgttcccttggcctgttgggatcgaaagccatactgggaaccttgtccagaaccctgcgggtcctggaaaactgaccacagggtcggggcaggacctacagggaccacaaggtcacagggacacttcctaagcctcttacctgtcccaagctcactgactccctcatgaccccagtattctcctctgggtcgctctgtgtccaccctctttgtggaaaggcctccagcttgcccagacttcctgctcagcagttagaccaggatgcctcgctgtggtttctgtgaaggcccctagcaggggtttccactgtaggatgtctctctacctcagacccttgccttgcccatgcaaagagcatctctgtctccaggctgcccacgtgaccacagcctacagtggagcagtagtaggacttgtttcgtttttcctggtgcttggtgtgaacctggacctaccttgcaggctctacctgtgcttcctgcagagctacagcagactctggtggtgacatctggtctccctggcaaatctagagacatgggtctgctgtgtggcgctcacaggcctggccacagttgttccccactgggcactgggttctaggcttgtggattctggttgctccctcacagtgccttctctgtttggccttctctctggaaggacagtgagtggaaggatgacactgctctggacagcttagagtcctcagtggccaccaaggcctgtgggaatggtgggtctggaggaagggtctgaggggctgatgttgccttgggtgcattgggtagcttggtgtatcttttcccccacaggaatagaatagtgacattcccttttcaaaatcttcatttttaaaccagttttactgaaaacgtgaaaacattgcatcaccatgctctgtcatgctagcaatctctgtcatccacagatccatgcctgggcctttccttctctcgggtgtgtgcctacttttaatgacttcaggactggggcttaagggcttgctggccactcgccccttcctctttagtagctgctcttccttcctgtagctgatccacctggagatcaaaccggccgtgcgcaaccagatcatccgggagctgcaggtgctgcacgagtgcaactcgccctacatcgtgggcttctatggggccttctacagcgacggcgagatcagcatctgcatggagcacatggtgaggatgggagggagggcctgcttaccctctgcatctgctccaggaagcatgcaccccctgtgggaagtgggttcctgttccatggctgtgtgctaagctctgagatggaaggatgcagccaggcctgtgggtccccagcttcagatgagctgcactcctcgctttctaggtaacagtctgggtcatcagagttgggcaggatggagaacttgggccaaaaagagaccccaacctgctgagtcaggtgcaagaaccctgcgactcaccaaaaggcttggcagctgctgtggtcttcaactatgcttcagaccattagggtatgggaagcaggaactgaatttgagaaagatgcaggcgactgttgggtcccctcacacctagctgtgagtctgcctctcctttgagcctaccgtgcttgcctcagggataagtgaacactccctccaatcctttcatagatgttgcatccattgggccacaggcctcctggtcccctgcaggaaggggactccagcctaaggaacatggctctcattgcccgagtggctagggtctgtactataagagacacaggtgtcctccatgcctacaggtgcctctcacactgtgttgggacaggaagctcccagaggcaggaggattgccttgaatttgaggccagcttgagctacatagcaagacactatgtcaaaacaaaactgagccaggcaacggtacatggccaccatcctcatacgaggacgagaaggtcatatatagccctatctcaatgacaagaaaaaatggccactctgccctgctggctgatgcagtctggttttaagtcataggttacatggtataaaggaaagcctacctttagggattgggggatgttgggtggccttttggctggtcctgggcctagtccactttcaatttcctgtaggggtgacacagaaacagtgttcagctccagagactgaagtcagggagtgactatgccaccagtgtggctcccagacctggggtgcaggcagcagtgggctctcctcacttgctattattggcttgtgttaggcagccccacccctacccctcagcccccgccgagagagaacttgtcactcaagagtaggaaaatgcagttgttgtcagtggtacagctctttgggtaccacactacagtggtctacattcaacaagacttagaaagggcaagatgacaccaggccatagctttgtctatgcctgtggcctaccctgggctaattggaactgtggtctctgtctgaaagcttgggtgcacagggccttgtcactgatctggaatgttccagccccagcttgaaaaaaggctcggggagcgggggagtggtggtggtggtggcagaactgctcaacctatatctggaagccaaggaaaagaggagagagaagctggggtcctgctgtcatcatccaaggccagacttccttctaggccaccctctcaagaggccctgccctcttcctactgccacacttacgcccagttagcacagaagggaagctcttctgggtgtccttaagtggggacacctgctaggagcctgctggagagctcacactgtcatttgcagtgtgcccatggcagggagagcaggaagttctgggggctcagcctgggctgtgtcggatctccttaagaaaatgtgttgaggggctggtgagatggctcagtgggtaagagcacccgactgctcttccaaaggtccgaagttcaaatcccagcaaccacatggtggctcacaaccatccgtaatgagatctgactccctcttctggagggtctgaagacagctacagtgtacttacatgtaataaataaataaataaatctttaaaaaataaaaaaaaaaaaaaaaaaaaaaaaagaaaatgtgttgatgctcgatggaacagtgagtttctagagtcctggaggtgtatgcaggggctggccagcagcactcaggtctccatcttgccccgggacactatgacctggttaagatcacccaggctcaaccctggagatgatcccaccagaaactcagccaaatctgtcacactcaggaacttctaggatagagttgagagaggccaggcagactgctcagccctgcagggttcagtgtgacctaagagaaataatgaccttgctgtcctcactagatagtaccatgtccttccctaatgcccagccagtgtcatttccagtctgtccataagaacaaaacatagtgctggaccatgatagtgcacacctttaatcccagcactctggaggcagaggcaggtggatcactgggttcgaggccagcctggtctacagagcaagttccaggatgatattcctacatagagaaaccctgccttgaataacagaaggggaaggagagagtgggtggagaagggggataaaacacaggattccagtgacccagtgcccagctggaccagatgcactgggaggctcgggcagctcggaggaggccccttcctgaccttaactcctgaggtcttgctttgtgtcaggtcagacaccagctccacagatgtcactggcagtgactgcctagtctcctggcccagctggagtcaggaccacaccttaggtgtaaggaacagccagggtggtgacctgcaggccacctcatgcccttttatggggcacagcccttggacttcaggtctggtcatcagcttatcccaggagcaatagctgtgagccagtcctgttttgtcctgcccaaggacctcctgtgtcctcatagtccttggtgcaaggagctggctcttgacagaagtggttctatcattcaagctcagagctctgcagcctcccatacaaatacatgcttaggaacctggaaaagcaagctctgcagggggctgacagggttggcctgcttggggtttgggttgggcttcttgacaaagccagctaccagctgctgtcatctctgcatacaggatggtggctcactggaccaggtactgaaggaggccaagcggattcctgaagacatcttggggaaggtcagcattgcggtaagttggctgctgctgcttcctgggagattgagcaaatcacatccccatccatgtgaggtcctctgtgggccacaccatcacctggggcctgtgagcacctttcttcctggataagaatgactagttgggctgcccattgtggtgtgtagtgactgcaggtcagccagggcaatacagtgagaccctgacttaaaagaggaaataaaaaattccaggggagccgggcgtgatggcgcatgcctttaatcccagcactcgggaggcagaggcaggcggatttctgagttcgaggccaccctggtctacagagtgagttccaggacagccagggctacacagagaaaccctgtctcaaaaaccaaaaaccaaaaaccaaaaaccaaaaccaaaaacaaaataaaaaaactatccaaaataaatgcataaaaaaaaattccagggggaaaaaaaaagccgggcagtggtggcacacacctttaatcccagcacttgggaagcagaggcaggcgggtttctgagttcaaggccagcctggtctacagagtgagctccgggacagcagggctacacacagaaaccctgtctcaaaaaaacaaaaaaatataacaagacaagcaaaaaattccaggcatggtagtatatgcctgtcacctcaacagctgagggacggaggcagagatgcagtgagtttgaggtagccctgggccctcactttgaaatacagtgtccatgtgcttgctgcaggttcctgtatgggacttggggatgtatatatcacatgcctgccatggcactaccctgtggctggggaggctcatcacagcctagccatgctgccctggacacacaggctacccagctctgaccttcctgtaggtgctccggggcctggcctacctccgagagaagcaccagatcatgcacagaggtaagcgggccaggctggcgtgcacagaggtaagtgggccaggctggcctgggtaggacacagtggctgcaacctcacccctgaccctgtctgcagatgtgaagccctccaacatcctggtgaactctcgcggggagattaagctgtgtgacttcggggtgagcggccagctgatcgactccatggccaactcgtttgtagggacgcgctcctacatgtccgtgagtgtcctagcctctgaacatgcatcctcagtggggtctgtctgcttgtgtgtgggaccctaccctgttgctaccaaccccagctgtgttctgtttctttgacagccagagcggctgcagggcacccactactctgtgcagtcggacatctggagcatggggctgtcgctggtggagctggccatcgggaggtatcccattcccccacctgatgccaaggaactagaggccagctttggccggcctgtggtggacggggcagacggagaaccccatagtgtctccccgaggcccaggccccctggacgccccatcagtggtatgggacattacagctagctggagagggatgggtgggggatcagctgccaccctgatggccctctctgtaccagctgtcccctgctgtggtcagcagtcctcagatggtcctgggctttctggggacagagttacacgcagcgagaatctcattctccgtccagggcagctgcacctgttgctgccagctggaatgcccagaaactccactctaggtcaggcctcagctggttgctgggtttcccgggcatttctacgtgaaaatgtgtaaatgggggcaggagtacaaagggagccacccactgcttgcagcctacacatctgtagcctgtcatccaggaagccccagatgcaggtaacctggtgacatccctggggccttggtggcacaggaagcacagaatggagggaaactagtttccaggggacctaaggagacaatcgagcccttggagtggctgccttggccactgaggggcagggacgaggtcctggtgtgggacagagctgctgcagagcacctacctcctgggatttaagtcatggaatgggtgactttgtaactgcagacacacaacataaacaccactgtttgcttcctggaagccctgcagtccagtggttagcatatccacagatgagagtgtccatcacctctatctgattcttgaacattcagccacccctaaaggaatcccattcacggatgctatcaccttgtcacttacctggccctagcccctgcacacaacaaccccaccccacccattatcctgctgtggacatttcctgttgtggactccacactatgtaacttttgtgtctaggtcttacaaagtaccatgtcttggagttccctgcatgtagctggactcattccctgtatatctcagtgtatggtgtgtgcttcacatgcctttaaagagcagagagccccctccccaccctgtgccccacactggctgctcgccctgacaccagatctcaggacacagtcctcagttggctccaatcctttggcgagctttggtggtgacactaggccggctcactgcctttcttgtcctagtcccaaggcagcccatgacaagatgggcaaatggtgcagttcagctgctgggcatcagggccttgggcaagggtcgacatccacctgttccgaatccccagcagctgctctgagaggtcacattggtgttcctgctgagttgccagtcccctcccccacccacggagcatccttcagcctgtgagagtgtagaagtatatcctggcagaaggaccggctctctcaagatttgtgtccctcacagttatgtgttctttgtactgtcaagtaggtcatgggatggacagccgaccggccatggccatctttgagctgctggactacatagtgaacgaggtatgtacccttggccttcaggtacttcattcagggaattggctggcccaccctggagtttcctggggggaagggatgttgtgggctgcacctctgcagtccccagtcagaaagccatccagtgtcttcatcatgcctgtgatccaagctacacagcagctcaggcaagacggttgagctagaggtcagtgtgggccagcctaggccagtaatgtggcttgctccatagaaagaaggctggaggcatgggagagtgaattccttcctagaatcctcctccagtgaggtgagggactggctcacatccacaggcacagaaagtggctcctagggcagactaattggaacccagtacccttgtgtccaaggctgaggcaggattgccttgagacacatagtaatttccagaacagtcttagctacagtgtgagaccctgactcaaaagcagccagaaatagaacaacaacaaatccaagcaagtctccagagggagccaaagtcacatgtgaatgtgcatggttgtgcccaggggtgaagaacactgacagaagatgggctttgtggcctgggacagggctgccactgttcctggcattgatagtccagctcagccagcacttctcccaggaagtctggagccaccatcaacaggaagggctttaccctgtaccacaggcatccccacccactagatagtgttggtaaaagctgaaccggaggagcctggccagatgatggggtggccagcaattcctgcagccacctaagtgatccttccctgtcctccacagccacctcccaagctgcccagtggtgtgttcagctcagacttccaggagtttgtgaataaatggtgagatgggcccatgggatgggtggggcagcctcacactccagctgtgggtttctgggctatggtgtgcagttaggggtcaaagtatttcccaaaatcacacagctgggtgctgttgccttcaggctgaggatccatgcatggcccggctgtgtcctgcgctcccacacaatgggcctggtggtgtgggggcagctgagctgctggactccccagccccttgacgtctgtggtgtttctggagcatggggctccagaggcaggccatgtgtgtgtcccccaaggtgctgtctctgcttggtagtggactgtgccaccttgtatctgcctcccaccagggtcttctccttttcagtttactaattcattaggaatttagcaatttagttgtggggacataggggctagagatgcactcctgacacaccagcattctggaggacaaggtcatcatctgctagtgagttcaaggccagcctgggatacagaagaccctttcacccaaaatgtaaaaacgcagtgctcctggtgcgagttgagtcatgcttcacacacctgagccagggctcctgagtaacatccatgtcttctccctcccccagtctcattaagaacccagcagagcgagcagatctgaagctgctgatggtgagtggaggtggctcctgggccagggattggggctgtctgcatggacgggaaaagtcttcacgctgccagtctcagcagtctggtgcctgaagtggtacagaggtgagggtgtgcttcaattgccacctctcacttctcagaggccatgtccttcatagccatcaagggcttaggccatctgtgaggctagggactatctgagatgaaaacactcataggcctgcaccccgagagcctccacccacagggtgggacagcagagcccagacacacacacacacacacacacacacacacacacacacacacaccccttcctggacagaccgagtttgatttaagcaccatctgtctattttttaggcccctaagaaagcaagccatgctaggcacagatgtgagcaccactgctccaccccagaggcccagagatgaacacaggagtacacacccgccatggcagtattgaggaggccagctcaggcacacacccatcttcccagcactctgggaggtgaggcaagaagatgaaaatgtcagggtcaactttgactatagaagttttaaggccagctttggctacatgagcactgtctcaaaaagaaaaggagcagttgggtggtgcactgcacacctttaaccccagcactcaggaggtagagccaggtagatctctgagttcgaggccagcctggtctacagagtgagtccaggacagccagagctacacagagaaaccctgtctcaaaagacaaaaaacgtagacatccaagataggggaatggggtgggtgcccttgctccatgtaaccctgccatggcctcctgtgtcctttgcacctaagtctcctctgccaaggagtcagcagtggggttttaggggcaagcctcctctccctgggaaacctgccccaggctctcatagtcacaagatggatcagagatagccaggccacctgagcaggcctgggtctcaggctgtgactgatgccttgcatctttcagaaccacgccttcatcaagcgctctgagggggaggaagtggacttcgccggctggctgtgcagaaccctgcggctgaagcagcccagcacacccacgcggactgcagtgtgacagccagcgcccagcagtctgtgtccttgtccctgtcggcacagtggccgctgcctctggggacagtgatgctgtttgttgtggcaggggacctatgcccatgcatttgaaaaccaaacaaaatgaagaaagagaaagaaagaaagaaagctagctgcggctgtgctcctgcccattgcttgttgtgacctcactcagcaggtggaagaagggcaggccaagggatgaggagacactaccctcacctcccttcctgggccccagctcttgcagtgcacatgcagcctccttcctagcagggggtgtgggagcaggggacccctctgggctccagggagcatagctaactcagcatagtgcaaaggcagtgccctgcatgagatccggaggagaccccagtggatctgggtcatggaactcaatgagagcctcgccacagcctgcagccaccccaccagggtcccacctatcccaccagtcagtcagactcagccacagtggcctgtaagggaagcctgaggcctcctgcccacaatctgaatgaagagcattcctgctaacacagagagatacacttgctaatacagacctggtgcccgagcactgtacaagtctggggagtgtctgcaccttcttgctgcccctctcagggatgacaaaagtattcctttttcagatgccccaaggaagccaccatgtggggcttcacatgctccagccaggttgtccaagcaggtgccgtccaccacactgctggctgctcttgcactgtgcagggacccctactgcctaggggtgcccagtgtggtgtgggagagcaatgcctactctccgcctctgccatgagctgcatccatccctcacattcctaaatactaggaaggctgagtcgggaaaacgacaggttttgggccactgtgggctacctagtgagaatgtcttacatcatggaaatggtgcaatcaca

SEQ ID NO: 59 - DNA, 18786 bp, Homo sapiens; identical to SEQ ID NO: 58
  source 1..18786: mol_type = genomic DNA

SEQ ID NO: 60 - DNA, 27112 bp, Pan troglodytes
  variation 11059..12190: note = n is a, c, g, or t
  variation 22822..24035: note = n is a, c, g, or t
  variation 26221..27012: note = n is a, c, g, or t
  source 1..27112: mol_type = genomic DNA
ccgcgctcgcgcccggacgcggcggcccggtgagtccccgcccgccgtggccgcccgggcctggatttcctccccgcgggccgggccgctttgttcgcggccggtcgggccggggcgcgagccgcggcgccgccagaatggaggagcgggagcaggaagtggccgagcgggcctgggcggggagggcgcggggcgcgcgggcccggccaagggagggcggccccacgccgggtgccgggggtgcaggctgccggccccagcctccctcatgaccttggggaggccgctccgccgggcgaggccgggacccgagagaagggacgccgccgggcctggagccggggctcggggtgcccctgcgggccgtggggctccccgggcgctgggccagcgaggcagccggcggaggtgccccggggttggagaaagactcgccgcggccggccttcaagtttgtgggagggccccggaaggagacttcatttcccacggacaaaaagttgtacgtggtggcggggtacccaggctagccacaaaggactgtgaccctcctgggccccggaactgcttcctgtcttgggtgggccctggaggtcctgcccgcccatcccagaggccaaggcttggagggcagctggggcttgccccttagattgagtatcctggggcgctagcgagcttggtcctgtcgggacggcctctgagtgctgccttggtcagcgggtgggcttgggcccctgctctgcagccagaggccgccccactttcactcctgggtctctcggccttgctccaggcggccacttcttgactgctttgagtccctcatccgagcgaagggcggacggagtccattggtgggggtccggttgcctctcccgggagctgtgtagacttctcctacaccagggttctggaggcagatggaggagccctttcgaaacacagagtatttttttttaagttgtgacttaataatagtagcaagaatatgtgcttatggtaaaggcaggcggcaggtacagaggctgtgggaagttggggtccttccgcccccacgggcagccctgtgctggcctggtgtatacgtttctgtgcagacgtacaccaccctgtgtgtgcacagatgtatttttacacatggctctggacagctgtctgactctgtcagcagcaggccttggaggggctcaggcccgtgtgggggtggggggacatccagaggtctttgagtccagccctctgcctccaggccacgcccactcagtgttgtcagagccccctgtgcctgaggcgtgcgcggctcggagtcctgccctcggagtcctgcggtgccttcctcgagtctggcctgctttccatcctgctaagtacttggggcagttccctctttgggtaaggtgtggtcttccctgtcctggcattagacacaaggcagtgggccttcctgccattctaagtgtagcttaagacaatcagtgcaaagcaaccctttgtgggtgtccagcccttgcctcaggaggccagaaaggtggcctgaggggagagcgtctaagctggctgtggaaagacccatgttgggatccattccacagaggtcgtcaggggtctctgcctggcctggaggtcccagagaggaccctcctcccctcaggaaggcccatctggaagggtagcagaggactgctcacaggaagagcatgcgaagtgctctttctggggatgcctgtagttggtgatgtgggaactgggttttgagggatgcctaggagttcatccatcagaggggaaatgaggaagccatgcaggatcaatggataaagtgtgctcaggtgagggttggctggtgggccgctgcagggcgggggcctgtccagtgctcccctacttacttgctgcctcccgactgctgtaattatgggtctgtaaccaccctggactgggtgctcctcactgacggacttgtctgaacctctctttgtctccagtgcccagcactgggcctggcaaaacctgagacgcccggtacatgttggccaaatgaatgaaccagattcagaccggcaggggcgctgtggtttaggaggggcctggggtttctcccaggaggtttttgggcttgccctggagggctctggactcccgtttgcgccagtggcctgcatcctggtcctgtcttcctcatgtttgaatttctttgctttcctagtctggggagcagggaggagccctgtgccctgtcccaggatccatgggtaggaacaccatggacagggagagcaaacggggccatctgtcaccaggggcttagggaaggccgagccagcctgggtcaaagaagtcaaaggggctgcctggaggaggcagcctgtcagctggtgcatcaggttagggaggctgggaaggccttttggggatgggggtgatttgtccaaaggctgggggaggtgggaatggggaggtgagcaaggcagcagctctcagagcctggctgttgcgggtggtggtggcaggggctgggggctctaagcctagaataaggagaggcccaggtccagggaactgtgttcaattacatggattttacacttggcagccctgagtgttttggggagagggaaggcgggcttacacatggggaattgggagcttagagggatggcagcccacctgggaaggcaggtgcgggtggagcccccaggcacgtgcagtgggtctctggctcacccagggcgaggagctgcccttagccgggcatggcctcacattcagcttccttcgcttctcccagaggctgtggccaggccagctgggctcggggagcgccagcctgagaggagcgcgtgagcgtcgcgggagcctcgggcaccatgagcgacgtggctattgtgaaggagggctggctgcacaaacgaggttagtacccgctgccagggctgggcctggggagggagagacgggggtagtagccccagggtctgtgagtgcctgtgccctgctgcgtgggaggggctgcctcccctggggctcctgggctggcctagggtgagtgtcctgggccccatgtcttcccacggcatggagggcacggcctcggggaggccaggaggatgaggccctgtgcagggccggccatctgagtggcttcctggtgtgggccctggcaggcgggggagctgctgccagcctctctcctggctttcctggaaggcagcgaggacactgggctgttccagggtctggcacgctggcggcccagggcactgcccaagggctcctgagggcagggcagggctgcttggcttggcctggtgcctgcttcaggcctgagctttgggggtggggggaatccgtaccgcctgggcacagggcatgtttgccttggagctgcagagctggctgagccaagtcccccagcccctgtgtccccctcctcactcatttggccttgcagcctatggaggaggtgctgcccgaggggcctggccagcagctgggtgggatgggagctggggacatagccccaccccttccaaccctgtgcaggcccttctgcctcacccaccctccattgctcagcggggtgcggtggagtctgggtggctgttttgctcctctgtcctgctcgggtgggcttcctgttcaggtccaggtcctctggccaagtcactctcttctgccccaggcagaatcggtccgccctctcctgacttctttttccagacttgttccctcctaagttctagtgatctcatgccagcagcccccccgctttacgtacaccctctagcagatgggtttcacatctggtagtggggagaccccaaacacagctggagcagacagggaggtgtggcaaaagtaggtgtcacaagatggggcattgtgggatgtataggagctcacagaagagcaggcctaaggagccacaggagcctgggggtggggtgaaggagtgaccgagatgagatgctgggggaatcaggggtgtggctggctgtgtgtttggagtgtttgagtgggcagctaccagtgatggcacgcggggcctcgagatgaagacaaggaggctgcagacgcctgtggtccttggggagcttctggccctgcttccccccaaggcctcctgccccatcctgccttctccatcccctccccgtgtgctgtcccctgcttgttccccaggagtcctgccacctgtgcctggaggtcctcacctcacctcacagccctctttggtgtcagggaccccctgccccgaccctggccctgttcctctctgtgtcacatacagtctgctgcctggggccgctgcttctttatccttggcaaatgtgtgtttgttgatagactgttggatctcgggctgacccaggagatgccagggccttgactgcccaggggcccaggccccagttactggggcacccatcagccagctgggcctaggcaggagtgctcccccgaggccagggtgattttcaggttgctgctgatgtcatgccttcaggaggggcctggcagggacaggacatcaggcccagtggggcgtccagagagctgagtttgaaccctggttagccactctatcaccatgtccctttccaagagcaaggtcattgagctccttgggcctcagtttccccatctacaccagggagcggtggtgggagagagacctggtggagtggagaatggcttgtgggcagccctgagttggggtcctgccagcctcagcagcctctgggctctgtcatctggcccctagcctcaggccaggagagagggtcctgtacctcaacccccggctcttcctcctccatccccagtgtagtgggcgctgaggatgggaggtggcgtggatatgacatatgcccttggcaggcatagcccctcttgttgccaagagcaggtggcgtccacccgcacgtccggctgctgcttgcggaggaaagcctgtcctccggggcctgccgcatttccccactcccgtccctggggtcccctgtgtgtcttgcagatgtgctgtgccaccctcctggcagggccagccccacccgcaacactggttagaggtactagctgccttcctgtccctagcggggctgtgctgggctgaccccacccgtgcttcacggtgctcaggcctggctgggggtggggagggagggagggacgcagtgactgtcctccaggcccggccgcagccccttgcagacgccctgttccactcccccccaaccttgctcctgcaggtcagggtgcttgtctcggaggctggcccgcacctgtcccctttgccgggactccccacggccatggcctggggcactttggttctcagctgaacccccagctgacaatcccaccacggctacttgggctggccacacgtggcgtgatggtgccttcgggggtgatgtggtcatggagatgagaggggacgggtatgccctgtgtgtgaggggtggggtggcagtgtctgcaggctccttctcctgctccttgggaggtgagcgtcatctctgggaagtggcccaggctgctttctgttgttctgatgtgtgtgctctgagtcagaggagcttcagggacagaagggaccgggcatggggacacaggagttccggctgcaggcctgtgtggacctgtggctggacccaggcgaggcctctaacagggagatggttcctggagggtgagcttaggctgttaagggcaggagctagtgaggaggctggtggggcctatagggacggggggccagatgtcccctcctgtttcggctgtctcactggataagcagcccagctcagctctggccattggtggtctggtgggctcagtgttgctcagacgtttgcattttcaaagatttgttctgttgtgtgaagtctcctgatttttgaaggttgacaattttaaaaaatcaaccctgggccagggcgcaggtctggctgaactcggcctccagcctgcagttttccttcctttgatagctccgtgccaggctttggccagaggccgtgtggctcttttgaggtactttcccccaacagcttgctcaccttgcccgcttgccccagaactcctggggccgtgcaccagcctggctgcagcctagccccgtggagagctgccctggtgcagccccggcctggagcctgtttttgtctactcacggctgtcttcctgagcgtccccccgtccacatggctggaccaagtgggtcaggagagggccgaggcgggtggccgggatgctgggacccaggatgaggcgctctgggctctcgagacagggctgggcctaggccaggagtgggtgccggccgcaggggcaccacctggactccctcaggctggtcgctgtctgagaggggccggggaagagctgcaggcctggctgccttcggcaggctgtgacccagcaggccaaggccgagtgggcggggatcgagggaagctgcctgtggcgcgtgggttatgcggcagacgctcctgagtgtgtgggcagcgtgtccaagccacggatctgggtgcctggccgggcccgggtgacacgggaccatgtgtccatgcggctcaaggagggtccagtctccggacatctgagtccttgccatgccctaccccgggcccatgcctggcatagaccccccagtccaggcctcagggcagccccctcaccactcctgctgagttagccccaggcgtcccggtggggagtatggaggctggtctctgaccccaagcaggtgcccaggctgggcctccttcccaccccctctccccgccttgaagtcctggcactggctgtccctgcggggggacactgaggcagggagagagtggttctaccccagtgtgttacttcgctttggtgagtgacatagaacctcactgcatccccagctgctgctcagccatccagctggtcctggggtccctgcgtgaggtgggggacctcagagggtacaggccactccccttcatcctggaggaggccttggctttgctgagtaaacgcccttgagaagaggtggggggctccgagcccactccggagagcagctgctcggagggccccgcagggctaattgtgtgtgtgcaaatggaggctgctcattaccccaccaggatgaggggcccagcaggaccctgagggagggagcccgcagactctcccctcagcctgtgggaacctttgggctccaggccagggctgcctgtgcctcctgggcctcagtttttcccaggctgtcaggtgagggtcaaccccaggctgcgtctgggtggcttcagtgtgagccccgcgggccctgggctggttagtgccaagctccgcctcccctgggggagcgttgagggtctggaatggcccccgtgggcaggccagggacagagatggggaggcaagtgtgctggctcctggtgggagggctgggcagagagtgggggtcccaacagccctgggcctacccgggagaggggcaggaggcacaggctggtggaggtcatggcatggctgtggtggaggccgccagcatcagggaggttcctgttttgggagcttgttgagttctcacttcaaaaacaacaaaagaggaagccgaggtggccttgagtgggggtgaggggtcactgctggccccagccctggacctcagcccccacgcctggtggctcctgagtggacagctcttcttcctatgtgtttcttggtcactggccctctctgggcagggatgccctgtggggggctggactccgggaagggaaactgaggcccaggagagtggacagaatgtgggtggaatgattcctgtgctggggcctagacccctgcacaccttgcgctctcaggagaagcctggctgggttgcatcaggccgggttcctagaagtcctgcacgaggctgagcggagggaactggcgcggcccccgctggcgtcccctctgcctgggcacacccggcccggcttggggccagcaccttgccctcgggccctcccatagctgagactggtggctgtggctctgggcctgctccccaggccaccctgggtgggcagatgcctgctgcttctgtctgcttggaccactgtgcctagtcccatggcctcaggagaaggttcccccagcccagcgctggggccctgggcaggttggcagagggccctggggctccaggccaggatggggctgttgggcgaaccctaggccccttacttcctcatctccaatgggagttcccttccctgccatgccgcctttaggtgtgtcttccttgaaccttaaggaatgacaggtttggatttcagaaacgttggaattgagggggttgggagttcatgggtgactctactgccaatgttgggggctttggggtgggatccttggggcgctgtgtttgggctcacacaccccccaggtgggcccggtgaccgcagaccccacccataccctgtaacctggcgggcccacctgcccaggccctcagctggttgtccagctcaggggtggagacaccccctgggcaggcctggcggggaggtggctgctccctgggcctggagaatgcagagaggccctttggctggcccgggtctggctggcctccccacagactggggccaggggcacagcagctaggtgtagggcgcggagacgctgagcgcacaggcttggtgaggtgtgcggtgaggccatgggggtcagggccacagtgtcccagcaggccaggggatcagaaggagcaccctccacagctggccgtgctctgagggccctcctgccccaggcgtggctccaagttggggcagaaacaagagcaggccgatggtggggagatggaaggcccctctctggcgggtgcttcccatggtcggtgtggaggacgaggtccctactgcctggttccagttctcccagcaatgcagggcacttttcctggggtgtcagggattgagaggccagcactggagcccttcaaccgccaggggccctgcccaagagagacgggaggagggaggggctgtgggcatggctgcgtgcccccggccgagccccggaaggagcctgtgcccgtgcccacttcctttcccgagggcagtgtctacatgtgggacactgtggccagccctccctcgcagcaggcgctgtgtgctgtccccatgcccagcttcctcccacgcagggagcgagggtgagggccctgggaacccaccgggtggagggcacttggcaaagcctgctgcaagttatggggagagtgggcgggggcagagtaggaggtgccagggaggggctgcagcctcatctgcaggggtcctgagtaggcagggtgggccatgacatgggtggggcttgtttggggcagaccaaaaatgaggtgggggacagggacagggacagggtcttgggatgtgctgggctctgcgatggatgggtgtgtggcaggtggggtgcctttgcctgcccgaggggtgggtgacgggcagtgcctgtgggggaggacatccaggcccaggtggtctgtcaggggcagcaccagggaggcccagtaccccacccagtagagccccaggagaatggaaagctgagacccaggtgcttccctggagtggcaggaagaggggccccagcgcctctagctgtgcctcagcgaggtggacggggtcatggtggtgccgcctgcccgcacccatgttcctcctggtatgtttgtgtcgggctgaggcctgctcggtggtggagcggaaggaggtgaagaatttgcagttcgtgtcaagttacaacccctgccttggcggcaggacctggggtctctggtcatgatctgcctctgagggtcacctcccctaagtctccgtttccccagggagctgatgggcatgatgagccctgcccgccctgcctgcctggtgggctttctgggagagcagaatgggtcctgggctgggagaggcccaggcaggtggagcgccagtcctctgcctggcgggaacagacacctctccttgtgcagactggccacttgtgccccctcagaagggcttgtgctgggaggagcagtggatgtatttcacccacagacctgggggctccagctgagtggggtcagctggcctccgttgtgtggcccctctcctgcccccaccccagcctggttgtttacagggttcgagggctgctggtaaaggggtgtgtactcccgggcccgggcagaggcctggcaggccgggcccttcgcggtgagctgtgcggtttcctggcaggcggggagggtgggttgcgggcccctcatgggctgccgtcagtggagccgtctgctcaatgtgctggagaaggtaaatgggcccccggcagctgtcggggcgatggatgtgtcggcagtggggaccacggtggccgctgtcagctggcgcccgctcccagggcctgctgggctcactttgctgtggagaagcagctcggtgccgcctggcaccctgccagccgctgccaccaccgtctctgcgaagtgtttatccagcagtttcctgagaactggggactttgagaaaatgttcagggagctgaggacgtggtggcctagaggggctgacacacctggtggctcaggaggtggtcagtcccgggacgtggagggccaccagctggccctcaggggcccacccagtcctgcccgtggcgcgtgggtcctggcccccaggtctaagtgggtgccgctttggggggcctgacccacagtgtggcctgggacacgtgtgcgaggcgtggagagggtgggctgcctgtgactgtccatgtggtccccgtggtggtggtggggtgggttgggggaggccaggcaggagcagcttcctctcagaaccccggtatttggtccaggaggacttctgggaaggaaccctctttccctgggggtgctccagccccttcctggggatgagcggggttggggatggaaggtcactcctgccggagggccacccgggacatcgggatgccagagggaccagggctgggggtgtgtggggccctaggagtgcannnnnnnnnnnnnnnnnnnnnnnnnnnnnnnnnnnnnnnnnnnnnnnnnnnnnnnnnnnnnnnnnnnnnnnnnnnnnnnnnnnnnnnnnnnnnnnnnnnnnnnnnnnnnnnnnnnnnnnnnnnnnnnnnnnnnnnnnnnnnnnnnnnnnnnnnnnnnnnnnnnnnnnnnnnnnnnnnnnnnnnnnnnnnnnnnnnnnnnnnnnnnnnnnnnnnnnnnnnnnnnnnnnnnnnnnnnnnnnnnnnnnnnnnnnnnnnnnnnnnnnnnnnnnnnnnnnnnnnnnnnnnnnnnnnnnnnnnnnnnnnnnnnnnnnnnnnnnnnnnnnnnnnnnnnnnnnnnnnnnnnnnnnnnnnnnnnnnnnnnnnnnnnnnnnnnnnnnnnnnnnnnnnnnnnnnnnnnnnnnnnnnnnnnnnnnnnnnnnnnnnnnnnnnnnnnnnnnnnnnnnnnnnnnnnnnnnnnnnnnnnnnnnnnnnnnnnnnnnnnnnnnnnnnnnnnnnnnnnnnnnnnnnnnnnnnnnnnnnnnnnnnnnnnnnnnnnnnnnnnnnnnnnnnnnnnnnnnnnnnnnnnnnnnnnnnnnnnnnnnnnnnnnnnnnnnnnnnnnnnnnnnnnnnnnnnnnnnnnnnnnnnnnnnnnnnnnnnnnnnnnnnnnnnnnnnnnnnnnnnnnnnnnnnnnnnnnnnnnnnnnnnnnnnnnnnnnnnnnnnnnnnnnnnnnnnnnnnnnnnnnnnnnnnnnnnnnnnnnnnnnnnnnnnnnnnnnnnnnnnnnnnnnnnnnnnnnnnnnnnnnnnnnnnnnnnnnnnnnnnnnnnnnnnnnnnnnnnnnnnnnnnnnnnnnnnnnnnnnnnnnnnnnnnnnnnnnnnnnnnnnnnnnnnnnnnnnnnnnnnnnnnnnnnnnnnnnnnnnnnnnnnnnnnnnnnnnnnnnnnnnnnnnnnnnnnnnnnnnnnnnnnnnnnnnnnnnnnnnnnnnnnnnnnnnnnnnnnnnnnnnnnnnnnnnnnnnnnnnnnnnnnnnnnnnnnnnnnnnnnnnnnnnnnnnnnnnnnnnnnnnnnnnnnnnnnnnnnnnnnnnnnnnnnnnnnnnnnnnnnnnnnnnnnnnnnnnnnnnnnnnnnnnnnnnnnnnnnnnnnnnnnnnnnnnngggtggggtggggggatgccagctggccgatggtggggagatggaaggcccctctgtggcgggtgcttcccatggtcggtgtggaggacgaggtccctactgcctggttccagttcctccagcaatgcagggcacttttcctggggcgtcagggattgagaggccactctccaagtggactgtactcctgcctcgagtggggggcatctgaggaccacagcagggtggggcactcaagtaagtcctggatgacaggttccagttcccctggggaccctcaggatagcgaaggagaagactccatgtgggttggtctctgtgtgaggggtctgggagggcagccctggctgatgtgtctgtgctcccaccctcctgagggacccggagtaagcaggtgcaggcctgcaggcgtcctgtggccatgaggacagtgatgctgggccccgggtggctgtctcctccacctgccccgtcctgtgtcaccccagtcctggatcagggagtagtggggccctgccgcatctgctgttggggctggccgcccacccagcatcctgtctgggctgaactcattaagatgcgcgccacggccctggctgcagctggcacccccccaagtgatcctctagctgaccctctaggcgagagatgaagaaagagaactgtgtgtctctggaccccttaccccgggtccctggggatcctgctcctcccctggaggggtctgtgtgctgggctgggatgctgaagacaaaggccacgtgaggccccttcactcacacccgtctcctggggtaggccctgatcgccgtctgttccctgggtctgtggggccaggcgagaggaaggcactgaaagcccagggcccatttgggcctctgcccatcccaggactccccaggaatgctcggggctgggcacctgtcctctcccaccccccacgcctggtaagcgccacccctgggcctgcccctcccgcacccccagatccagctcccagaaccccccagatgcagctcacagaacctggggctgggcttgtggcagcagggtcaggggcaaggctggggttgggcacgggagctgcgtgctcgggggcagcacggggccatgctgggcacggtgggggctggcagcagttggtggataagatgggtttcaggggtgccgggcctggtcgctcatcagtcttcccgctcagttagcgtcccggggagtggcagctggcaggatgggaggcactccatcaggggccgacagctccagactggcacgcaggcgggtgggcgtgagcggcggggtggcccatgatgggggacgggtggggtgggctgcatgcagccccctgagcctgctctgctctcactgagagcccctgtctgcctgctgcacctgcaggggccctgtggctggggaggggacgtgggaggcggggtggagctgcgtggcacgtatgtgcgtgtgtgtgcacactcgggggtgtgcgagatcccaggtcagggacagaggccggcgcccaagggtagcaggaccacgcctgctcggcagcccactggcaggggcatggagggcttgcggagtgggtggggtcccctgatgagtgctcttgggcacaggggcagattctgggccctggatcatcctccctgcaactgggtgttggccgtcctccagaggtgtcaggcagctatgagtgggctgtggctgtccccttccttgtccaccccagacctgacaacagcctctccccacactcaggccctgctgggtggggtgtccccaccctccaccagcatccccccagcagccctggcttgggcagagagagggctggtcttgtggagaccacgccccgtggtgctggtgggaagggcatcgggcagctggggctggggtaggagggagaggtcacctggccagggggtggccatttgtcgagccttggtggctcacctcttattaaagaactgccccgtggctccctggaaagtagaatgcctgctgggatgcccatgacccatgtcctcggagctcccctggggctgctgccctgctgggacttccctgtgcaccagggagggctggacgcgtctgggctcaccacgaagacccagcaggactgggtggtgggtggtctggtgatgggacaattgcttgtcccccacatccctcccggtgtccctgtctggggctcagtgtagcatgaaaacccaggccccagagctcagggaccccaaccccttaccctggccccctccctaatccctgcccagtgaccccctccccaacccctgcccagtggcccctcagatgaagcagtcgcctaattagtaagttccctgttgttcaaactccttgcttggcaaaatgtaagtggaacatttttttccgagtgtcagtatgaaaaatggtacttgctgggctatcaccgaggacagctgctctgattctgaagtgtgaacgcctgcgtacggctgatgctgcaaaacttgagggagaacgttcccgtgtacctgaatgacccacgggtgggacgcggcagggccgacggcggcagggcctgagtgtgggtctcagcctggggacttgacaccctctgtgccctggggcccctgcccagctggctgggccacctccgtgtctggcttcatcggcagtccccaagacggtgctccaggcccctagacagggagtgcgatcccacggcagtgggcagtcctgtcccgcgagcccggccctcagtctgagtggtgctgacctctaactgtggacgccatgctccatcctcctggtgggtggcggcggggcgggggggggggcggccatgctgggcagcccacacaagccactgtcacctgctgtcgccacctggccgaccctggttgattggggaatgctgtcagccccgcagcccctgtggccatagctggagcccgagctgctgctggtgcctgctggggactggctggtttagggctgcctcctccgggaaggctgtgcagactggcccagacctcttcccagcctcctgtccatggtactccatcccctgcatccagctggcccagcccgttttcagacacagctcggggtggctcttctgagaggggcactgtggtggggcgagtctgccttcccgttgacccagggccgtttctgtcgctggccctaagaaacagctcccgcaccgcgcctgccccctgggactcaggcgtcccgggcacatctgtcctggcacacccagttcctgcctggctgcctggcgagggtctgacgggtagagtgtgcgtggctctcaccacccgcacgtccgtaggggagtacatcaagacctggcggccacgctacttcctcctcaagaatgatggcaccttcattggctacaaggagcggccgcaggatgtggaccaacgtgaggcccccctcaacaacttctctgtggcgcgtaagtatccccttggcctctcgggattcagatttgggggttggctggagccctctttgcccaccaggccccacgatgggggtcccctggagcctccatgtcctgggctggcaagcaacaagcactggctgggtgggggtctctgggccgagtcccgaggctggctgggcaggggtctccgggctgagtcccaaagctgaggctggctaggcaggggtctctggtccgagtcccgaggccgaggctggctgggcaggggtttctgggccgagtcccgaggccgaggctggctgggcaggggtctccgagccgagtcctgaggctggctgggcaggggtctccgagccgagtcctgaggctggctaggcgggggtctctgggctgagtcccgaggctgaggctggctaggcgggggtctctgggccgagtcccaaggctggctgaccctggagcagttccctggtgcccatgctctggaagctggagggtccggacaagtggcagcagagtccagtctcagggtggacagctgccccgggggcccctcctccaaggggggtagatagagcccatcagggcctctccttgggaaaccccttgggtgagggggcaagagtccatgggggtctccagctctgaagcctccatcactcgaggaagagctcgtgcttctccctgcacaggctctcagcctccagaccccatggcagagcctttgcttcccctctgtgaggctgcctccttgcccatggaggggcaggtgcagaaaggccagcgggggaccttggccggagcatcccacagagatgagagacatgtgacactccctgctccgccctgctgtggctttattccttacctgtagcgggggcaggtgcgaccctacccatgtcagacgggaaccctggcatggagacccaggcgccctgctaggtgggaggctggggacatgtgggcctcccagcatggtccccattttctgtgtccctgtcctggagcccagctctgcctgtggcagccagagacacgggttgggcatgcaggtgtgactgagtggctaattagggcccagttgtgggccatctatatgtggcagggctgggtaactgcaggcctctgggatctgtctcaggcaggtctgtggtgcagagcgaggtgcccaccaggggctggccttaggttccatccccatgtgctgcatcggcccctcccctccaagtagctctgccctcctttctttgaggcctgcggtcctccgactcccttgaccttgctggacccccaggttctggtccagggtctaggaggaggttaaacgcagggaatccgtccccaggctggacagggaaggactcccacccttggtgcctgcaggtataaggggaggtggggtcagtctggcaccctggctgctaggtggtctgtggccagcaaaccgtgccctgaagcttctagttgggaggggcagaggccttgccctgcaaagccccaggctgaggggctggggttggggtggggtttaccaggacctggttcctgtaagccgaggtctccttccctgactcttccagcctcaagccagcagtagcagggcagcctgatagagtagggcaccccaggggtgaggggagaccaggaaggcagacacccctgtctcctgacagcctcgtaaccatgcaggagactcactgtgacttgtcccacaccctccccagtgtctcctcagttggggctgggggcttcagggatcagggagaggctgggtaccagcagtgtgcctggtggcacctgggacagggccttgctgggggcgggtgctgtgggtgtgctcgccaggccgaggcattgggaaggaacgaggtggggagctctctggagaggcacacgggtgggtaccagctggaggtgttgcctgagcagctggcaaggctggggccttcagattaggccataggtgagtggcctggagcgcctggccaaggagcagagctgggcaggggccaggggctgtgctgggcctctgtccgggggcttttctctggggaacggttccggggcagtgggctcgagactctggccctggggattgcacattggggcagatcggaccatccaggagcgagtgggaggtgggtgtgccggggcttcacaccggtttccacttttctggcctgtgttgacacaggccaccctccccaccaggctggtcccgagccccctcctggcccccaggcctggaagacagcttccttgctgcctggccaggcccccttgtggttgccagggcctcgatgctggaatgtcagaggccccccactggcccctcagcctcctcctgctttgcacaggctgggccagagcctgccacggagccccagcggctacacactccactcactcacacctctcagggccccgcacgttcccacagccctcagggtgtacgtgctgtaggtgtggctgtgccccaggtatgtgttccccaggtgtgcttgtgccccaggtgtggctgtgccccaggtgttcgtgtgccccagatgtggctaggtgtctagatgtgttctagatgtctgtgtattccagtgtggctgtgtctcaggtgtgcgtgtgccccaggtgtgcgtgtgccccaggtgtggctttgcctccagtgtgtgtgccccagatgtatgtgtgccccaggtgtggctgtgtcccaggtgtgcgtgtgcctcaggtgtgtgtgtgccccaggtgtggctttgcctccagtgtgtgtgccccagatgtatgtgtgccccaggtgtggctgtgccccaggtgtggctgtgccccaggtgtgggtgtactccaggtgtggctgtgccccaggtgtgggtgtgccccaggtgtgggtgtgccccaggtgtgcgtgtgccccaggtatgcatgtgcctcaggtgtgcgtgtgccccaggtgtggctttgcctccagtgtgtgtgccccagatgtgtgtgtgccccagatgtatgtgtgccccagatgtatgtgtgccccagatgtatgtgtgccccaggtgtggctgtgccccaggtgtgcctgtgccccaggtgtgggtgtactccaggtgtggctgtgccccaggtgtgggctgtgctccaggtggctgtatttcccaggtactcagggtgaggttgggaaaaaagcaggacatttctacactaggtgggacaagcaggtttctggggtgcccccctcatgccagccgttctgtgggatctccatacccctcatcctctgaggcctggcgcacggcagggctcagagactgaaggaaggactgtaggagtggacgatggtggggttttgacctgacaccgggccagatgccctgtgtggctgcctcagcctggagtagagtgtctgagctggaacaggggtcctagccccactctgtgaggcgagaaactgaggcttggagagaggaagagatggggcttcccaggacctggtgggtggtatgcaaggggagctggctggtgcggcgggggctgtggtgagggccctgggaggggcagggggatgcacgcagacagaggctctgcctgcccgcagagtgccagctgatgaagacggagcggcctcggcccaacaccttcatcatccgctgcctgcagtggaccactgtcattgaacgcaccttccatgtggagactcctgaggagcggtacgtgggctgtggcggccaggccaggcgcttgggcagccccagggcttaggagggacacggggatggcggggtgctggcacctctgcctgtagccatcctcactccccagtgctcccaggccctcctcagagcccagtttggaaactggcccagtcctgcctatggggtttgggtggggaaactgaggctggagataaaaactggctagggaccgggtgcagtggctcacgtctataatctcggcactttgggaggccgaggtgcgcagatcacttgagaccaggagtttgagactagcctgccaacatggtgaaacccccatctctactaaaaatataaaacagctgggtgtggtggtgcacacctgtaatcccagctacttgggaggctgaggcacaagaatcgcttgaacccgagaggcagaggctgcaggagccgagattttaccactgcactccagccagggcaatagagcaagactccgtctcaaaaaaagaaaaacccagtggagagggccagtcctgcttggggggcggagtcctgctgtgggcctgagtcctgctgtgggcctgagtcctgctgggggttggagtccggttgtggggacagagtcctgctggggggataagcctgggtgtcccccacgtccaagagagcttcgtgaccctgagtgtatgtggccagaccaggtcaagtggtggcctcctcagggccgtctctggggaccccgacagctgtgggaccacgcttgtgaggctggcgggtgggtgaaagacgtggggtggagctcccgatctggtgcaggcctgcagcctcacctgacctcctgcagggaggagtggacaaccgccatccagactgtggccgacggcctcaagaagcaggaggaggaggagatggacttccggtcgggctcacccagtgacaactcaggggctgaagagatggaggtgtccctggccaagcccaagcaccgcgtggtgaggcctgtccccacttctgcctgtgcctggggctgccttggactgtggagggctgggtgggtcatggggtcccagctcggcccaggagacactcagcactccacggcatctccacctaggccggttttccatgtagggcgcagctgcctcccaggtgggtcctcttccccatgtcagaggaaaactggggttgctgagccctgccaggcttgggcagtgttaccccacccttccctgaaccccatgctctgagctggggccgcagccatgtgttctctgtaagcctggactccccgctgagcccagtaggccaccaggtgtgaagtgggcgcctctcctggctctgcctccgactctggggcccctcatgccaccccacgcgtgccgaccagctgggcactgttggcagcgccgcgtgctgaccctggtgcctgcccatagaccatgaacgagtttgagtacctgaagctgctgggcaagggcacttttggcaaggtgatcctggtgaaggagaaggccacaggccgctactacgccatgaagatcctcaagaaggaagtcatcgtggccaaggtggggccggggcagtggggcagggtggagatgagggtgcggggcggcagctcacccagccctgctttacaggacgaggtggcccacacactcaccgagaaccgcgtcctgcagaactccaggcaccccttcctcacagtgagtgggagcccagatggggctgaagggctggggccaggtagcgactcctggggctgtctctaggggacgatgtcctgtcttcttgggcacgtgagggctttacacaccgcggactccgccgctggtgagacaggcctgccctggagggtcaggctgtggaggtgcccagtgtgggctaggggctgtgctcgctgctcctgtgtgcgggcaggtgggtgcggcaggtggccctggtcttccttgcactctgccgaggctccaggaggccccagctccccatgccctgcagccctgcctgccaggcttttgttgaggcccgggctctgtcctgcagaacctgttctggggacttggcccaggaggtatttactgtgaagggggccaggctccagccacttggttagttccaggtcactgtgtttggggacgattctcctgcagatggggcctttgctttaaaagcacggtcgcctgtggtggaaggcgggagggtgggtctcgcctgggagggtgtgtcctccctttgccaaggccctggtgctgggagcactgtcacctgctgaggtcccaactcaccctggaggacctcagcccaggccaccttgctcacctttcaaacactccttggcacctcaggggcttccggggcccagcctgatggtggcgtggcatgaggcagtgtggtgtggggcagtgtggcgtggggcagcgtggcatgggggcagtgtgatgtgggggtgtgtggtgtggggcagtgtgatgtgggagtgtgtggtgtggggcagtgtgatggggtgtgtgatgtggggatgtgtggtgtgaggcagtgtggtatcaggcggcgtggtatcaggcagcgtggtgtcgggcagtgtggtgtggggctacgggcggtgtggtatcaggcgacgtggtatcaagcagcgtggtgtcgggcagcgtggtgcggggctgccgtcctgcctgtggggccgcagttccagctccgcttccttgcaggccctgaagtactctttccagacccacgaccgcctctgcttcgtcatggagtacgccaacgggggcgaggtaggggctggggctgcgggggatggacttcgcggcctgtgggccgcccatggtggggctggtccttcccggagcctcggctactctccatggcaccagacggtgctccctgctgggtgggtggtgtgatgcctgcccaggcagctgcctgctgtggggtgacttgttcctgctgagttagggcttctgagactttccaggcccccgtgccctctggtggctggtcccttccctgtgcaatgccgagacccggtctgagaaaccgcagccctgcaggccatgggggcagaggcccgagccacggctgtgcctcaggttgcgcctcccgcagctgttcttccacctgtcccgggagcgtgtgttctccgaggaccgggcccgcttctatggcgctgagatcgtgtcagccctggactacctgcactcggagaagaacgtggtgtaccgggacctcaaggtgcgctggcgggcaggcagggggcagggccctgggggcctggcggcactgacctgaggcacctttcccctagctggagaacctcatgctggacaaggacgggcacattaagatcacagacttcgggctgtgcaaggaggggatcaaggacggtgccaccatgaagaccttttgtggcacatctgagtacctggccccccgagtgtgcgcctcacctgcgtgcatacgcgttgctgcgtccccgcgtcctgagcacacgcaatgctgtgtcctctnnnnnnnnnnnnnnnnnnnnnnnnnnnnnnnnnnnnnnnnnnnnnnnnnnnnnnnnnnnnnnnnnnnnnnnnnnnnnnnnnnnnnnnnnnnnnnnnnnnnnnnnnnnnnnnnnnnnnnnnnnnnnnnnnnnnnnnnnnnnnnnnnnnnnnnnnnnnnnnnnnnnnnnnnnnnnnnnnnnnnnnnnnnnnnnnnnnnnnnnnnnnnnnnnnnnnnnnnnnnnnnnnnnnnnnnnnnnnnnnnnnnnnnnnnnnnnnnnnnnnnnnnnnnnnnnnnnnnnnnnnnnnnnnnnnnnnnnnnnnnnnnnnnnnnnnnnnnnnnnnnnnnnnnnnnnnnnnnnnnnnnnnnnnnnnnnnnnnnnnnnnnnnnnnnnnnnnnnnnnnnnnnnnnnnnnnnnnnnnnnnnnnnnnnnnnnnnnnnnnnnnnnnnnnnnnnnnnnnnnnnnnnnnnnnnnnnnnnnnnnnnnnnnnnnnnnnnnnnnnnnnnnnnnnnnnnnnnnnnnnnnnnnnnnnnnnnnnnnnnnnnnnnnnnnnnnnnnnnnnnnnnnnnnnnnnnnnnnnnnnnnnnnnnnnnnnnnnnnnnnnnnnnnnnnnnnnnnnnnnnnnnnnnnnnnnnnnnnnnnnnnnnnnnnnnnnnnnnnnnnnnnnnnnnnnnnnnnnnnnnnnnnnnnnnnnnnnnnnnnnnnnnnnnnnnnnnnnnnnnnnnnnnnnnnnnnnnnnnnnnnnnnnnnnnnnnnnnnnnnnnnnnnnnnnnnnnnnnnnnnnnnnnnnnnnnnnnnnnnnnnnnnnnnnnnnnnnnnnnnnnnnnnnnnnnnnnnnnnnnnnnnnnnnnnnnnnnnnnnnnnnnnnnnnnnnnnnnnnnnnnnnnnnnnnnnnnnnnnnnnnnnnnnnnnnnnnnnnnnnnnnnnnnnnnnnnnnnnnnnnnnnnnnnnnnnnnnnnnnnnnnnnnnnnnnnnnnnnnnnnnnnnnnnnnnnnnnnnnnnnnnnnnnnnnnnnnnnnnnnnnnnnnnnnnnnnnnnnnnnnnnnnnnnnnnnnnnnnnnnnnnnnnnnnnnnnnnnnnnnnnnnnnnnnnnnnnnnnnnnnnnnnnnnnnnnnnnnnnnnnnnnnnnnnnnnnnnnnnnnnnnnnnnnnnnnnnnnnnnnnnnnnnnnnnnnnnnnnnnnnnnnnnnnnnnnnnnnnnnnnnnnnnnnnnnnnnnnnnnnnnnnnnnnnnnnnnttcaccccgttcccagcctgcccctcccctgaatgcctgtcctatgccgtgtgcagctggtcgggctgggcagccctgggacccatctgggcacctgtcctcccattaacacagggtgccctggtcctggtccccgttcctgccttgaggcctgccaccctcctgccctgccctccaagggtatggggggcctgggcagcactcaacctctgcccagccttgaccagagaccttgctaattgacaatggacaatgctggtgcccaggccagactctggggtggggcagtgcttgagggggtccttgactgtgggacctgaggggctctctggcagctcctcacgtgtgcacatcaccttatagtcacccttgatcctgggtcattgagagtcctgtctgcagccagatgccagcaggctgtggtcctgtagtccctgagccatggaggcagggtgggctcatcctgtgcaccttgttccacagtctccctctttcccaatttacaagaagaccaataagaaaaataagaaaacaagaaagaaaaaggaaaaataaagtcatcacctcctggtagcagggagggtctctcagagctgggctgcactacctcctgtcgcctcctggggctgctgtgagggcagctttgcgtctcagctgttgagggttgtctccgtgctcctgcacccctcatgtccctccctcccagagctgcctctgtcgggggctggtggcttgctgctctctgacatcagtcctgcctggagaccccttggagatccaggtgctttgagggtcttgagcacacttgagggtgtgctgggagtggggagcgaagctcatgactgtcccgtctgcccacctctgcagctcagcccacccttcaagccccaggtcacatcggagactgacaccaggtattttgatgaggagttcacggcccagatgatcaccatcacaccacctgaccaaggtgaggggccactgcctgcccccgcccactcccttttctctccacactcagagaggcctgcagtgttcagcttttttggcttcagatgttttaaaatctaaatatttaaaaaggttccttttggagagtgccaatgatcagggtgggaggcagtgctctgagggcccaggtccctgtgtcaatctgtggggccctgtctcagtttcctggcagtatggcagcgtgctggccgcgctttaagaggttggcttcctactggagctgtgggtgggtggaggtggcagggaggtggggcacccgggtctgagctgtctacacccacagatgacagcatggagtgtgtggacagcgagcgcaggccccacttcccccagttctcctactcggccagcggcacggcctgaggcggcggtggactgcgctggacgaaagcttggagggatggagaggcggcctcgtgccatgatctgtatttaatggtttttatttctcgggtgcatttgagagaagccacgctgtcctctcgagcccagatggaaagacgtttttgtgctgtgggcagcaccctcccccgcagcggggtagggaagaaaactatcctgcgggttttaatttatttcatccagtttgttctccgggtgtggcctcagccctcagaacaatccgattcacgtagggaaatgttaaggacttctgcagctatgcgcgatgtggcattggggggccgggcaggtcctgcccatgtgtcccctcactctgtcagccagccgccctgggctgtctgtcaccagctatctgtcatctctctggggccctgggcctcagttcaacctggtggcaccagatgcaacctcactatggcatgctggccggcaccctctcctgggggtggcaggcacacagcagccccccagcactaaggccgtgtctctgaggacgtcatcggaggctgggcccctgggatgggaccagggatgggggatgggccagggtttacccagtgggacagaggagcaaggtttaaatttgttattgtgtattatgttgttcaaatgcattttgggggtttttaatctttgtgacaggaaagccctcccccttccccttctgtgtcacagttcttggtgactgtcccaccgggagcctccccctcagatgatctctccacggtagcacttgaccttttcgacgcttaacctttccgctgtcgccccannnnnnnnnnnnnnnnnnnnnnnnnnnnnnnnnnnnnnnnnnnnnnnnnnnnnnnnnnnnnnnnnnnnnnnnnnnnnnnnnnnnnnnnnnnnnnnnnnnnnnnnnnnnnnnnnnnnnnnnnnnnnnnnnnnnnnnnnnnnnnnnnnnnnnnnnnnnnnnnnnnnnnnnnnnnnnnnnnnnnnnnnnnnnnnnnnnnnnnnnnnnnnnnnnnnnnnnnnnnnnnnnnnnnnnnnnnnnnnnnnnnnnnnnnnnnnnnnnnnnnnnnnnnnnnnnnnnnnnnnnnnnnnnnnnnnnnnnnnnnnnnnnnnnnnnnnnnnnnnnnnnnnnnnnnnnnnnnnnnnnnnnnnnnnnnnnnnnnnnnnnnnnnnnnnnnnnnnnnnnnnnnnnnnnnnnnnnnnnnnnnnnnnnnnnnnnnnnnnnnnnnnnnnnnnnnnnnnnnnnnnnnnnnnnnnnnnnnnnnnnnnnnnnnnnnnnnnnnnnnnnnnnnnnnnnnnnnnnnnnnnnnnnnnnnnnnnnnnnnnnnnnnnnnnnnnnnnnnnnnnnnnnnnnnnnnnnnnnnnnnnnnnnnnnnnnnnnnnnnnnnnnnnnnnnnnnnnnnnnnnnnnnnnnnnnnnnnnnnnnnnnnnnnnnnnnnnnnnnnnnnnnnnnnnnnnnnnnnnnnnnnnnnnnnnnnnnnnnnnnnnnnnnnnnnnnnnnnnnnnnnnnnnnnnnnnnnnnnnnnnnnnnnnnnnnnnnnnnnnnnnnnnnnnnnnnnnnnnnnnnnnnnnnnnnnnnnnnnnnnnnnnnnnnnnncgccactgtggtggattttcttaaacattcaactttagtatttttattcttataatatgaaaccttccctccaaattcttcaataaaagttgcttttcaa

SEQ ID NO: 61 - DNA, 20982 bp, Mus musculus
  source 1..20982: mol_type = genomic DNA
caagcctcacccatctgagtccacagcaaggtcttggctgactgagtcctacccctgaatctgccccctctgggtgtccaggtgtgctcccgtcctccctgtcacctggggagtccttatcagttgctgtggcaggcagtactgggttggatgagccctcaatagccttctttcttgtgttggctggcctttaggacaccggtgaccggtctctcccggctcccaagatggggacagttgggcctcttgagagtcaaactgattcacttcccacgctggcctccctccttggggtctggagagctaggcagggaagggccaggtcccacaaaccgggaaacccagaccagagctggagctctggatctgcggcggggctccgttacccgcgtggccctggctcggggccacccgagggcggcgcctgcggggccgcgctcgcgctcacggggtgcctcgccctggccgcgggccgcgccgggggcgcccggggcggcggaggcggatgtgggcgggcggcgcgggcgcggggcggggagaaggcgggccggcggcggcggcggcagcaccgagtcggcgggcggccggcccagcgcggcagcgcacgcgagtccgggaccagcggagcggaccgagcagcgtcctgtggccggcaccgcggcggcccagatccggccagcagcgcgcgcccggacgccgctgccttcagccggccccgcccagcgcccgcccgcgggatgcggagcggcgggcgcccgaggccgcggcccggctaggcccagtcgcccgcacgcggcggcccggtgagtgcccgcgccgcgccctgttccgggccgcggccaccccgctttgttcccggccgcgccgcgcctcggagtaggagcaggaagtggccgagcggaggcctgggcggggagcgcgcggggccgggctggtcgcgcaggaggcccacgccggcgagggtgcgggcggccgctgcgtgaccttgggtggccgctccacggggccaggtcgcgggagaggggcgctgttggtgtgcgcagtgggggccggtgcgccctggggcctggggctgcccgggcactcggccagcgagggtaggagaaaggctcgccccgcggcctgcgtgcggtgggagggccctgggaaggagaactcatttcccacggacagaaagttgtgcgcggtggcacagtgcccaggctagcccacaaaggactgctaaccctcctgggcccggaagctgcttcctggactaggtggtttctggaggtgccggggggggggggggccttgaggacggcgtggactcggtctcccggatccgggatactggctgagctgatggaattgtctaaagaggactggtttctaagttgggcggtggtggaaccttgggcctctgctgtgtggccaaactcctccttcccccaggcccctggtcttgctccaggtggctagccttgactgcctagagccatcactaaagtgaagggcgagtcgccttggtggggccccagctgggcgtgtggctcacgggccagtgtcccagaggggctgaactcttaagacttaacaatagcaaccatatgcccttacggcatggcatggtgggaagagtgtcccatgcttaagtcggcttgatgtggacattggcgttaacatggctgtgtttcttcactccgtgtgtatgaatttatttttacacggctctggacagctgactgtcatcagcagaccttggggctgggtgggggtaggggacatccaccgagagagatcttgcagtacagccctctgcctccaggccacacccactctgacagtcactgagctgggatttcttcttggcttatctttttcgttctggcttttagtcgccacctgcttgctgagggaagggctctttccttcttgggccaggtgtggtctttcctactttggcatttggcatttgacacatagcagccggcctcccttttgttccacatttagcttcatacaaggcaaagtgacagagactctgggtgccagcttgtgtcttctgggctagagagatgacatagggggttgccagtcagctgtagtagaccctagttgggatctattccacggcggccttccagtcttttcctggggattgtccacatgaactccaggtggagggacaacacaggcttgctggtcaagggctgttcaggtgcactttcccagaatgtccagacttggggatatttgaaggatacctaggtgtccctctggaagagaagcaattggggggcggggggatctttgcgaggtgagctggcaccctttgctttgcacaggctagctagttggccgctgcaggacccttgtgtgttacctgccctgtttgtgggctcccggatactgtaattgtgggtcgtaaccactgctttgggtgttcccagcaggctgtctcagagtctctctgtctcaggcgtagggtgaaggctcgacagaaccatatgtgcctagtgtgtactcaccaagtgaaggggacagcttcacaggcagggtgctgtgttcccaaggggtctggggttctgcctgaggagtttttagtgttgtcctgaaggactttgggctcagcttcataccgtgcctgttctacttgtgctctccagtgttggccttcccgcgttcctaacgtgagccgtagggaccctgcgacctgcagtaggcctcccagactgtagggggtggtgagacagtggtaagcacccctcactagtgcgaggcagagcagaagcagtcagggctgcctggaggaggtggcctaatctgctggggtagcaaattgaacaagctgcctaacaggaaaagccttctggaaatgaatgtttctagcagagaccaggatgatgggggttggccacagccttgcaccccggactaccaggcctagatctgggtgtgtagcatctactactggagggaggtcttctatagcaacctttggagacacgtcaggcaggctggcagggagtaagggtgaggagggaacctgggaaccagagatgggtagatcacatgaggggacatgggtaattgtgggccctctggggctcacggaagctagtcccaagtgggaccttgtctcacgtgctttctcggcttcttctagacgctgcggccaggccggctgggctcagcctaccgagaagagactctgagcatcatccctgggttacccctgtctctgggggccacggataccatgaacgacgtagccattgtgaaggagggctggctgcacaaacgaggtaagtccgcactccacaggagaagcaggccggcctgggtctgcctagctcttcaatgtggaaccggggcgggggtggtggtggtggtggtggggtctttactgacccagcaggccctatcagaaagtgcttgctgtgtctaggcctagcagacagaaggggcacctccccatcatggggctctaggcctgcttcaggagtatgcaggcccagcttttcccatagtatggaggtcacggcctcctcctggggcctcttggccagaggctgaggccctgtgcggggcctgccatgagtggcttgggggtggggccagctgcagcagcctcacgcctggctttcctggaaggcagcaaggacgtggctgctgttccagggctggcagacgagtagcctgggcactgcccaagggctcctgagggcaggcagggcagggcagggcagggttgctcggctgggccctttgcccacctcaggcccggattcctgaagtcagggggctcagaactgaaaagctgactgagatggactcttcccaggcctggggcccctcacctccagccaacccgccattcttcctccagcctgccaggagtaagtttcaaagccagttcccccaggatagtcacttgctcttgccccagggcaggcatctcacccccttctgacttcctcttcctgtagacctgttccctccggaagccctagggtgatccttgccagtcccagcctctcctcccactctccttcctggctctctagagaggggattgtacttttgggtgtcaggagaaggactcagatagagaagatgggaggtggggaccgaagttggtgttaggacatggggctttattagagtatctacagctctggcagaactggggggtgggagggtggtgcacaggagctacgggaagttggggaggatggttgggacccaggagggctcacgcaggggtggaagatgtggtcagatgtgttgagaggtcccaatctggcggctgcagggcagattctgtgctgggctttgccaggaggctgtgacctttggctcctgcccccacctgacttcccatttgttctccagggcatccttccctggcccactaggagtcctgcctcctaagctcacattcctgggtcatgccctgctgtctgcctctttggctcctccttctccccaaccctaggccatacacagtctacacagtctatttcatgggcacgtgtgtattgtatggctgtcagagttagggccaacctcgagattgctgggcctctctccccaggtaggaacccttctgaggcctagggagtgtcatattgctccttatgactgagctttctcaaggggccaggtggcacaggacattaggtcctatggacacgctgaggctgtgcttgaacctgatttggcagtgctgtcattgtccctcttcaggagaagaaggtcattgagttctttaggccttgattttccccgtgcatgccctggaaatggtggtgggttaaagacgtgagagcatgcgttagctgtgggatggcaagggggcacaacgcctgcctgtctgccccgtggaactgacaggactgcctctctttggggtggggggtcttcccagcctcaggccagagagatgtgctgtcctcatggtccttcatcctcccccagccccagccccagcctaggtagtaggggctctgctgcgcgcaatggcatctatgccacattcctggactgggtcctcctattctgccttgctctggcccagccaagacccaggcttggcctgctgctgcttgcctaggtcttggtggtcctcgtttctcccttgaacacaacgagccctgtgtgcatcactagtttggggttccagccctctccctgtcttggattgccatgttagacttctaacctgaggccattatgacttggctggggtaggcagggagggaaggttattgcagttgacccttagtgacccatgatccttcagacacctgggtatcccttatgtccctccctctgttgcttttgtaggttatagccccgcagactgggaacagaacccatctttgctaggtctcccatgtccagccaggggcttggagcacattggttctcggctcctccccaagctcccgtgggccgaccgtgccttcagggctatttgggcaaagaagagaggatgttcctcactccatggctacagagaccccaggtccaggtttctcctcctccctgggagttaggtgcctacttctcaggaagtgttccccaagccacttcctaggagctctgtttgtgctctgggccagagggtgcccagtacaggagcagacattctagttgtgcattgatctgtggctgggcgttagcttccctatgcatccaacaacatagacccgtgggagactgggcttgagctcctagagatgagaggtggctggtctgatgaacctcagtgctggtctccagatgcagaggtttggggtcgatgaaccatgtcttcttaacagccagcctggggttaagttgcaggtgtggctgaacttgtccgtgacctctgatttcagcctgcaggttgcaaatgagctgtgtactgaggccacaggcccatctgtgctaatcttttgggttcttccctcaaatctctgacgtttgccgggctgtatgcgtgagagctgccctggtagagactggagccagggagccttctcaccttcttggccaggttagccattgtctgtgtctgtgtcttcccagctcccagcaggtggctagacctgagacatggaaaggtctgagaacgaagggctatgtgtttaagagtaggtggcacatgacaattgtagggccacctcgtgcagggccacctcgtgcagggccactttgtgcagggccacctcgtgcagggccaccttgtgtggggccacgtcatgggctcactcagcagacttagttgagagacccagcaggctaggagaaaccaagctattctcactgggttagtgcctggcaggtggacgcagtttggacaaggatggagggaaactggcatgtagtatggggctctctggctttgggtgtggatctgtttgtgctgagctcatggtctctgggcagagtcaagggtcccgaacccagtgggcaagtcaacatctagggaccggagtagtgccatgcttggggactgatcctgagggagaggtaagcatgtggcattcctggagacctggacagagatggcagctgaatgctctgggcccattcatggaggggacagtacactgcggtgtgtggctgccgctgagccttggctggtgctgggactgagtttcctgttttgtgagcgtgttgagttctcccttaaaaacaaacaacaaaagaggaagctgggcggccttccactggggtgtgggggtcagtccggcccggcctggtgactccccagagtgggcagcagtcctctcggcttcctgacgaccatcttctagacagagttgcccagtggggctgagccacttggaggtcaccaggaggtgaggaaaagtgtggggacataagactccactgaactgctgggtctggggcagcctcttggtcctgccagctctgcagggtagccaagtgcactgaaaccaggaagggggtggggtgctgtgtggatggccagaaccagggcctactgtcgctgctaggagtagcttgagggcttgcatcaggctgattcctagaagtgccatggggtagtggggagaactgttctgtcctctggcaatcctctctgcccagtcacacccgagccaggcccagagccagctccaacccttaggccctccctgtaacagtagctgtggctgtcccagccatcccaccatggctggtgatctacccacacccagcacttccccagaagagtctgcctagccaagacctagactctagcccacgctggtgggcagagcagccaggagccccgtagtaccggtggcctgtctgcaggtagctgcgtgcctcactatcttttgcctctgagtggcttttgtgtcggttccccctcccccagcccccgcccctcacccccatttagttgttttttgagatagggtcttactttgtagcccagattgtcctgaactcaagcgagttcccttcctcggccttttcagtgctggggatatacgtggtgccactatgcctggcctcctggtatgattttgctttgttggtttgtttgggctcttggcataggacttcggaggtggtagacattgttctagagaaggcttccctgcccttggcccagggtctggctggcccatgtaggctctggtatctgtagggtgaaggcacatcctttctgctctgtctgggcctcctttgaaaatgtagtgtatggggtgtgtgtgtgtgtgtgtgtgtacacatgtgtgcgcgtgtgtgtgcgtgtgtgtatggtgtgtgtgtgtgtgtacatgtgtacatgtgtgtgtgtgtacgcacgcacccaggggagggggaaacgctcatgtgctgtagccagcatgcatatgttccttggacaacctgtgagttggttttcttttaccatgtggatcccagggatcaaacatgggtcgtcaggcctgagggcagtgcctttaccctctaagccatctttcaggacgctctctgggccccctgggctgtgccacagtgaggtggagagggaggatgggtaaggggagggcacagcttttgggactcagcacaggaatgttgtggggtctgtgagctgccgtgtgtctggggaagtaggacggatgagaggggttgggctggtgtagggaggctaaaagccagcataggatggtggccctgtggcttgccccaaaactgtgggactaaggtgaacaggatgatctgaatggtacgggagacttgggggtgcgtggtgtgtatggcagagtggggctgtgggccggccttcctttctggtacggggagggtggggactgctgtggaggggtaggcaagtgtaagatgtgggtgggtagggtaaagtctggaccagtactccctgtggctcaggaagctggactggaggtggcagtggagaggtgtgccacccactgtgggttccaggaacctgagagaccttgggacgcattgcagtcgcgtggttgctatatcttggctcttctcagctgaggcctgcctgtgcagtttgtgtcctggctgtccctcagctctggttatttcctgcctctctgtgaccgctagggtccccttttctaagcctcggtttctccaggaagctggtggctccagtgcgtcctacttcttgctaggtgagattttttacatttgtgggttatggcaaaaaacacacccaggcccagtggagtgccactggccattggtaccccaccctgtgagacccacatgagcacccctctcagacgggctgcacctgggctgtaccctggaacaccagacctggggtttcacctgctatggacagcacacccctccactccctgcctttgcccagcgcttggtcattgagtcttttggggtcaagtgacatgggtcctaggatctgcaaaggggcctgggaggctggcctcagagatgaccttgccacctgctgaccacccactgcccagaaggcagccagagctgggctaatggccccaatgggctgccatcagcaaaccgcttgctcaatgtgctggagaaggtaaatggccgcccggcagctgtcggtgcgatggatgtgttggtggtaggggacgtttggtcgctgctgtcagctggcgcctgctccccaggcctgctggggctcactttgctgtggagaaacagctcggtgccgcctggcgccttgccagctgccgcctgccaccgccactgctactgcggcaaagtgtttatccagcagtttccccaagaatcggggacttggagagaatgttcacagtgatcaggacacaggccaggccagtgtgagaggacaccggtcgagcctgagtctcgagtgctaggattaaaggtgtgtcctgcctccctctttcctagtgtggtgacttaggtacagggggtcctggtacagggactcggaggctcacccacacagatgctggaaggcctagaccttgaggcaccagtgagtagcacctctgggtacctttcccctaggattggacagaatctggtcctggaggtggaggtgggcctgagggagccccgaagttgttggggagtccttgcctcttcctaggtgctggtcttggtgctagaaggtggaacaggtccttgggtggagtgggtcctggctgtcctctctgcatagcagctgtgacgcctcctgaatgggcttgcacatgtggatggtggagagctgggtttactgtggtgtgaggccgggcttagtcctgggtgtcttctgttctgctgttttttatttcttgtcgagaagctgttgtcaggcttctgccctcaagagccacgggaactgcattgtggaggtggcgcctggtcatttgtcatctgttcatgtgtttgttaacacgggcctggtaaggcacctgcaggtggaggagcctgcacatcttgtggaccgtgtgcacctgaatccccagggctgtgtagccaggtggagggccctggctgctgccatgctgcccagctggactcccctgagttcagggtatcaagcatccagatgggtcaagggagccaagaagatcccagatgggccagagcctagcacttctacagaggccagaatggctcaggctcagtcactccttgctggactatgaaggacttgagggagacctgccaatgtttgtattcccaaaagagacccccccccgccccccgcccctcccccccccccccccccgccagcagggtaggcaggagtactcctagataccatagagccccagaggaccaggacagccgcctcttgtatttgtctatcatattggcccgtttctgcagtagaatgaggtttggggtctgtctggtctgaacttattaacatgcaggccacagcccaggctgcagctggctcagccggtacccccagtgaccaattggctagaccttgaggcaggatttaaagaaagagatctgtgtgtgtctgtcagagctgtggccccccctttactgtgaaagggaaagtcctcatgaggccacttcactttacagttctccttggccatgtggcctttgtgtgctttgtgtggccagggaggggaagggcacctaggccctctgtgtgtatgtggggctgggtccttaccttgtcctctgcctggtgagtgccccctgtctgtaactccgggtctacattctggaatctgccaggcctgggggctggtcatgtaggcttagagcccataggagattcagggtcatgctggtggtttatgtgtcggggccagagctggggtctgcactgggcacagtgggatgggcagcagttggcaaatcaagatggatttctggggcgcgggtgcgctgctcatcagcctccgtattcagttagtgtcccggggagcagcagctggtgagatgggagggtactccatcaggggccgacagctccagactggtgctggcgggtgggcacacacggcgggtggcccgggaaggaacaggatggggggtgggctgtgtaccccccagtgctctgctgtattactcagagcccctgcctaccacggcaccctctaggccctgtgccaggggaggggctgtcacagggctgctgggtgtgtgaatacctgcaggtgtgtgccacctggtcagaagcagggctggtgcccaaaggggtggctgtgctggagagctgggcttctgggagctaaagatgggaggtgggttgggtttacaggtgctctagaggttgcatgcgggctgtaggcccttgaagagaatcagaattaacttgcctatgccctggaggagccccggccacatctgggcacttgccaagaatccggagggctttcttgctttgctttccattgtggggccagggtctgcatcggtttgtcagacctaggtggtctgcagcgatgacaagaagacgggatccctcgctcttggagctgctcgcccctggggtgggagtcttggcctggtagtggttctattcacgtcttcccccggcctcgccaacagcctccctccatcacttcagttccctctcatcccactttgtgcagggtgtagggtcatgcagagcaaggctgctgtttggaaaggactcccaggcattggaaggggctagatggtgggaggtagattgtgggtagagccctgcagcttgctgcccagagcccctgcaggtcctgagagcatggacaggtccaagcggatacactatcctgagcagactgtatctcacctgcgaaagtgttctctgggaatacctggatttggtacacaccaccgttagaggttaaagaaggaaagctggccagcccccctggggctatggactgagactggggcaccgccttatgcccaagatcacggtgcttgacctagtgactgggtctgtgcccaggagcacccagtggtagggggtctagacaagcagtcactcatcacacatccctcaggtgaccttgtttagggcccagtggcgcaggcaggctttatcctagacagagctaagggaccccagccctgtaggttgcccctcctattctcaacctagtgtcccctcagatgaagaagttgcctaattagttagttccctgttgttcagactccttgttcggcaaaatgtaaattaaacattttttccgggtgtcagtatgaaaaatgacagtcgctgggagatcacagaggacatctgctccgattcctgagtgtggtgcctgcgtatggctgatgttgcaaaactggagggaacagtgttcctgtgtacctgggtgaccggggtgggactcagctgggcgtagcgcccctgttccagcggtggcacctcctgggtctgctgtgcaggcagagccctagatgatgctcccagctgcaggcactgccagttgtgccctggcgctagtgcttgctgggaaggcggaagtgtcccaggtcccttcttccccacctcacactgtactctccctggatcttatgtgcctgggtcctcacagtggagttcccatgcagctccttatgtctcctatcccctgcaggggaatatattaaaacctggcggccacgctacttcctcctcaagaacgatggcacctttattggctacaaggaacggcctcaggatgtggatcagcgagagtccccactcaacaacttctcagtggcacgtaagtgtcttagccatgcgggttggatggggtggctaggcaggccagcagggaggctgaaactgcccactgagaaacccgaggagagcctcctgttagtcctagggtactgggcagtactggccctgagtcacctcctctaggactggtgagtggccagctctggcagggtcagggagtccttgctagatggcggacgggtccagcatgtagtgactgaacctggtctagggggtgggttgaccagggtccctgtggattaaacagccactcaagggcattccttgggaactctagggtagacagcgggaggagaggctcccggctctaggagtgaatgacatcccaaggaccgtctctgtgattctccctgggaaggtggccatcggaagccctttgccctatgggtcttgtggttcctgttgccggagggtcagtgggagtcagccctgtccaggactggtgagggtgacagactgagagcttggggctgagatgcagtatctttgatctctgtgccacattgtcacagcccagttttatttggagctggacaagaataggtttgacagtgttaagcgacagcagtaagcccgggcggttactaactgtggactctggggtcctccttgggctgcagtctggagtgtagagtatgtgcctagcatagctgggtctccatttatcctcacagccttcttgagatgctcctgccctgcaggtagctctgtctgacctgcctcagatcctagggccttccatctctgggcacttggccagtccccaggtcttagggcttaacacaggttgctgcctctacagatggataggaaaggactcccagcttacttatgcaggaggaaggaaaggggcctctctagagcagacacataggtatatgcactggccaagggccgctgggcagtgggcagggcttggccttcaagcaggtcttgggcctcaggaggtagacagtttacgcctagctggggacaaagcagggtggggctgtgttcaggctttttatctgaggtgggttctggagggaggggttaagacccccatttggtgctagttttcatctgcttgcctgacaggctgtctcagatgtgctggagacaaggctcagggtgattttccacccctcccccaccccatgttgacataggcctttcccaaggctgggcctcaagcccctcttggccccttgcttggcaggctgccccttgctcattcattggagcctggaggcccctcacattgccaggacccagacgatggaatgtgggaggcccctcagtccctcctgcctgctttgccgtgaagccctcttgctgcatacatatcctcagggcctgggctgctcccatgatccacccttaaaggtgtgcatattctaggtgtggccaccaggtgttcatgctctgggcatccttgttctgtgtgtgctcccagtgtgaggcttgggtgctgagtacatgtgtgacttttccagagactctgtatgttgttgggaaaacagcaagatacttctgtaccggaagggggtgtgggctggatccctgaggcccccacatgaggtagggatcagcagttgaaggacagaggaacttcaggatagttatggtgtagggctaactgatctagcctgactggttccttcaccttcagagcagagcatctcagctgtggcaggtcttgggtctcagttctttgagaggaactagggcaaggagaggggatggagcagggtgtggtggctcatgctgtattcctggcactcaggaggctgaggcatgattacctcaagttcaagaccagtgtagactacatagtgagttctaggtcagtctgaattacataggaagaaaacagaaatgctagcggtggtggctagaacctgtaaaatcagcacttgagaggcagaggcaggaggatcgccatagtttgagacttccagtctacgtggagttttccagagctgcacagcaaaagaccctatatcaaacaaacaaaaagctttaaaactttaaaactttttacattttattgttttgtgtgtaaagaagggtgtttgtttattttatgtgtggatctggtgctcttagagacaggaagagggcatcagatctctggagttacagatggttgtgagttgccatatgggtgctaggaattgaacctctagtcttctggaagagcagttgtacttctaatcaatgagccatccatcgctccagcccctgaaatcaatgtgtgtgtttgcttgcttttcgagacagggtttctctgtgtagccctggctgtcctggaactcactctgtagaccaggctggcctcaaagtcacagagatccacctgtgctaggattaaaggtgttcaccaccacacctggcaaatacacttttaaagtgaggatgagattcaccttcctgggacagggttgaggtctgtctggtgaggactacgagggggagtttcacggagaaacagatagatgcttccccgacttctttagaatgccagctgatgaagacagagcggccaaggcccaacacctttatcatccgctgcctgcagtggaccacagtcattgagcgcaccttccatgtggaaacgcctgaggagcggtgagtgggcagggtatggttgctcgagagcctgaggcctctgctgagtccattctggagaactagactggagcacttgtgggatgagtggggcataatgggagaaatatcagcatcccaggtaccttgatgctcctgatactcttgagtgtatggaggcccaggatctgagtggtggcctgcagcttcaggaccagggagccaggcagctggttggtggaagccatgcaacagcgcccccaggtgcctgaggcctcacttgacccgctgcagggaagaatgggccaccgccattcagactgtggcagatggactcaagaggcaggaagaagagacgatggacttccgatcaggctcacccagtgacaactcaggggctgaagagatggaggtgtccctggccaagcccaagcaccgtgtggtgagtctgggctctgcttctgctggggctgccaggggttgtggagggacctggtaggtcctggtattcctgcctggcttcctgtatgggtctgggtacccctggctcctctggacatgggctgaggacacctcagttggcagagtgcttgtccagcgtgcatgagacatgagaccccagtacttaaaagtaagtaatatgaagatgcccgctgactcccaaggcccagcgctctgactagactgtgcagagcccttcactgactgcacaggccagcacatgtgagaatgggcctggcttgtggccagctctcttgctgttggctaacttggaggaagcttgctcactctggacactgtcaagccgaaggcggtggcatatggtttattaccataggctagttgtggtgagcaaaggctctctctaaccgggctctgtctactgcccacagaccatgaacgagtttgagtacctgaagctactgggcaagggcacctttgggaaggtgattctggtgaaagagaaggccacaggccgctactatgccatgaagatcctcaagaaggaggtcatcgtcgccaaggtgcagggagggcaggcttggagggaggctgagaggagtgggatgcaggggagataggtgctcacttggttctgcattccaggatgaggttgcccacacgcttactgagaaccgtgtcctgcagaactctaggcatcccttccttacggtaagcagtggccatcagtctggcccctgtgggatagggaagagtgggccagagtgggtcactcccacactgttgcctttgcacccatacacggacgggcaagggcttcatgggcatcaggtaggctgatggagggcggggctgcagtcatgccccagctgtagtgtgcaggaggcaggagtgagactcgtcttctcactctgctgagaccttgagttgccccagctctccatccctgcagtcctctcagacccgtcttctaggctggtccctcagggttgattgttagtgaagctcagttacagtagcttgattgagttccagagtcagcatcttgggcttattccacccgtggtccatgatggaaaggtgccggggtggctcagtgcaccagttcataagctgttgtgtcaacctccccatctggaggctcttgggaaccccagaacttggtatagttaacttctaagccatcttgccctgcagttgaacctagacctcgtgtctctcatcttaaaatctaccagttggcatgtggcctgcatctgtagcccctgctgagttctaggccagcctgggctacggtgatacccaagatgtgccctgatccatcttggggtggcagtgtcactgtgcttaggcttgccctgcttccattccaggccctcaagtactcattccagacccacgaccgcctctgctttgtcatggagtatgccaacgggggcgaggtagggccacaggcagcttcagacctgggcacttgatgggtgaacttgtccctctgagagctttgaaccctctctgtagtacagatcactggtgctgccagccctggccatgtgagcctgtagctgctcgtttggggatgtcttatttctgctgagttggagtctcgcagtctccagttctctttgggggctagttcctaaccttccctctgcctgtgggtaagggttggcgggccctcacacaggccttcctcagcgcgctccaccccacagctcttcttccacctgtctcgagagcgtgtgttctccgaggaccgggcccgcttctatggtgcggagattgtgtctgccctggactacttgcactccgagaagaacgtggtgtaccgggacctgaaggtgtgcttatggagcagggcgggtgggggctggggggtctggcctcactgactgagcgccttcccacacagctggagaacctcatgctggacaaggacgggcacatcaagataacggacttcgggctgtgcaaggaggggatcaaggacggtgccactatgaagacattctgcggaacgccggagtacctggcccctgaggtgctctgccacttcctgtgtgttcccttacatcctcccacgccccgacacaacgctgacagagtcccccatctaggtgctggaggacaacgactacggccgtgcagtggactggtgggggctgggcgtggtcatgtacgagatgatgtgtggccgcctgcccttctacaaccaggaccacgagaagctgttcgagctgatcctcatggaggagatccgcttcccgcgcacactcggccctgaggccaagtccctgctctccgggctgctcaagaaggaccctacacagaggtaagggctgccggggcttcaggctcagcctctagacagtgctgctgcccactgtacccgccacagtctcagtcacatgtcgggtggggtggtcaggcagctaggggtatccctaccctgcgagtatccccgtgacctgtcaccttgcacgcagtgtctgagccctggacctgtctcctacccacaggctcggtgggggctccgaggatgccaaggagatcatgcagcaccggttctttgccaacatcgtgtggcaggatgtgtatgagaagaaggtgtgcatctggccactgtgcccatctctggatcacatacgtgtgtgcatacatataaacactctcactctggccactgtgcccatctctggatcacatgtgtgcacacatgcaaacactcctgtttttgctggctcagacacgcatgctgggcccacagccttgtgtagtcacatgcccccacagagccacagggttgtgcacagccttctcgctcgcacagaagagggtagtatgctgccctgcatacctcgcacagtcacctggcctctccaggccctcaattgtgcccctgttgcctacacctgttgcttgctcctgtcctttgcctggagatcgcctcatgtgccctatgatgaaagctagccgagggtggggggtaatgtctaggtgtctccaactctagggcgagcctaatcccattctgggacggcccctgcccgtctggcacagtgtaggccactgcagagagcagagccccttgtactcacccctaagtgtgattctcttcagctcctaagtacccctggcccaggctgatgagggacacagcaggtggtctcaacactctaccttgatgtgttgggtgccctgttaccccctgccttgagtgtaccttctagataacacggggccagcagcatgtgggggtgtggatggcatgcctttcctgcccacactcaactagagatcccatgaagtccgcattgccctcacaccagatttgggagggatggcaattgagggtccttgcctgtgagacccaaaaggatgttagcagcctccagtgcatacaccactctgcagcttatcttcttcatgggctgtcagtgaggcaggcgagctcacctgaagactgctttgagtcctgccacagctgtggtggtgccactgtgtgcctttagtcccagcacctgggaggcaggagcaggtggatctctgagtttgaggccagcctggtttacagaggtagttcctagggctacacagaaccccagtttcaaaaaatggaaagggaagaaaaaaaaaaaaactcagaagggaaatgacaaccagagaacggagttcccactgcctggaggtgggcagtcactaccctctcgtcactttgggcatctctgggcttgctctcccctgcctacactgccctacccagttccatctcctagagctgttccctagtgctagtgcccacccgataaggtcagtattgcccagagaggatggagggattggaacccagtagtaaccaggccttctgttgctcctcagctgagcccacctttcaagccccaggtcacctctgagactgacaccaggtatttcgatgaggagttcacagctcagatgatcaccatcacgccgcctgatcaaggtgaggccaccccactccatggcccctcagtgtctggcttgcactcctgctttttttgggggggaactggagttaacaggtggttgtgagtagccacgtgggcactggaactgaacccgggtcctctaccagagcagccagtgctcttaaccactaagctctctctcagccccaaaactaaaagaatcaaacaaaccctttggagggtggtagcagcttggcggggagggagggagtgttctgagggccagagtcactgccccctcacagggcccccttgtatcctctggcatgtgtcaggtgggcgggctgtttctagagatggtctgagccctcctgtggcccacagatgacagcatggagtgtgtggacagtgagcggaggccgcacttcccccagttctcctactcagccagtggcacagcctgaggcctggggcagcggctggcagctccacgctcctctgcattgccgagtccagaagccccgcatggatcatctgaacctgatgttttgtttctcggatgcgctggggaggaaccttgccagcctccaggaccaggggaggatgtttctactgtgggcagcagcctacctcccagccaggtcaggaggaaaactatcctggggtttttcttaatttatttcatccagtttgagaccacacatgtggcctcagtgcccagaacaattagattcatgtagaaaactattaaggactgacgcgaccatgtgcaatgtgggctcatgggtctgggtgggtcccgtcactgcccccattggcctgtccaccctggccgccacctgtctctagggtccagggccaaagtccagcaagaaggcaccagaagcacccccctgtggtatgctaactggccctctccctctgggcggggagaggtcacagctgcttcagccctagggctggatgggatggccagggctcaagtgaggttgacagaggaacaagaatccagtttgttgctgtgtcccatgctgttcagagacatttaggggattttaatcttggtgacaggagagcccctgccctcccgcacccgctcccgcgtggtggctcttagcgggtaccctgggagcgcctgcctcacgtgagcccttctcctagcacttgtccttttagatgctttccctctcccgctgtccgtcaccctggcctgtcccctcccggccagacgctggccattgctgcaccatgtcgttttttacaacattcagcttcagcatttttactattataataagaaactgtccctccaaattcaataaaaattgcttttcaagcttg

SEQ ID NO: 62 - DNA, 1754 bp, Homo sapiens
  source 1..1754: mol_type = genomic DNA
atgcataaatgtacacagaaacaggtggggtcaagcagggagagagaactggccagggtataaaaagggcccacaagagaccggctctaggatcccaaggcccaactccccgaaccactcagggtcctgtggacagctcacctagtggcaatggctccaggtaagcgcccctaaaatccctttgggcacaacgtgtcctgaggggagaggcagcgccctgtagatgggacgggggcactaaccctcaggtttggggcttatgaatgtgagtatcgccatctaaggccagatatttggccaatctctgaatgttcctggtctctggagggatggagagagagaaaaaaaacaaacagctcctggagcagggagagcgctggcctcttcctctccggctccctccattgccctccggtttctccccaggctcccggacgtccctgctcctggcttttgccctgctctgcctgccctggcttcaagaggctggtgccgtccaaaccgttcccttatccaggctttttgaccacgctatgctccaagcccatcgcgcgcaccagctggccattgacacctaccaggagtttgtaagttcttggggaatgggtgcgggtcaggggtggcaagaaggggtgactttcccccactggggaagtaatgggaggagactaaggagctcagggttgttttctgaagcgaaaatgcaggcagatgagcataggctgagccaggttcccagaaaagcaacaatgggagctggtctccagcatagaaaccagcagtccttcttggtggggggtccttctcctaggaagaaacctatatcccaaaggaccagaagtattcattcctgcatgactcccagacctccttctgcttctcagactctattccgacaccctccaacatggaggaaacgcaacagaaatccgtgagtggatgccgtctcccctaggcggggatgggggagacctgtggtcagggctcccgggcagcacagccactgccggtccttcccctgcagaatctagagctgctccgcatctccctgctgctcatcgagtcgtggctggagcccgtgcggttcctcaggagtatgttcgccaacaacctggtgtatgacacctcggacagcgatgactatcacctcctaaaggacctagaggaaggcatccaaacgctgatgggggtgagggtggcgccaggggtcaccaatcctggaaccccactggcttcgagggctgggggagagaaatactgctgccctctttttagcagtaaggcgctgacccaagagaactcaccttattcttcatttcgcctggtgaatcctccaggcctttctctacaccctgaaggggagggaggaaaatggataaatgagagagggagggaacagtgcccaagcgcttggcctctccttctcttccttcactttgcagaggctggaagacggcagccgccggactgggcagatcctcaagcagacctacagcaagtttgacacaaactcgcacaaccatgacgcactgctcaagaactacgggctgctctactgcttcaggaaggacatggacaaggtcgagacattcctgcgcatggtgcagtgccgctctgtggagggcagctgtggcttctaggtgcccgagtagcatcctgtgacccctccccagtgcctctcctggccctgaaggtgccactccagtgcccaccagccttgtcctaataaaattaagttgtatcatttcatctga

SEQ ID NO: 63 - DNA, 1600 bp, Pan troglodytes
  source 1..1600: mol_type = genomic DNA
atggctccaggtaagtgcccctaaaatccctttgggcacaacgtgtcctgaggggagaggcggcgccctgtagatgggacgggggcactaaccctcaggtttggggcttatgaatgtgaatatcgccatctaaggccagatatttggccaatctctgaatgttcctggtctctggagggatggagagagagaaaaaaacaaacagctcctggagcagggagagcgctggcctcttcctctctggctccctccattgccctccggtttctccccaggctcccggacatccctgctcctggcctttgccctgctctgcctgccctggcttcaagaggctggtgccgtccaaaccgttccgttatccaggctttttgaccacgctatgctccaagcccatcgcgcgcaccagctggccattgacacctaccaggagtttgtaagttcttggggaatgggtgggggtcaggggtggcaagaaggggtgactttcccccactggggaagtaatgggaggagactaaggagctcagggttgttttctgaagcgaaaatgcaggcagatgagcataggctgagccagattcccagaaaagtaacaatgggagctggtctccagcatagaaagcagccgtccttcttggtggggggtccttctcctaggaagaagcctatatcccaaaggaccagaagtattcattcctgcatgactcccagacctccttctgcttctcagactctattccgacaccctccaacatggaggaaacgcagcagaaatccgtgagtggatgccgtctcccctaggcggggatgggggagacctgtggtcagagctcccgggcagcacagccactgccggtccttcccctgcagaatctagagctgctccgcatctccctgctgctcatcgagtcgtggctggagcccgtgcggttcctcaggagtatgttcgccaacaacttggtgtatgacacctcggacagcgatgactatcacctcctaaaggacctagaggaaggcatccaaatgctgatgggggtgagggtggcgccaggggtcaccaatcctgcaaccccctggcttcgagggctgggggagagaaatactgctgccctctttttagcagtaaggcgctgacccaagagaactcaccttattcttcatttcccctggtgaatcctccaggcctttctctacaccctgaaggggagggaggaaaatggataaatgagagagggagggaacagtgcccaagcgcttggcctctccttctcttccttcactttgcagaggctggaagacggcagccgccggactgggcagatcctcaagcagacctacagcaagtttgacacaaactcgcacaaccatgacgcactgctcaagaactacgggctgctccactgcttcaggaaggacatggacaaggtcgagacattcctgcgcatggtgcagtgccgctctgtggagggcagctgtggcttctaggtgcccgcgtggcatcctgtgaccgacccctccccagtgcctctcctggccccggaaggtgccactccagtgcccaccagccttgtcctaataaaattaagttgtatcattt

SEQ ID NO: 64 - DNA, 15640 bp, Homo sapiens
  source 1..15640: mol_type = genomic DNA
ctcccctgaagcaggccataaaagaatcctctgacgtttctataaagtaggtcataagaaccttcattccagaagtaccctcaaagacagagacaccaagaagaatcggaacatacaggctttggtaagttccctacagtttattaatgttcagtcatttcagatcatactcctttttggacaattgtatttctacatgactgtccactttttatcaaccttaagcataaaaatacacatttctctgtttctttggttcttcatttctgaaggctctttttcatgtaaatttatattgaataaatctgtacgtttttcttttgttactctgtcttttgttataggactgtcaggcataaacctatctatgggcaagaaacggaatctcttctcccctacaagatatgtcacttgtacataagcatttaattgggatttgccatttttagagaaactgagtcttttttatttcaataagtagatttatctcaatatacttgattttattctgcctcctaattgcatatttttgttgcctacatatcctttttttttttctattttctgttaaatggaatgtcttgtgttctgggtgtgtgagtgtgtgtgcgtatgtgtattttctttttctgacaacttaaaaggtttacgatctgttttccattttttgaagggttatagtcagaactttgcatcatttgttgaaatcgtaactgataaaaaatcagcttgactatatctattgattctcagatataaaccattttttaaaatgaacatgttcatacttccttccactgttgataacaagtgtattttttagtttctttttaatcttattttccatttattttattagcattagtgagatccatgattctgtgatctgcctttcccataaggcttcttcaacagcttgaacttttacattcccatatatcatttaaaagcctagtattatacttgtttgaattactgttggacatcagagcattccatcaaagaattaattcttatttatatgtccattttcttctaggtcaaccccaatggtaaaaagctttcctaaaaaaatcatccctttggttatactgataagacatgaatgaataaataagaaaaaaaaactaagcagatatgtcacagctaagatattttagacaaattctaacaaaaatgtattggaggataaagggtacgtaggctggatttgaagggtagcattttctctgaagagcctgctctacttttcagtctgaatcttttcaatacaggcaaaaaaattggcagtgggggaagttaggggtaatagtgtgtcagcacatgcatggccctaagagttgttacaatatcaaaatacttagtacagactcacttccctgactttccaagtgccctgattcctctagactcccccagcccctcacataggtcaacccctacagtctcaccactatgaaacaataaaaacatcaatgcctatcatttcagggggcctcaggcaccctgatctatcgctatagctttctgttctatttgatggtgcctgtgctaattagaattttaaattataaaatttaaaattatcccgggaagtaagcatggctgagagtcccatttcctattagataacaataagagatgattaacagataggtaatagataagtagatagatagaccaattgatccctagctagaagtaggcatgcttcagctctactttccatcagataagaaatgtgtgtgcctgtgcacatggacagaatattgaagtgtgaggaacctttcacaaggaaagttatcatccatctcacttctgattagcatacagctaaatatttaattcttttgcctaaagaaaacataactctcaaagagtgagatttacgtttgtggagactctggacatgtcatccttaaatctggcattattttatatcaggcattaaaatgtgtacaaaggcacacatgattcagaacaagcacgtgacatacaattcatagagacttcatagaactagaccagaggatatgaatagtatagcagtaattaaaagaaaaaaataagaattacaggggaaatttccaaatgcttccactatggttttcttatttaaggagtaaatgccctcaaggcactgacaacagattaagaacttgcattcactgagggaaactgatgacctccaaagccctagcaaaaacaaacactgaacatgaacacttccaaaaaaacaaaagcatgtcttattattgttaaaagaaaaaactttagataaattaattttagcagagtttaaacgagcaaagagacaattaatgaatgaggcagcaccctaaacgagtaatggtttagagagctccactctgcaaagtgggcaggcagtatttacagacagaaaaataaaatgacaaacagaaatagtgtcattgattacagctccttctttgccttatttggacatctgagcagtttgtagcctgtaactggctgaaagctcagctgctaagattggccaagactcagctacttgttacaagaatatattcttaatttaggttgcagtttgtttacatactaagttagattgcagtttactgaaaatggggcagcattaggccaaattcaattcaacaatatgtatgaagttaatctaaatagtaggatgtaattaagtcattgcattttgcttattctaaaaatagtgccattcaaaaaaaaccactattgatctcttctccaatgtgccctttacattgtctaatattttatattgaaaacagcacacgtcctatttaattttttagtcattagaagacgactattcagaatttttcaattcatagacaatactcctttaatcatttcatatttcattttatttaagacaattcactactaatataaattgaaatatctttgtgatacattcattctgaggatttttttaactcttaatttctttcactctttaatatcccttagcatattttgcagtagacacctcctaggttatgtgaagaaatttttttttgtttttttgagatggagtctccctctgtcacccaggctggagtgcagtggcgtgaacttggctcactgcaacctctgcctcctgggttcaagcgattctcctgcctcagcctcctgagtagctgggactacaggcgcctgccaccacgcctagctaatttttgtatttttagtagatacagggtttcaccatattgatcagactggtgtcgaactcctgatctcttgatcctcctgcctcagcctcccaaagtgctgggattacaggcgtgagccactgcgcccgccctgtgaaggattttaaatatactttgcttcatacgtgacagaagaaaaaacaaaattattccaaacttaaaaacagataaacaaaagaaaatacaaactttgttctaaattaggaataaaaaccaacctgatgttacttaatgttaaaaactagcgttctttagaaaagatggcaaccttgtttattagtttcaggtactaaacatagcatgggaactttagcatcatttgagctatttattcagctacttgacataaatcaatcatcacccctcagttgcatcacaagctctcagaccaaaaatggcaaacaaatgaagttttgtaaagttttaaaatgtacaaccctattcttactgaacttctttattgttttaaattaagggcacagtttgataaagagaaagcctggcaagaaagcacatataaaaattaaggtgaaagggggtaacatgcatagcagttagaagaattaggacaactatgatttttgcataatatatgtctttgcattatttatatatttcaatattccattcacaggaaatgtggggctatggagcagcaaggagacacacaataaattttacagagaaacctgtacctctttgcagtcaaataaatcgactgacagaccctgaataaacacagcttaggttttcttagattgctcttatcctggctatccaagaatgttgcaacacctttaaattttaagattaagttgtcattgtcagttcttataacagattttcttactcttaagtttatgggagaggaggagaatataggataatgttaatttctctgccacacagctctgctttcttaataattcagactctctccatccagggaaaaaatgaatacctaatgtgagtatatggaatcctgacccagctttcagattgagagagtctatgaatcatcacatttgatgtttatgattcaaaatgtaggattgccttaaactaaggcaattaggaagatagtttttcagagacgttagtctttgttaagatttctaggtccccataagagcacttagtcagataattgctaaagcacatatgtggctctaggaactaaggaaaaagtaaatgccataggaagactattttttaaattacctcattcatcagtctattgtaagagacagcaaatttgaaactaaaggtcacaggctgctttagatgcatggacttaaaaattagagaaagtcatcaataaaacttagttcttattcattatagtcatttcatttaggaaatttccaaaaggtgaatggaatttttaagcccatgaaagatgaatttttgtcaccttggcctcagagtggctcagggtcagagaaggtagagagatcataagttaataacagtttacacactgctatccttgaaaagagtggaaattactggctagaatttcagtttattacatggtataccagaatgatgggtgtaagtgtgtctgtgtgtgtgcacacacatgtgtgtttgccctggaaaactactgcatcacttccccaaaataaactcttaaatcaggggttatagcttgtttgtcttagaagtgggtccacaggatgtttacaagagaattcatttcccagccttcctcatatgactcctgattttccgtgaagtaataattgttccttcatttaactcaactatagaattattaggctggtgcgcaagtgactgcagtttttaccatttaaaagtaaagcccaaaacctcaattacttttgcactgaactacttctttcatattctttacctttagtctctccaagcttctgtttcttcatctgtaaactggagagaataataccacttaacacatatgttaaaatcaaaagaaataaacagatgaagatgtacattcaaagtaccatacagatacgctatttttaaaaagacaaaacacatgtatttttaaaaagacaaaacaaaatgtgtatttcaaaaagataaaacaaaatgtaaaaagcaacaaaatgaaggaaatttaatgacagtgtaacaggggactgaaaatcctgatttctcaatccttattctatatctcttggtatttagtgtaaaaattttaaaatctttacctagcaatcttgaggaagaaacttgataactgataatacatgagattgttacctaagtgaaatataatcctatatattcaacaaactttagagaaataagataaattttaaagtaaatgacttctgtagttttatagatcctccaaaccaatctagtctcagatctcaccttcatcatttctctcatttccttttggcctaattaatcaaaatccttcctagaatgttcatttctggccagtatgtcttcctgaatatgaataagaaataaaataccatttgatgtttgaaattatgggggtaatctcaatgacggaaatagatgaccaggaaaagggaaacgaatgcctgattcattatattcatgaagatatcaaaggtttataaagccaatatctgggaaagagaaaaccgtgagacttccagatcttctctggtgaagtgtgtttcctgcaacgatcacgaacatgaacatcaaaggatcgccatggaaaggtatgtgtgacaactcactgcgttgttggttgtatcaacactcctgtggggggattaatgtgaaattttaactaataacaagagcttgcaggtttacaaggtttagaagcacaatcttatgtttcctctagaaagcaattttacaagggcaccatagaacagaacaatggttctcaaacaggggaatcctctctcagaggcatttggcaatgtcgggagatgttttgggttgtcttaactgaggtggggaagtgagggaaaagtgctattggtatctaatggatagtgatgagagatgctactgaacatccttcaatgcacgggacagcccccagaacaaggaattattcaactcaaaatgccaataatatcaagattgagaaactctggactagaataagactcaaagagtctgtgggtccaatttgccacaactctcaaagggacaaagtaacattttctggttatcaggcctctaatgtggattggccaacttgaatcaacctgatgaaactttcaattgtgaagccataaaatagacactaacaacagaattgtctttcctattctttgtcaatttggttcaagccaaatgacatttcaaaaggaaaaacagactgcctagtaataactaatcacctttactttcttggttgacatttgcaaggaaaataaattagtaacaaccataaaatgtgtttctaattaaatgaagaacaaaaacatgtgtctattttatctcgttttgggctttaaaaatcctttccatgctaaatgtgcagataaatgtactcagagttacagaacatctatccagttgtgaatttcctagacctgctattccaattcctctatctacaaagcacattttatttacacatacagataaaatatacatttggtttcgtcatatgattatagtatgcataaaataaactttttggaagaatcatgtttttgaaaaattaaaagtctataataggaatcatctcaaacaaaaattttattttacaactaacagatttagtcacttcctacactaagcaattttttaggtatttttaagtgtttaggtttaggtactttttcacaaactaaactttagcatttgcctagttttatcttgggcatttctgattgcatttcttaaaggttttgaaggacttaagttttgtgataaacacagttttatattgggcattcttttggggtaatgccactgaagttaacaagtgattttaatttggtagctatctatcgtttctttccttttgaaagtataaattattgatatatataggactgtaactgtccatttgctgagatagcaaattgatgacaaagctttgaaaaccttcagcaaagatcagagtgttttgtaattagagcaggaaaagtggagaaaatcaagctttctggggcctctgttgtgatgtaatcaatcaaaggcaaagaacttgttattctttaaaagtgacagcaacaacctatgtaaacactgagccatcacggctactcatgcggcccccattacacagatgcagattgacagcccacaggtgtacgcgatgtgacaagacgacgtgcaaagaccacagtattggcatcatgcctctctcacccactaatgatacgacttggggaaaatcacttaacctccctaagccatctgtttcatcagtataatttgatgataattacaaaggcccagtgtatctcacaaggttattatgaagctcaaatataaaaaaaatttaatgtttttggcgaagtgtcaaacacatgcatgggactattacgagttagcagatctaaactacagcattatttttatgttagaattcttttcaaactcagtattagcaatcaaacaatcgtgtgtttattcttatcaggcaggatgataaatcgaaaggatcgactgtactgtttttgttatatcagtgtctacaatgtaaattatcagacacacctagttaaaaaaaaaattacaaagtgctgggcagcctgactgctgaaaatctgcagaaactcccaagacattaaactatcttaagagaatgatccaaacaccctagctcagaattaatttaagctccaaatgtttggaaagtacagaagcacttctgggaaacgtacaaaaatgcaggaggtaacccacttctcaaactatatatctgtgcaaacataattatatatctacatttacacagtggaaggcgtttgttcttcccccatcccagccattacagtagcaaatcaggcagctgagggcagtggggagcaataaggctttcctcggcaggattacttctgaaaacctccgtggaataaatcatctcagagtggctcgcgttcttatttaagcagggtccctcctgctgctgctggtgtcaaacctgctcctgtgccagagcgtggcccccttgcccatctgtcccggcggggctgcccgatgccaggtgacccttcgagacctgtttgaccgcgccgtcgtcctgtcccactacatccataacctctcctcagaaatgttcagcgaattcgtaagtaccatgcttctggcttcctccctgaaggagccttcacatgaactactgggctctgctacatgttaacctagaaaacctcccgagccaaatttcaaacgatacattttaacatgtgaaagaagacaccagctcataagatgtggaacaagaagaaagggacagtgccatgaaatctcaaagattctcaaagaatgtaatgacttaaattttttctttaattcactttattttttaaaaataaaaaaatttaaacacctgacctaaagcatgtttaggtggggctgaggagaaggaagagtgttgatttcttgttcttgaatgtagaggtcagactccacaggcattctttacttagcacggaatagatatccaataatgaagaactgcactgcagcaaattgggtggattgaatagaattaaactgagctgaatccatggtggggaaaatatacaaataataacttttcaaaaaccccaaaatgctagaaatcatttctctgagatttcagtatatgggtttataattacaataaagggctagtttagaattggaaaccagtgcttttttctttcttttcctcccttccttccttccttccttccctccttccttccttcttcccttcccttccattccccttccttccttccttgcttcccctccctccctcccttgttccctccttccttccttctttccttccttccttccttttttccttccttccctccttccttccttccttccttccttccttccttccttccttccttccctccttccctcctcccttccttcctcccctccttccttccttcctccctttcttttctttttcagaaatatgtactctatttctgaataacctattttggaaatcataggttaactcttctaggtcaatcaaggagcagacaatagattagtgctttaataaatcaagggcctccacagagaataaacatacatttataaaattatttttactctctgatttcgctttcatcctccatttttgactggccatcttttgtcttccaaatcttcctagtaatttctttagacttttataagttttgctgaagactagtctttcctgtcaatgtgtcagctcattttttattctgttcttatcctcagtccattgtttatatttcctaaaattgtgtgccctgtgtttctgaattattttgtcataatttaaaaaaaagttgtgttccgtttctatcatgaacttggtaaggtataggtgtgtggactcagagaaactttttagagaaaagttatgattttataatgcctattaagagaagtctatcagtttgggcacacagtaaataagagattaaatgaatacatgtaaatacatttgcactgtggcatttggctcaaatgctgaagaaagatgattctcaatacaacatttaatgttgcatatttttgctatttttagcatttgctttccaaatagcaactcgtgtgacttgtgtgaatggtaaaagtaaacaacaagggaattgcaaagaaggaaaaacattgatatttatgaaaactagatgaaaaaatgagtttacagagataatgggggggaagtaggcgaaagggttactttcttaattctttagttttcatttttatgtagctctaattttttaaaattacacatctgccaaaggtattagtattctgctaatggattcatttattcaatgcccaaacaaccccaactaattgaatttgtctcatcatttccaggataaacggtatacccatggccgggggttcattaccaaggccatcaacagctgccacacttcttcccttgccacccccgaagacaaggagcaagcccaacagatgaatgtgagtccttcatccaggctttgcaccaaaacaaccaaggcagtatatgggtattatcatggtgataggtgctgtaatagctagtggtaattgtacatgcagagaaaaatataggaagaataagcagtcaaaaaattacattatgtagttgatgaaatatgagtcaaatcaaatgctaagtaaagatggtggcagcaatctaaatagcagatccgtacattgtccttgcagataacattattttaaccaatgccttgtcgctaggattgtatatacagtttatgaaagtttgaactgaattggacttctgtgagtaaatatacatttatgcatctgtaagaaaaagaaatgcagttttatttattacatattactcgtgactcctacatcaacagcatgttacatgactgacccctgcactattggagccatctgttctggactttcaagactctactctggttctatttctgctactctgacacccactttttcattcttcactgactcttctgccctctcttacttcttagttaaaagtcaccactcccctcacaaaaaatacagatcctgtaaaacataatattttgcttttcacagctacagttgccactgttctgatgactacaaagtctgtatatcaagcctcaatcatgtatctcagcttcaatcttctattgctatgatctcttccttttggttgtctaccataatcacagccttaacatgatttaaaacaaacatctttatatgcatgccacctacaaattcaatgtattctccatttacaagtttaggaatggcaccaacatttctgtctgctatgttcattaataataattatgataataagagaaggaggagaaagagaaaggggagaaggaggaggaagaggaaatatttattgagatctacaggttatcactaaccagaaatcccaaatactgaagaatcctaagttttttgagcacctacatgatgctaaaaaaaaaatgctcattggagtatttcagatttcagattttctaattaggaatgctcaacttgtactacattgtcagacactttgtgggcattactatatttaatcctcataaaaatcctataacacaaggtactgtcattacactcactgagataaggaaactgaggctcagaaaggttatggaatttgcaccagtcacatggcaagtaagcagcgagcctgggcttcattctattcaaaacccttactcttaatcgttgtgttgcaatgctcccagaaaaactacactgacactcactttatgacctgtacctctttatagctcatttctttcatatcctcttacatgtttccattgcaatgtccatttatttcttctttattcttcattttgttaccactagactagttcacggacatctacaaagtaagcattttaaatcagagataatcagctacttggagtctcctacacgatcgtggtagtaagcaaaacctaggcaggcagaactccattgtgaattccatggttattcaagataacattggttccattttatttacctgcataggccaagagaacagactgctctgccagcagcatggggcaggcggttgtgtagatcaaggaaagcatgttgatgaattccatgtcatcttcattgtctcttcgttctaggatcccaaaataaaactacaaatcaaaaatgaatagttcgatgaacaatttgattcattagtatgaacgaatgcttggatgagagtgatttgggccccttggcatggaccccagtggaatctatttctcatgagtcagatactctgggcacctactgagtttcggcaaaactttagtttctccccagggacaagcaaatcaatcaaatacgaaagatcttactaagtggacagatggtagaatttcagaggaaaaacaaaattcttcattttatcaattagaactctcattagaaaaagtggttactgaaataagccggatttttttttaattttagcaaagtttaggccaatagtttcaattttacatttctacaaattctctcacctaaagaaaaatgtacctacacataggaataaaaaaagatatttcagtacagcctctctaagcaaaaatcacaagtaactaaccccattgtattttacctattttaatgcaattgttctatatggtttcgtagcaaaaagactttctgagcctgatagtcagcatattgcgatcctggaatgagcctctgtatcatctggtcacggaagtacgtggtatgcaagaagccccggaggctatcctatccaaagctgtagagattgaggagcaaaccaaacggcttctagagggcatggagctgatagtcagccaggtgagcagcctcctggtgcttctttgtttttctcattaatataagcggtgacctctgtgatgataaatatttccctttgaaagaaggaaatttaggcattccatattatagaccgctattaaataaagcaagagcctagtcattcatagtcataaatttacatacatgtaaatgaatcttagaatgctgtttgacaggtgtcattttccctacacctacacgcaaaactacaaaagacttgccccttcctgaggacaagaagttaagtgttttcaagggagtgaaaactagagaatagaatctgcaagatacatgctttctgcagggtatcccaggacacccactattgaaaattctttctcttttctcccctcgccagaggatgagagtgggaagggagaaagaagaaaaccaaaatcagattggatgggccctcagccactcaccccgatctgctgcacagacttgtcagggaggagcagatattaacatgacaagacaatgacatcagtgcacacaggttgcattgatttcaggaggtcccacaagcacgagattgcagggagtcacaaaagaaggagatataccttttctggaatgtcttcattttgtaatttatagaaagttgtctcattctaaattttgttttttcttgggactccaaagtcaaaactcatgtcattgtacttaatctcccccaaataatctgtcatatttagattgtgttagtatttgcaatagatatctccattcagatgggataatttcaacattagtgagataatacctaaacagcttctgaggttttcagggataatgtaccatctaaagaaaaatatatgattataggaataataacaggaacaattttgtatttctctttttgtgtactaagtacatgttatcatgtatcattttggttattttcatgcgagaaaaatatgtccaaaacaaacacaaagcacattttaaccttggaatgtgtgaaataaataccttgattttccagttattttcttcattactgtaaacctcatttctgaggtcactaatttgttctatagtacttcattttctgttcttttttctctaccacttatttaagtattcttgttcatatcattatcccttacacagtaaattttgtcttagggctcaagtaccaaaaattaaaaataaaaacataaagccagtcaatgaatacacacacgcacacacacgcgcacgcacacacacatgcacacacacgcgcacgcacacacacgcgcgcgcacacacgcacacacacgcgcacgcgcatacacacacacacactttaaattccaatagggaatcccagatttgaaaaatattctcactttgtaggaaaaggtttagcagatcggcgtctacatccagatatatacctaataactctccaaactagctgacatccctaaagttgctaaaatggttacttggtctctaagacctctgggctttcctggtttgcaaaggcttatagagtgtgaagaaacatagcatgccctctgttgtgctgttcagcctccttttgttatcacagccatgcccccaaccctaccacacagccctcaccactgaagggttgctgccagcaaccccctgacctttttttttttagacaagttctcactgtgtcacctatgctggagtgtagtggtgtcatctcggctcaccacaatctctgcctcctgggttcaagcgatcctcatgcctcagcctcccaagtagctgggacaacaggcgtgcaccaataggcacggctgatttttgtatgtttttgtagagatgggatttcaccatgttggccaggctggtcttgaactcctgacctcaagtgatccacctgcctctgcctcccaaaatgcgtgaaccagtgtaagccaccacacccggcctgtaccctttccttgtaggtgcttttcccggcacctcccagcccagggacctcaaaagaaagcaattgtttcccctagaaatttgaggaaatgaaaatctcctgactatgtaagcagcttttcttagtcatggtcatcactaaattatctgtaccccaaagcatcaagtgtgagtacaatcttcatcttttttaaagtttttggaacatacactagataggcaatagattgagttcaaagcaggaagaaaataaatgatgtcaggaagaataaagcacaagggatacatcagggacaagactggagaaatgaaatagttcctcaagtgagagcaccgaagctagctactccattgtctcttcgtcaaatctatgtcaatatttacatagtacctttccagttcttcatctgtctactcctgcaaaaacatacttcatctgtgatcccatagatgtcagagaacctaaacaggtattctgcttctagtttttagattaataggtttctgatacactggcccagatatacaaaaatcattgcctttgtctaaaactttgcattcatatctcattctcaattcttaattcaacagttagaaagaacaaggacatacaaatactaataatatgaagaataagtcactctttttttgtgtgattaggttcatcctgaaaccaaagaaaatgagatctaccctgtctggtcgggacttccatccctgcagatggctgatgaagagtctcgcctttctgcttattataacctgctccactgcctacgcagggattcacataaaatcgacaattatctcaagctcctgaagtgccgaatcatccacaacaacaactgctaagcccacatccatttcatctatttctgagaaggtccttaatgatccgttccattgcaagcttcttttagttgtatctcttttgaatccatgcttgggtgtaacaggtctcctcttaaaaaataaaaactgactccttagagacatcaaaatctaaaatg

SEQ ID NO: 65 - DNA, 15479 bp, Pan troglodytes
  source 1..15479: mol_type = genomic DNA
ctgacgtttctataaagtaggtcataagaaccttcattccagaagtaccctcaaagacagagacaccaagaagaatcggaacatacaggctttggtaagttccctacagtttattaatgttcagtcatttcagatcatactcctttttgtacaattgtatttctacatgactgtccactttttatcaaccttaagcataaaaatacacatttctctgtttctttggttcttcatttctgaaggctctttttcatgtaaatttatattgaataaatctgttcgtttttcttttgttactctgtcttttgttataggactgtcaggcatgaacctatctatgggcaagaaatggaatctcttctcccctacaagatatgtcacttgtatataagcatttaattgggatttgccatttttagagaaactgagtctttttttatttcaataagtagatttatctcaatatacttgattttattctgcctcctaattgcatatttttgttgcctacatatcctttttttttctattttctgttaaacggaatgtcttgtgttctgggtgtgtgagtgtgtgtgcgtatgtgtattttctttttctgacaacttaaaaggtttacgatctgttttccatttttctaagggttatagtcagaactttgcatcatttgttgaaatcgtaactgataaaaaatcagcttgactatatctattgagtctcagatataaaccattttttaaaatgaacatgttcatacttccttccactgttgataacaagtgtattttttagtttcttttaaatcttattttccatttattttattagcattagtgagatccatgattctgtgatctgcctttcccataagacttcttcaacagcttgaacttttacattcccatatatcatttaaaagcctagtattatacttgtttgaattactgttggacattagagcattccatcaaagaattaattcttatttatatgtccattttcttctaggtcaaccccaatggtaaaaagctttcctaaaaaaatcatccctttggttatactgataagacatgaatgaataaataagaaaaaaaaactaagcagatatgtcacagctaagatattttagacaaattctaaccaaaatgtattggaggataaagggtatgtaggctggatttgaagggtagcattttctctgaagagcctgctctacttttcaatctgaatcttttcaatacaggcaaaaaaattggcagtgggggaagttaggggtaatagtgtgtcagcacatgcatggccctaagagttgttacaatatcaaaatacttagtacagactcacttccctgactttccaagtgccctgattcctctagactcccccagcccctcacataggtcaacccctacagtctcaccactatgaaacaataaaaacatcaatgcctatcatttcagggggcctcaggaaccctgatctatcactatagctttctgttctatttgatggtgcctgtgctaattagaattttaaattataaaatttaaaattatcccgggaagtaagcatggctgagagtcccatttcctattagacaacaataagagatgattaacagataggtaatagataagtagatagatagaccaattgatccctagctagaagtaggcatgcttcagctctactttccatcagataagaaatgtgtgtgcctgtgcacatggacagaatattgaagtgtgaggaacctttcacaaggaaagttatcatccacctcacttctgattagcatacagctaaatatttaattcttttgcctaaagaaaacataactctcaaagagtgagatttacgtttgtggagactctggacatgtcatccttaaatctggcattattttatatcaggcattaaaatgtgtacaaaggcacacatgattcagaacaagcacgtgacatacaattcatagagacttcatagaactagaccagaggatatgaatagtatagcagtaattaaaagaaaaaaataagaattacaggggaaatttccaaatgcttccactagggttttcttatttaaggaataaatgcccttaaggcgctgacaacagattaagaacttgcattcgctaagggaaactgatgatctccaaagccctagcaaaaacaaacactgaacatgaacacttccaaaaaaacaaaagcatgtcttattattattaaaagaaaaaactttagataaattaattttagcagagtttaaacgagcaaagagacaattaatgaatgaggcagcaccctaaacgagtaatggtttagagagctccactctgcaaagtgggcaggcagtatttacagacagaaaaataaaatgacaaacagaaacagtgtcattgattacagctccttctttgccttatttggacatctgagcagtttgtagcctgtaattggctgaaagctcagctgctaagattggccaagactcagctacttgttacaagagtatattcttaatttaggttgcagtttgtttacatactaagttagattgcagtttactgaaaatggggcagcattaggccaaattcaattcaacaatatgtatgaagttaatctaaatagtaggatgtaattaagtcattgcattttgcttattctaaaaatagtgccattcaaaaaaaaccactattgatcttttctccaatgtgccctttacattgtctaatattttatattgaaaacagcatacgtcctatttaattttttagtcattagaagacgactattcagaatttttcaattcatagacaatactcctttaatcatttcatatttcattttatttaagacaattcactactaatatgaattgaaatatctttgtgatacattcattctgaggatttttttaactcttaatttctttcactctttaatatcccttagcatatcttgcagtagacacctcctaggttatgtgaagaaatttttttttgtttttttgaaatggagtctccctccgtcgcccaggctggagtgcagtggcatgatcttggctcactgcaacctccgcctcctgggttcaagcgattctcctgcctcagcctcctgagtagctgggactacaggtgcccgccaccacgcctagctgatttttgtatttttagtagatacagggtttcaccatattgatcagactggtgtcgaactcctgatctcttgatccgcctgcctcagcctcccaaagtgctgggattacaggcgtgagccaccgcgcccggcctgtgaaggattttaaatatactttgcttcatacgtgacagaagaaaaaacaaaattatcccaaacttaaaaacagataaacaaaagaaaatacaaactttgttctaaattaggaataaaaaccaacctgatgttacttaatgttaaaaattagagttctttagaaaagatggcaaccttgtttattagtttcaggtactaaacatagcatgggaactttagcatcctttgagctatttattcagctacttgacataaatcaatcatcacccctcagttgcatcacaagctctcagaccaaaaatggcaaacaaatgaagttttgtaaagttttaaaatgtacaaccctattcttactgaacttctttattgttttaaattaagggcacagtttgataaagagaaagcctggcaagaaagcacatataaaaattaaggtgaaagggggtaacatgcatagcagttagaagaattaggacaactatgatttttgcataatatatgtctttgcattatttatatatttcaatattccattcacaggaaatgtggggctatggagcagcaaggagacacacaataaattttacagagaaacatgtacctctttgcagtcaaataaatcgactgaccgccactgaataaacacagcttaggttttcttagattgctcttatcctggctatccaagaatgttgcaacacctttaaattttaagattaagttgtcattgtcagttcttataacagattttcttactcttaagtttatgggagaggaggagaatataggataatgttaatttctctgccacacagctctgctttcttaataattcagactctctccatccagggaaaaaatgaatacctaatgtgagtatatggaatcctgacccagctttcaaactgagagagtctatgaatcatcacatttgatgtttatgattcaaaatgtaggattgccttaaactaaggcaattaggaagatagtttttcagagacgttagtctttgttaagatttctaggtccccataagagcacttagtcagataattgctaaagcacatatgtggctctaggaactaaggaaaaagtaaatgccataggaagactattttttaaattacctcattcatcagtctattgtaagagacagcaaatttgaaactaaaggtcacaggctgctttagatgcatggacttaaaaattagagaaagtcatcaataaaacttagttcttattcattatagtcatttcatttaggaaatttccaaaaggtgaatggaattcatctttccatgaaagatgaatttttgtcaccttggcctcagagtggctcagggtcagagaaggtagagagatcataagttaataacagtttacacactgctatccttgaaaagagtggaaattactggctagaatttcagtttattacatggtataccagaatgatgggtgtaagtgtgtctgtgtgtgtgcacacacgtgtgtgtgcacacacgtgtgtgtttgcgctggaaaactactgtatcacttccccaaactaaactcttaaatcaggggttatagcttgtttgtcttagaagtgggtccacaggatgtttacaagagaattcatttcccagccttcctcacatgactcctgattttccgtgaagtaataattgttccttcatttaactcaactatagaattattaggctggtgcgcaagtgactgcagtttttaccatttaaaagtaaagcccaaaacctcaattacttttgcactgaactacttctttcatattctttacctttagtctctccaagcttctgtttcttcatctgtaaactggagagaataataccacttaacacatatgttaaaatcaaaagaaataaacagatgaagatgtacattcaaagcaccattcagatatgctatttttaaaaagacaaacacatgtatttttaaaaagacaaaacaaaatgtgtattttaaaaagataaaacacaatgtaaaaagcaacaaaatgagggaaatttaatgacagtgtaacaggggactgaaaatcctgatttctcaatccttattctatatctcttggtatttagtgtaaaaattttaaaatctttacctagcaatcttgaggaagaaacttgataactgataatacatgagattgttacctaagtgaaatataatcctatatattcaacaaactttagagaaataagataaattttaaagtaaatgacttctgtagttttatagatcctccaaaccaaactagtctcagatctcaccttcatcatttctctcatttccttttggcctaattaatcaaaatccttcctagaatgttcatttctggccagtatgtcttcctgaatatgaataagaaataaaataccatttgatgtttgaaattatgggggtaatctcaatgacggaaatagatgaacaggaaaagggaaacgaatgcctgattcattatattcatgaagatatcaaaggtttataaagccaatatctgggaaagagaaaaccgtgagacttccagatcttctctggtgaagtgtgtttcctgcaacgatcacgaacatgaacatcaaaggatcgccatggaaaggtatgtgtgacaactcactgcgttgttggttgtatcaacactcctgtggggggattaatgtgaaattttaactaataacaagagcttgcaggtttacaaggtttagaagcacaatcttatgtttcctctaggaagcaattttacaagggcaccatagaacagaacaatggttctcaaacaggggaatcctctcccagaggcatttggcaatgtcgggagatgttttgggttgtcttaactgaggtggggaagtgagggaaaagtgctattggtatctaatggatagtgatcagagatgctactgaacatccttcaatgcacgggacagcccccagaacaaggaattattcaactcaaaatgccaataatatcaagattgagaaactctggactagaataagactcaaagagtctgtgggtccaatttgccacaactctcaaagggacaaagtaacattttctggttatcaggcctctaatgtggattggccaacttgaatcaacctgatgaaattttcaattgtgaagccgtaaaatagacactaacaacagaattgtcttttctattctttgtcaatttggttcaagccaaatgacatttcaaaaggaaaaacagactgcctagtaataactaatcacctttactttcttggttgacatttgcaaggaaaataaattagtaacaaccataaaatgtgtttctaatgaaatgaagaacaaaaacatgtgtctattttatctcatcttgggctttaaaaatgctttccatgctaaatgtgcagataaatgtactcagagttacagaacatctatccagttgtgaatttcctagacctgctattccaattcctctatctacaaagcacattttatttacacatacagataaaatatacatttggtttcgtcatatgattatagtatgcataaaataaacttcttggaagagtcatgtttttgaaaaattaaaagtctataataggaatcatctcaaacaaaaattttatattacaactaacaggtttagtcacttcctacactaagcaattttttaggtatttttaagtgtttaggtttaggtactttttcacaaactaaactttagcatttgcctagttttatcttgggcatttctgattgcatttcttaaaggttttgaaggacttaagttttgtgataaacacagttttatattgggcattcttttggggtaatgccactgaagttaacaagtgattttaatttggtagctatctatcgtttctttccttttgaaagtataaattattgatatatacaggactgtaactgtccatttgctgagatagcaaattgatgacaaagctttgaaaaccttcaacaatgatcagagtgttttgtaattagagcaggaaaagtggagaaaatcaagctttcggggcctctgttgtgatgtaatcaatcaaaggcaaagaacttgttattctttaaaagtgacggcaacaacctatgtaaacactgagccatcacggctactcatgcggcccccattacacagatgcagcttgacagcccacaggtgtacgcaatgtgacaagacgatgtgcaaagaccacagtattggcatcatgcctctctcacccactaatgatacgacttggggaaaatcacttaacctccctaagccatctgtttcatcaatataatttgatgataattacaaaggcccagtgtatctcacaaggttattatgaagctcaaatatagaaaaaaaatttaatgcttttggcgaagtgtcaaacacatgcatgggactattacgagttagcagatctaagctaccgcattatttttatgttaggattcttttcatactcagtattagcaatcaaacaaccgtgtgtttattcttatcaggcaggatgataaatcgaaaggatccactgtactgtttttgttatatcagtgtctacaatgtaaattatcagacacacctagttaaaaaaaaaaaaattacaaagtcctgggcagcctgactgctgaaaatctgcagaaactcccaagacattaaactatcttaagagaatgatccaaacaccctagctcagaattaatttaagctccaaatgtttgcaaagtacagaagcacttctgggaaacgtacaaaaatgcaggaggtaacccacttctcaaactatatatctgtgcaaacataattatatatctacatttacacagtggaaggcgtttgttcttccccgatcccagccattacaggagcaaatcaggcagctgagggcagtggggagcaataaggctttcctcggtaggattacctttgaaaacctccgtggaatagatcatctcagagtggctcgcgttcttatttaagcagggtccctcctgctgctgctggtgtcaaacctgcttctgtgccacagcgtggcccccttgcccatctgtcccggcggggctgccagatgccaggtgacccttggagacctgtttgaccgcgccgtcgtcctgtcccactacatccataacctctcctcagaaatgttcagcgaattcgtaagtaccatgcttctggcttcctgcctgaaggagccttcacatgaactactgggctctgctacatgttaaccgagaaaacctcccgagccaaatttcaaacgatacattttaacatgtgaaagaagacaccagctcataagatgtggaacaagaagagaggaacagtgccatgaaatctcaaagattctcaaagaatgtaatgacttaaattttttctttaattcactttattttttaaaaataaaaaaatttaaacacctgacctaaagcatgcttaggtggggctgaggagaaggaagagtgttgatttcttgttcttgaatgtagaggtcagactccacaggcattctttacttagcacggaagagatatccaataatgaagaactgcactgcagcgaattgggtggattgaatagaattaaactgagctgaatccatggtggggaaaatatacaaataataacttttcaaaaaccccaaaatgctagaaatcatttctctgagatttcagtatatgggtttataattacaataaagggctagtttagaattggaaaccagtgcttttttctttctttgcctcccttccttccttccttccctccttccttccttcttcccttcccttcccttcccctccctccctccctcattccctccctccttccttctttccttccttccttccttttttccttctttccttccttccttccttccctccttcattccttcctccctttcttttctttttcagaaatatgtactctatttctgaataacctattttggaaatcataagttaactcttccaggtcaatcaaggagcagacaatagattagtgctttaataaatcaagggcctccatagagaataaatatacatttataaaattatttttactctctggtttcgctttcatcctccatttttgactggccatcttttgtcttccaaatcttcctagtaattcctttagacttttataagttttgctaaagactagtctttcctgtcaatgtgtcagctcattttttattctgttcttatcctcagtccattgtttatatttcctaaaattgtgtgccctgtgtttctgacttattttgtcataattttaaaaaaagttgtattccgtttctatcatgaacttggtaaggtataggtgtgtggactcagagaaactttttagagaaaagttataattttataatgcctattaagagaagtctatcagtttgggcccacagtaaataagagattaaatgaatacatgtgaatacatttgcactgtggcatttggctcaaatgctgaagaaagatgattctcaatacaacatttaatgttgcatatttttgctatttttagcacttgctttccaaatagcaacttgtgtgacttgtgtgaatggtaaaagtaaacaacaagggaattgcaaagaaggaaaaacattgatatttatgaaaactagatgaaaaaaatgagtttacagagataatgggggggggggaagtagccaaaagggttacttccttaattctttagttttcatttttatatagctctaatttttaaaaattacacatctgccaaaggtattagtattctgctaatggattcatttattcaatgcccaaacaaccccaactaattgaatttgtctcatcatttccaggataaacggtatacccatggccgggggttcattaccaaggccatcaacagctgccacacttcttcccttgccacccccgaagacaaggagcaagcccaacagatcaatgtgagtccttcatccaggctttgcaccaaaacaaccaaggcagtatatgggtattatcatggtgataggtgctgtaatagctagtggtaattgtacatgcagagaaaaatacaggaagaataagcagtcaaaaaattacattatgtagttgatgaaatatgagtcaaatcaagtgctaagtaaagatggtagcagcaatctaaatagcagatctgtacattgtccttgcagataacattattttaaccaatgccttgtcgctaggattgtacatacagtatatgaaagtttgaactgaattggacttctgtgggtaaatatacatttatgcatctgtaagaaaaagaaatgcagttttatttattacatattactcgtggctcctacttcaacagcatgttacatgactgacccctgcactattggagccatctcttctggactttcaagactctactctggttctatttctgctactctgacacccactttttcattcttcactgactcttctgccctctcttacttcttagttaaaagccaccactcccctcacaaaaaatacagatcctgtaaaacataatattttgcttttcacagctacagttgccactgttctgatgactacaaagtctgtatatcaagccccaatcatgtatctcagcttcaatcttctattgctatgatctcttccttttggttgtctaccataatcacagccttaacatgatttaaaacaaatgtctttacatacatgccacctacaaattcaatgtattctccatttacaagtttaggaatggcaccaacatttctgtctgctatgttcattaataataatttgataataagagaaggaggagaaaaagaaaggggagaaggaggaggaagacgaaatatttattgagatctacaggttatcactaaccagaaatcccaaatactgaagaatccttagttttttgagcacctacatgatgctaaaaaaaaatgctcattggagtatttcagatttcagattttttaattaggaatactcaacttgtactacattgtcagacactttgtgggcattactatatttaatcctcataaaatatcctataacacaaggtactgtcattacactcactgagataaggaaactgaggctcagaaaggttatggaatttgtaccagtcacatggcaagtaagcagcgagcctgggcttcattctattcaaaacccttactcttaatcattgtgttgcaatgctcccagaaaaactacactgacactcactctatgacctgtacctctttatagctcatttctttcatatcctcttacatgtttccatcgcaatgtccatttatttcttctttattcttcattttgttaccactagactagttcacggacatctacaaagtaagcattttaaatcagagataatcagctacttggagtctcctacacgattgtggtagtaagcaaaacactaggcagccagaactccattgtgaattccatggttattcaagataacattggttccattttattcacctgcataggccaagagaacagactgctctgccagcagcatggcgcaggcggttgtatagatcaaggaaagcatgttgatgaattccatgtcatcttcattgtctcttcgttctaggatcccaaaataaaactacaaatcaaaaatgaatagttcaatgaacaatttgattcattagtatgaacgaatgcttggatgagagtgatttgggccccttggcatggaccccagtggaatctgtttctcatgagtcagatactctgggcacctactgagtttcagcaaaactttagtttctccccagggacaagcaaatcaatcaaatacgaaagatcttactaagtggacagatggtagaatttcagaggaaaaacaaaattcttcattttatcaattagaactctcattagaaaaagtggttactgaaataagccggatttttttttaattttagcaaagtttaggccaatagtttaaattttacatttctacaaattctctcacctaaagaaaaatgtacctacacataggaataaaaaaagatattttagtacagcctctctaagcaaaaatcacaagtaactaaccccattgtattttacctatcttaatgcaattgttctatatggtttcgtagcaaaaagactttctgagcctgatagtcagcatattgcgatcctggaatgagcctctgtatcatctggtcacggaagtacgtggtatgcaagaagccccggaggctatcctatccaaagctgtagagattgaggagcaaaccaaacggcttctagagggcatggagctgatagtcagccaggtgagcagcctcctggtgcttctttgtttttctcattaatataagcggtgacctctgtgatgataaatatttccctttgaaagaaggaaatttaggcattccatattatagaccgctattaaataaagcaagagcctagtcattcatagtcataaatttacatacatgtaaatgaatcttagaatgctgtttgacaggtgtcattttccctacacctacacgcaaaactacaaaagacttgccccttcctgaggacaagaagttaagtgttttcaagggagaggaaactagagaatagaatctgcaagatacatgttttctgcagagtatcccaggacacccactattgaaaattctttctcttttctcccctcgccagaggatgagagtgggaagggagaaagaagaaaaccaaaatcagattggttgggccctcagccactcaccccgatctgctgcacagacttgtcagggaggagcagatattaacatgacaagacgatgacatcagtgcacacaggttgcattgatttcaggaggtctcacaagcgcgagatcgcagggagtcacaaaagaaggagatagaccttttctggaatgtcttcattttgtaatttatagaaagttgtctcattctaaattttgttttttcttgggactccaaaatcaaaactcatgtcattgtacttaatctcccccaaataatctgtcatatttagattgtgttagtatttgcaatagatatctccattcagatgggataatttcaacattagtgagataatacctaaacagcttctgaggttttcagggataatgtaccatctaaagaaaaatatatgattataggaataataacaggaacaattttgtatttctctttttgtgtactaagtacacgttatcatgtatcattttggttattttcatgtgagaaaaatatgtccaaaacaaacacaaagcacattttaaccttggaatgtgtgaaataaataccttgattttccagttattttcttcattactgtaaacctcatttctgaggtcactaatttgttctatagtacttcattttctgttcttttttctctaccacttacttatttattcttgttcatatcattatcccttacacagtaaattttgtcttagggctcaagtaccaaaaattaaaaataaaaacataaagccagtcaatgaatacacacatgcacacacacacacgcacgcacacacacacgcacacactttaaattccaatagggaatcccagatttgaaaaatattctcactttgtaggaaaaggtttagcagatcggtgtctacatccagatatatacctaataactctccaaactagctgacatccctaaagttgctaaaatggttacttggtctctaagacctctgggctttcctggtttgcaaaggcttatagagtgtgaagaaacatagcatgccctctgttgtgctgttcagcctccttttgttatcacagccatgcccccaaccctaccacacagccctcaccactgaagggttgctgccagcaaccccctgacctttttttttttagacaaggtctcactgtgtcacctatgctggagtgtagtggtgtcatctcggctcaccacaatctctgcctcccaggttcaagcgatcctcatgcctcagcctcccaagtagctgggacaacaggcatgcaccaataggcacggctgatttttgtatgtttttgtagagatgggatttcaccatgttggccaggctggtcttgaactcctgacctcaagtgatccacctgcctctgcctcccaaagtgcgtgaaccagtgtaagccaccacacccggcctgtacccttttcttgtaggtgcttttcccggcacctcccaggccagggacctcaaaagaaagcaattgtttcccctagaaatttgaggaaatgaaaatctcctgactacgtaagcagcttttcttagtcatggtcatcactaaattatctgtaccccaaagcatcaagtatgagtacaatcttcatctttttttaagtttttggaacatacactagataggcaatagattgagttcaaagcaggaagaaaataaatgatgtcaggaagaataaagcacaagggatacatcagggacaagactggagaaatgaaatagttcctcgagtgagagcaccgaagctagctactccattgtctcttcgtcaaatctatgtcaatatttacatagtacctttccggttcttcatctgtctactcctgctaaaacatacttcatctgtgatcccatagatgtcagagaacctaaacaggtattctgcttctagtttttagattaataggtttctgatacactggcccagatatacaaaaatcattgcctttgtctaaaactttacattcatatctcattctcaattcttaattcaacagttagaaagaacaaggacatacaaatactaataatatgaagaataagtcactctttttttgtgtgattaggttcatcctgaaaccaaagaaaatgagatctaccctgtctggtcgggacttccatccctgcagatggctgatgaagagtctcgcctttctgcttattataacctgctccactgcctacgcagggattcacataaaatcgacaattatctcaagctcctgaagtgccgaatcatccacaacaacaactgctaagcccacatccatttcatctatttctgagaaggtccttaatgatccattccattgcaagcttcttttagttttatctcttttgaatccatgcttgggtgtaacaggtctcctcttaaaaaataaaaactgactccttagagacatcaaaatctaaaa

SEQ ID NO: 66 - DNA, 7635 bp, Mus musculus
  source 1..7635: mol_type = genomic DNA
gaaagctgtggttctctcaggccatcttggagaagtgtgttcccagcagtcaccatgaccatgaacagccaggggtcagcccagaaaggtatgttctgtagcttagtgactatgtggctttctcagtattcctgatatggcataggggcatctactatgacattttacctaatacaggcttcaattttataggggtatggaaaataactgtctttctccagacatggaatgaccagaaccacccacacagacccaagacaactgtgacgttgtccaaaataactttgttccttattcatatctgcaaataaggaaaatacaaagataactggtttagagcaagagtggtggggttgttgatattccacagaaggagatgagaacatcatgggacacttaccttgtactccagctaagagtgactacccatgctgaggtcagtctcagagattcagttgtctgtgagttaacaatggagtttaaagtaatagcctattcattgatgtagaaattattcatacttaagcataacagactatgagatcagtggctctctagctggggagacacccttctacagagatgtgacacatctagagatatccagaagtgaatagtgatggcatagtggaagtaaggaagaaaaaaggaagctgctacttgtagctaatgggtagaaatcatggacacactgaatcccccactactgcaaactgatcctggaaacaagtagcaacccaggtcacaaagttggtgttgcagagactgggaacatggactgacacagacaagaagaccctagggtctaacagtcacaattctagaaggaagcaagaaagattttcttgctgccaggtctcactgagagttggttagtgagttctaataaatgtgacaaaatcttcagcaaggcaggaataatgcacatagtgatagcagggatctggtttatactgttctgaaattttgtttgaatagaagtggcatttcaatagaaggggaaaataaagaggctagtattaactaattgtctttgctttcttggtgacatttgaaaaaaaacaaaagaattaatagcaacataaaaagttttgtgacatatatgagaaatcccttctttaatttttatttcattttaaactcaaaacctctcagacaataaatgttcagattaatgtactctgttagagttagaaaacatctatacacttattaattgtaaaatctactgctgcagtaccattatcccgaaagcatattttttcacacatgtagataaactctgaagccttgaaagtataaacatatattcatatatattgtgttgtgtaaatatatttgaagtgagatttgggaaaattagaagtatttttcaagaaatatatcccaataacattgaaaatcttcagctagtgagctatttaacagtgctgtatagtaattttgtggttaacattgaattaaatattaaaaattcttagagaatgtgactactcaagaccagaagaaacttccacgatatgaaattgtcttaagacaataacttagtacactagcttagattaatttatactcagaatgtttgcaaagtgaacaagtacttctgagacaagtgcaaagatgacaaaagctacactccccacagcacatagctcggaaaatgttaatattgggtaaacataatgtgtagagtgttgactctcccttcactacaaatgcaagcacacatgtacggtgctgggggcagataaggttctcttcagctgagtagattattacacacccgttcctgtatttttttttttttttaagcagggacactcctcctgttgctgatatcaaacctgctgttctgccaaaatgttcagcctctgccaatctgttccgctggtgactgccagacttctctccgagagctgtttgaccgtgtggtcatactttctcactacatccataccctgtatacagatatgttcattgaattcgtaagtacttcactcatttctggtatcttttgaaaaggatctcttcaaaacaattctgttgtatttcagttaaaacaatgatctgcgacctatatcttcaagggaaaaagaaacaccggcttatagaagctggaacaaagagaacgggacaatttcatagtcttacagatttgcaaaagtgaagcgaccttcaatattttataatttgtgttttttcaatgtagacttgaggtgtgcagccctcgatgtagtggcagaagtcttcacagtctcgtatgtgtgagtccacgatctaggagactttttcatgtagtgctctgcaaacgccgatcgagcgaaggggagcagcatggcaggagtgaactctgtggatgggctagaattaacctaaactgaagccacgcagtaatgggaataaaaaaataatcagtcctcagacccaaacgttcagagccatttgttaaaactttcatagccggtctctctctctctctctttctaccttctctcctttctccctgcctttctacaataaagctctaaaaccatagacaaaccaacaaacaagcaaagctttcatggcatggtttcaattaaagtaggaagcctagttcagaggcagagaaaagtactctgttgttgattcaggccttttagaggccttacttgatttctttcagtcaattcacaaggcacttgtcagagataacttcagtacatcagtgggtattcagaaagtggtttatcacttacactaaatatgaattcataatgttctctttattaactaacatctctttcaattattgactgctcataattcacttctgaaatcttcctagaaattcttctaaatattcagatttttttactaaattttagtttataataatactttatacaagtaccaaccggggaacatatatgagacagatctaagtcctttaaacttatgtaacagttgtgtagtttggtaatcatggatgcctaactagaggaacccaggttgtctgattctgctgcctgcttttgagaccctttcccctaactgggctgcctcttctagcttcacctgttcttctgttgagaacttcacctggctttactgcaacttgatatgccaaggcctccttatatccatgagaagcctttcatcaagtaaaagaatggaggcgtgaatgggtcgggacattgggggaaggacttagaggatagaaaagaagataaactacagtcaggaagaaaagtaaataaataaattagctaattgaataaaaccaaacaaaacgaaaaatgatattatcaagaaagtaaaattcaatacaataaactagtaatggaagaaacataaattaaaattttagaacattattcaaatgagttaacatgaattataacttatatattaaataacttttctaattgaatttttcactgtttaatatttttcaaatatgtatgcctggtgttctatagttaacttagtcacaatccacgtccttatattcagcatttatgaagaatttagtcctgtgcaagttcatagattcagaagtatttgaatgaaaaactgtgttcaataatgcttaaatgaaagaatcatatcaatccaaaactacaggcacaataaataagtaaacaaaaataatacatgatatggcatttacctttaacatgagaaatgacatgtaaaggacatttttacatttaaggtatttttagtgtttactttctaaatagtaatttattaaaaaaagagaaaacagagaagtaaaaaattacagactaggctgggaaataagtagaaaagggttacttaattccttaattgtaagtgttttgctaaatttaaattaaatatctattaggtgcatggacattctggttatatatgttttaaatacccagactttgctaatggaatttctattacaatttctaggataaacagtatgtgcaagaccgtgagtttatggtcaaggtcatcaatgactgccccacttcttccctggctacacctgaagacaaggaacaagccctgaaagtccctgtgagtcctcagcccatgttcttcccgatatcagtgaggcagtacactggttttggtgtattccaggttatcagagcactgagatagctatagtaaagataaaagggaggggagacagtgattggccaaagcaaatacacattgcagggtgggggaaaaaaggggaatatttaacaacattgtagctgagccataaactgtccatgaagatgacattgcatatgtgatactgtagaaaactttgaactggacttcatgattatgagtaaattgacattcctatatataggaaatatgtaagaaatgcataagtaagaaatatcaatttagttgtgtttgtgctacattctgggaactcgtccattggcagtctccattactaactactgcacatcactcccgagcttgcaagttctcctggttgtgctcttccttacttaactacatctgcatttgtcccagacttctttgccttattctgtatcttatattgaaagtcccctcaccaagaagtatttgaaattttgcttttttgtgccttcacaggtataactggattctcatcggataataatgtcttaatgttatcgcaggcctagttattatttttatataccatgccataaccaatctcaacataactaaataaaaatatatacacaagagaattatgttatgggaaattcaaagagagactttgtctcaaaatggtttggtccacttgactgacaccagtgatatttatctttaatcaatcaatcaatcagctaatatatatatatatatatatatatatatatatatatatataaaatgtgtttgcatactatataatatatagagatttatatattttatttttattatatttacatgatatacatatatgcatgtctccaaaatgtgtatatctccattatgttctgcttaatttatcacatctcagttctacattcctgctattttcattaatattatagtgtaatagaagaaaaaatgaaataacaggctaaggaccaagagacaatactcagttaaaagtactctaatgataggaaatccacaacacccactaatgatgttcctgcaattcatcctctcaaaaattccatgttgcaatgtattattatttcacttgttgagataaagaacatgggatctagaaggtgatcctaaagttttatgagtttcgatactagtcggcctgcagtggtggcttcgtataactaaagatctcacttttctgcatatgttattatgctcccaggaagctatgttgtcattaccatttgccccttactttcccacctcaaaccttttatacttttccattttaatatctcttgaaatgctctctactcattattttcatttcatttgactaaataagtgatatctgtacagtaagtatttcaaatcagagataggttttatgtatattttgagagtgagcagacagctacttgtaggttaaaactgcgttgtggtttatagtaatgcttgtatttaagcacaatgctgtgttatttttcttcagttgtacatacaaccaatgagccattcttctagaggtgatggaaatcaagtcatgtacactgctgaaagcacattctacatcctctttttatagtttctctcttttaacattctaaaagaagaggaaaataatatattcatataatgataaatcttattctctagtgtgaaaatgatttgggttactagtcactgatgatggtggtatttatatttcccaagggcctcttgtaacccactaagttataatacccactgagtgccaccaatgctttgctttgttatgagcattcaaagtaatagaaaaagtagagcagaccatgaaggctgatggtagaattctagaggttaaccaaaacacaaagaatttgatactttagagaaaaaaaaatagtcatttaaaggctatgaggatttaagtcaattaagtatttctaagtaagtatgaaaatctgaatttgatgccaaaaccttactttaaaaaactaagcatgaatgtagccagacatggtgatgcatgccttgtatcctagcattcagtaggcacaagcaggtggacctcttgctctgcacttgatcttagcaaaaggctgagaaataataagtatctctgttctagatcataaaaacaaataaaatcacaacaaaaacaaaaacaacagaaaatcaacccatgtgatacttataatctcagcacaggaaatgtgaacacagtttagccagtcatcctaggctactgggaaagttccaggccagggagataccatatttcataatccaagatggactgcttctgagcaatgacaccaaaggttgttttctagtctccaaaaaaagcatgcatacccataaatatatacacacaggtacatacacagagagcagcacatatacacaaatacagaaatgaaagtagtcatataaacaagatattttttgttttactctttcaaagtatatgctaatagttgtttgactcctctataatattgtgatctaatcctatattaacacacatagttatgaaaatgaatattttcttcagcctctatgaacaaaacccacgtctaactaactctgttgtattttttacttgctttaattattgttcaacatggtggattagccggaagttcttctgaacctgatcctcagtttggtgcagtcctcgagtgaccctctgtttcaactaataactggagtaggtggtattcaagaagcccccgaatacatcctatcaagagccaaagagattgaggaacaaaacaagcagcttcttgagggagttgagaagataattagccaggtgagcagttccttgaaagttcagtgcttttccgactcatggaaaagctgatttctacaatgagcaacaaatcttgtaatactcttctttgtgacaagataaacaccttaaggaaaaaagcaagcacccgatctcctgtgataccttggtaaaagcccaggatctggttagccatctgtttacaaggacgagaataaatgtcaactcagaaacatagctatatatgttagtttaaacttttagatggctaattgacttgttggaccctactgatatatacctctatccatgagtttggctgaaatattacataggtctttccccaaaatatgaattctgtaattataagaactaaggatgcaaaaatgctcatatatgaattgaaattattattatttttttttctaattaggcctatcctgaagccaaaggaaatgggatctactttgtttggtcacaacttccatccctacagggagttgatgaagaatccaaaatcttgtctttgcgcaacaccattcgctgcctgcgcagggattcccacaaggttgacaattttctcaaggtcctgaggtgccaaattgcccatcaaaacaactgctaaacccacattcagtccatctctttctgagatgatccttaaaagtccacttcttcaaaagttttatttgctttatagttttcagtgcatgcttgggtgcaattggtctcctcttaaataataaaaacaaactttaaaaaaatgtcaaagtctgaaa

(The sequence listing continues in the following parts.)

What is claimed is:

1. A method of detecting stress-induced differentiation in embryonic stem cells (ESCs) comprising:
obtaining ESCs genetically modified to express a first reporter gene operably linked to a promoter of platelet-derived growth factor A (Pdgfra) gene;
measuring expression level of the first reporter gene in the genetically modified ESCs;
comparing the expression level of the first reporter gene to a reference first reporter gene expression level; and
detecting that the genetically modified ESCs have undergone stress-induced differentiation when the measured first reporter gene expression level is statistically significantly increased as compared to the reference first reporter gene expression level,
wherein the reference first reporter gene expression level is derived from corresponding genetically modified ESCs that have not undergone stress-induced differentiation, and
wherein the genetically modified ESCs are in the presence of at least one of leukemia inhibitory factor (LIF) or fibroblast growth factor 4 (FGF4).

2. The method of claim 1, wherein the genetic modification of the ESCs comprises introducing a reporter construct comprising the first reporter gene operably linked to the Pdgfra promoter into the ESCs.

3. The method of claim 1, wherein the Pdgfra promoter is endogenous and the first reporter gene is operably linked to the Pdgfra promoter at the endogenous Pdgfra locus.

4. The method of claim 1, further comprising
introducing an additional reporter construct into the genetically modified ESCs comprising
a second reporter gene, and
a promoter of Oct4, Nanog, Rex1, Lrp2, Dab2, Sox17, Gata4/6, AMPK, SAPK,
JNK, MEK1, MEK2, or AKT, operably linked to the second reporter gene;
measuring expression level of the second reporter gene in the genetically modified ESC;
comparing the expression level of the second reporter gene to a reference second reporter gene expression level; and
confirming that the genetically modified ESCs have undergone stress-induced differentiation when
the second reporter gene is operably linked to the promoter of Oct4; Nanog; or Rex1, and the measured second reporter gene expression level is statistically significantly decreased as compared to the corresponding reference second reporter gene expression level, and/or
the second reporter gene is operably linked to the promoter of Lrp2, Dab2, Sox17, Gata4/6, AMPK, SAPK, JNK, MEK1, MEK2, and AKT, and the measured second reporter gene expression level is statistically significantly increased as compared to the reference second reporter gene expression level,
wherein the corresponding reference second reporter gene expression level is derived from corresponding genetically modified ESCs that have not undergone stress-induced differentiation.

5. The method of claim 4, wherein the expression level of the first or second reporter gene is mRNA level or protein level.

6. The method of claim 1, wherein the genetically modified ESCs are human and in the presence of LIF.

7. The method of claim 1, wherein the stress-induced differentiation is stress-induced compensatory differentiation and the stress is induced at a level that does not cause cell death.

8. A method of identifying an agent that causes embryonic stem cells (ESCs) to differentiate in the presence of at least one of leukemia inhibitory factor (LIF) or fibroblast growth factor 4 (FGF4), the method comprising:
contacting ESCs that are in the presence of LIF or FGF4 with an agent;
measuring expression level of platelet-derived growth factor A (Pdgfra) from the contacted ESCs;
comparing the measured Pdgfra expression level to a reference Pdgfra level; and
identifying the agent as causing ESC to differentiate in the presence of LIF or FGF4 when the measured Pdgfra expression level is statistically significantly increased as compared to the reference Pdgfra level,
wherein the reference Pdgfra level is derived from ESCs that have not undergone differentiation.

9. The method of claim 8, wherein the ESCs are genetically modified to express a reporter construct.

10. A method of detecting stress-induced differentiation in embryonic stem cells (ESCs) comprising:
measuring platelet-derived growth factor A (Pdgfra) promoter activity level from ESCs that are in the presence of at least one of leukemia inhibitory factor (LIF) or fibroblast growth factor 4 (FGF4);
comparing the measured Pdgfra promoter activity level to a reference Pdgfra promoter activity level; and
detecting that the ESCs have undergone stress-induced differentiation when the measured Pdgfra promoter activity level is statistically significantly increased as compared to the reference Pdgfra promoter activity level,
wherein the reference Pdgfra promoter activity level is derived from ESCs that have not undergone stress-induced differentiation.

11. The method of claim 10, wherein the Pdgfra promoter activity level is Pdgfra mRNA level.

12. The method of claim 10, further comprising
measuring promoter activity level of at least one additional marker selected from Oct4, Nanog, Rex1, Lrp2, Dab2, Sox17, Gata4/6, AMPK, SAPK, JNK, MEK1, MEK2, and AKT;
comparing each measured additional marker promoter activity level to the corresponding reference marker promoter activity level; and
confirming that the ESCs have undergone stress-induced differentiation when
the measured promoter activity level of at least one of Oct4; Nanog; and Rex1 is statistically significantly decreased as compared to the corresponding marker reference promoter activity level, and/or
the measured promoter activity level of at least one of Lrp2, Dab2, Sox17, Gata4/6, AMPK, SAPK, JNK, MEK1, MEK2, and AKT is statistically significantly increased as compared to the corresponding marker reference promoter activity level,
wherein the corresponding marker reference promoter activity level is derived from ESCs that have not undergone stress-induced differentiation.

13. The method of claim 12, wherein the promoter activity level of the at least one additional marker is mRNA level.

14. The method of claim 10, wherein the stress-induced differentiation is stress-induced compensatory differentiation.

15. The method of claim 10, wherein the stress is induced at a level that does not cause cell death.

16. The method of claim 10, wherein the ESCs are human and in the presence of LIF.

17. The method of claim 10, wherein the ESCs are not genetically modified.

18. The method of claim 10, wherein the ESCs are genetically modified to express a reporter construct.

19. The method of claim 18, wherein the reporter construct comprises:
a reporter gene, and
a promoter of Oct4, Sox2, Nanog, Rex1, TEAD4, or Errβ, operably linked to the reporter gene.

20. The method of claim 18, wherein the reporter construct comprises:
a reporter gene, and
a promoter of Lrp2, Dab2, Fgf5, Pdgfra, Sox17, Gata4/6, PAX8, NEFL, TSHR, Brachyury, Laminin, AFP, Nestin, Goosecoid, MEK1, MEK2, or AKT, operably linked to the reporter gene.
